United States Patent Application Publication US 2004/0259086 A1 - sequence listing, part 5

SEQ ID NO: 22500 - DNA, 665 bp, Homo sapiens
  misc_feature 1: n = A,T,C or G
nacaccacctgagtcaaaagtaacctctttgccattgtagcatacagcagttgatgggagcttcacagaagttcttgaaatccacagtccttgcctggcacacttcagtgctgcaggctgacattatcgatggcagtgtccctgtcttttgctcccctagccctcccacaggctgagtaagcctctatcatctggaatacagtgtggcttctgttttactaattgaaccctgacttactacatttataatgtttctctctgctcatgtagtctttgatgagtcagaaggtcctttccacgctcacagtgtgtgtactgtgtctcatctatatgcactctctgatgggcaaggaggtatgaattacgactgaagcccttaccacatgccttacacttatagggcctctctcttgtgtggactctgaggtgaacattaagatctgaattccggctgaagcctttaccacactcatcacatttatatggtttctctctgatgtgatctctttgatgtaagtgaaaatatgaactgtaactgaagcactttccacacacttcacatttatatggtttttctccagtgtgaactctctgatgagtgtgaagaacagagctatacgcaaaatcctttccacacacattgcatttgtagggtttctcccctg

SEQ ID NO: 22501 - DNA, 1886 bp, Homo sapiens
  misc_feature 1, 2, 3, 4, 1885, 1886: n = A,T,C or G
nnnnaaaggatcccgggtatccccttagcgagacaggacctgtatttacctgccgactaactggggcttgaatggcaagctatgactgttccttcaaaatttttgagtggctttttgaaattaaaagccttctaaaagttgcatcaacatcctcctaagcccccagaggattgtaacaccaccacaaaaggccaccaacactttttaaacaaagtgaaaactgtctgacaccaatcatcttgaaaactccatggcaagtgcattagctatgatttcatcacttacaggtagagaagcttactgtctactggtgtggacactcttgctattttctttatacttaatttgcagtggcagaatggtgaagtaaaggggtctaatttcactgtgaaaaaatgaaagacaatggcagagagggccatgagtaattatttcaccatttgttagagacaaatgctaggaaaaccacagaagtcaccatttctaaaatgcatttagcactgctaacatagttatgactaactggaatcatgacaggatcatttgatttccttgtggttatagaacatgctgtattattttggttctattgatccattttagaaggtatctttctccccctacccaaatcccactggaccaacaagcctgtaactattaattaaaaaaaaaaagtatttgtgcatatgcctgagagtactgcatatataaatagctaaattaaaaaggacttgaatgccgtgaacttttgtattggtgaaatggtggctgccttctgtgataagagtctgccactccagaggagttccttatgtcagaggggaataggattcactgtatctgtgaggctggcaacgccacacacgtggttccatgtgaggacagacttcggcagtgacatcccctcccaatgtatccaggtaaccccggtacccggtcaacagagggggacaaattctccagggcacaatacgtttacagctgcctttccttcacatacttttctaattcagaactactcacaattctaagcaaattcccattcacgaagtctgtccataatgcgaccttctctttttttaacatatacatcttaaaaaacaaatatataaaaaattcttattttgctggaatgctttcaatttttcacattttacatgatcatcacatttatttcttatattgaaaggcatggtttctgttgaccatgtcgtgcaaagccccaaaaaaaaaaaaaaaaagggcctctggattgcttttcaattggtctaacacttttccttgtctaggctttggattttaaagttcatgacagccccaccaccagtagaaaccccaaggcttgcatttcctggtaatcgactggaaacgtcccctgttggccatgctaagattccttcaacagggtcatcctgcatttattctccttctgccccacccccacaatgaaacaagatagcccccatatttctaaatgtatcaagggataccactttttctcacaagtttaaataggacaagcatatatactcactctcagcataaagtatatctaaataatgtattttctattctagtggatttttaaaaaaatattttgttaaagtctttgggactccatcttgtttatctcccacagataaacacatgttccccctacgctttaggctgtgtcagaaagggaaagaatataaaatcaacacttgaatttttttactccaaactttggaattttatttccaaatttccctttagccctcccaagtagtgctgactgactctcctggtgacaggggtttgtgtccgagcccctgcggtcaaggagtgtggagcaaaacgtgggtactagggtgggaggcggggaaaggccacagcacactggcgnn

SEQ ID NO: 22502 - DNA, 1308 bp, Homo sapiens; identical to SEQ ID NO: 22128
  misc_feature 208, 209, 210, 211, 212, 213, 214, 215, 216, 217, 218, 219,220, 221, 222, 223, 224, 225, 226, 227, 228, 229, 230, 231: n = A,T,C or G

SEQ ID NO: 22503 - DNA, 1600 bp, Homo sapiens
  misc_feature 1, 1598, 1599, 1600: n = A,T,C or G
nggcccccagcaccggagccaaggccaacccagagcacgcccctggccagaccccaaaagcctcaacggggaacagaaacaggggacaggcccagcatggggagaaccccaagaaaaagctcggagccaaccccaaggacctggaatacctcaataagccagggccccgagacgtagcgggaaccccgttacaccaacctcatcacccaagagcagaaccacacagtctcctctgttgctgaaacccttctccatgggcatgccttctgccttccacaactgcaaagccctacctcaggtcaatagacagattgaaagacttagcctacaccattttaattttagaaaatgcaaaggctagagttaaaaaatatgaaggctgctaaacgagtagtacattccagaaaaaaataccactttcataaaactcactcccgtgtggcccacagaacacccaaggccaaaaagattagaaaattgagaaagaaaagttatctcaatagactgatgctcgcaaagaggccgccgttctctgcagtgaagagcctcataaattccccttcacaaggggctttttcatcctcaggagacctgagtcctcaagaaaacccttttccagaagtatttgctccttcagaatgttttatagaaaacactactgtaaaaaacacaactgcaagaaatgcctctgaagaaaacgtttttatggaaaacactactatgccagaaggcaccatctctgaaaacacaaactacaatcatcttcctgaggcagattcccactaggactgcattcaacttagagccaactgttaaacaaactgagacaaaatgggaatacaacaacgtgggcactgacctgtcccccgagcccaaaagcttcagttacccattgctctcatccccaggtgatcagtttgaaattccgctaacccatcaactacagtccgtcatccccaacaacgatgtgagaagcttcatttctcatgttatctggaccttgaagacggactgctccgagacctatgtgcaagtgacctgtgccaagctcatctccaggacaggcctcctgatgaggcttctcagtgagcagcaggaagtaaaggcgtccaaggcagaatgggatacagaccagtggaaaactaagaactatattaatgaaagcacagaagcccagagtgaacagaaagagcagaagtcgagtgaggtgaggaccacacagaaacatgagacccagactttcccatcatttagcatatgccaggaaagtgcccacacaggagaacctgggactcccaggccatagtttgtcttggccatgtaactttggccatgacagtgatctcccactttgttcatttagagagtgaaacagattagtgcacaggatgaactgtaggctgggcatggtacgtcacgcctgtaaacccagcactttgggaggccgaggtgggtagatcacttgaagtcagaggagtttgagaccagcttgaccaatatagtgaaaccctatcttcacaaaaaatacaaaaattagttgggtgtggtgacttgtgcctataattccagctactctagaggctgaggtgggactacannn

SEQ ID NO: 22504 - DNA, 504 bp, Homo sapiens
  misc_feature 1, 2, 3, 4, 5, 503, 504: n = A,T,C or G
nnnnnccgcccgggcaggtaccccagctgatgatgttccacaaaagagcaaaacatacacaatctggttccactctacagaaatcctggaactggactacaaagggaatagacagggtgtggcaggagggggttcctcacggttggagtgcgaggttagggacaggaatagaaggtaggtaataaacattcatgtggtattaacttagggcagatgtgtcaatatatttccaagtttagcataatataggtataaaaattaaataaaaagtttatatgtgtgtgtatatatgggttaatacacaacacatacctcctagagtcattacctgagaggttctacaagaaaagacagcaaattaacaaaaaatacacccagaatcaagatttgagttttggttcctttcatagcagaatggtatgcaacatttcttggaaaaatggctaatcctagggcttggaaagagaatataggagtaaagtctacaatttctcatggtacann

SEQ ID NO: 22505 - DNA, 2256 bp, Homo sapiens
gcgtccgggcggttggggcggagcagggggctggcgcgggaagcggggctgtctggctcggttacgcccccacctcgccaggaatctaggagtcggtttgttttccgaacccatctccttccgctctcccgcccctgcaggctgtgtgccgagcttggaagaaagtgtgacccgttcgacggaacaaaggacatgacagcccggccccgtgcggccactgcggagcgttaggaacattccctaaaatggcggccggcgcgtcggaacagggcgggaggcggcggcgcgtgggggcgggacggggaggggcgcggccagccgggcttctgcttccgcgaccccggcggtgcagggcgggtggagtcgcggagtagtcctcatggccgccccgccggagcccggtgagcccgaggagaggaagtcccttaagctcctaggatttttagatgttgaaaatactccctgcgcccggcattcaatattgtatggttcattaggatctgttgtggctggctttggacattttttgttcactagtagaattagaagatcatgtgatgttggagtaggagggtttatcttggtgactttgggatgctggtttcattgtaggtataattatgcaaagcaaagaatccaggaaagaattgccagagaagaaattaaaaagaagatattatatgaaggtacccacctcgatcctgaaagaaaacacaacggcagcagcagcaattgaacaatcttgagcatagaagtcaatgtaaacgaagttaagatcaaccacataaaacatttcatgtgcaataagctctcaatcaagtaaataaagtttaagttgtagtcatttttttcccacacttgtgtggaatgaaaacttgccagtttattctggccctgtgtctactgccaggatagcattcttacgtgttacatatagtggacttgtcatccttaaaatgtgaacagaatttattggcagtgtggcaaagaattataaaacatagtgtttaatgtacttggagtttccttgtagtagtaagtatagagtttgatgataagtaaacgtcccttaacaaaaacctcaaccttattactatcccattaaaaaacagcaaatacttactgagttcttgtaagagctaatgtcattgtaagatttaaaactaagggcttttatcactttgcaaattattttttaaatgcattcatcatttgacagtgttctctcatttcttaaaatgcgagtcatcttccaaaagagttgtttttaactgccctaaacatttttggggaagtatgcagggtttaaatttttaagtataattagttctgaattaaaatatgcacatggaacttgtctggcagactgatgcaatagtaaaacaactgcagaattactattaatgtaaacaatccatttgaaagtcaatcagctgctcccattaaaatattatttaaaatacaatacccacagcatctaactaaatcctcaggatttattctccgggagaaattatccctttctaggaaaatgaagttatttctggttttaattcatacaatactttaagaaaatctgttaaatataacaaaacacaagctagatgcttaagaaatgcttaaagaaatattggggcgaaggtaacagcagtcaacaggattgtggccattactggtcctattattttgatgtaccatggaaggcacagaaatcgagcaaggaagaaaatattagttattttgatctacatctttttctaaagaaaagtggagcttgcctccagttcaattcacaagagcattttccctcccatgcccaccttttcttgtggctgtcgctaggaaggatgcagaggctgtgtggtttaccaaatgccttaacttagcagtgaatgacaactgtcaaacacatgttgagggaaaatttttactgattcacaaaaaggaagacagtttgcccactcttagtggcacaaatcaaagctgcatgcactacattatccaaattagtcgtaaccaaatagttaaaaaattctgctgggcacggtggctcatacctgtaatcccagcactttgggaggccgaggcagttggatcacctgaggttaggagtttgagaccagcctggccaacagggtgaaaccctgtctcgtctaaaaatacaaaaattagccgggcgtggtggtgcatgcctgtagtcccaggtaccccactatgctaaaaataaagcagttggagtgatgaagtcgggccatg

SEQ ID NO: 22506 - DNA, 373 bp, Homo sapiens
  misc_feature 373: n = A,T,C or G
gatacggagtttcactcttgttgcccaggctggagtgcaatggcgcgatctcagctcactgcaacctccgcctcccaggatgaagccattctccttcctcagcctcctgagtagctgggattacaggctttgtagctgagcagtttctaaataacacagccactcaactgacataccatggattatgtgaactaacttcaacggttcaggaaggagaactttgtgtgttctttcggaataatcattttagcaccatgaccaaatacaagggtcaactgtatttgttggtaacggaccaggggtttcttactgaagagaaagttgtttgggaaagcctacacaacgtagatggtgatgggaatttctggtgacn

SEQ ID NO: 22507 - DNA, 1245 bp, Homo sapiens
  misc_feature 1, 2, 1216, 1224, 1238, 1239, 1240, 1241, 1242, 1243, 1244,1245: n = A,T,C or G
nngagctgttctagcaaattatttgaaccttaagcgggcagtgtgtggagccccttcgactttgtagccaattggacagaagtgagttctccttttttttggtgtgtgggtggggtggggtgtggggggggtggtggctcgcctttttttcttgtggatcctgacactaactccgggtagttagtgtcacaattgaattgtagatactcaattggtgtccggaagaatcagagaattggttgatggtgttggaaaacaccctaccaatataacacttaagttcatttttagcataatatctgactgggttttcagatgttttaatattagagaagaaatggtggtgtaagagacaaagaaataacaattatgcataaaagaattttatttagtggccagatcccaatgaataatgtcagtcattgcttggttctgctaaaatgtggtattagatatattcttaagaaagtgtacaattgcatcaccaaaagctgtttaatttggattgtgtagaataaaagaaaactacataagtctttgttctttgataaaaattttaaaatataaaaatgaaaaaaagaaacccaaaagcagtattcaaaactaacaaatgtcaccttggactatttacagtaagacgcctttttgacaggagaatcttgttctcagcttgttcttttcctcacattttacttacagggattctcactcccccatctgatccctattcataacttcttccattcctgtctcacatgaaacagccatcttccatgctctctcactcatctttgagtctctctctgacactcctttttcctactcttaaattattaataattctattcaacagacatttattgagcacctagtatgtgccaggcactgtgttaagaggtggggaacaatacagagatgaaaagacattgaccttttcctcaagaaattcagactttgggttgaattaaaaaacgtttttctttttttcttttttttttgagatggagtttttagctctttttgcccaggctggagtgcaatggcgtgatctcgtctcaccgcaacctgcctcccgggttcaagtgattctcctgcctccgcctcctgagtagccgggattacaggcatgcgccaccacaccaggctaattttgtattttttttagtagagacggggtttcttcacattggtcaggctggtccgagctcaccaaccncaggtganccgcccgcccagcnnnnnnnn

SEQ ID NO: 22508 - DNA, 388 bp, Homo sapiens
acgcggggacactagccacacttcaggtgcccagtgtccacactgactagtggtgacggcgttggacagtacagatacagaacatttctgtcatcacagaaagttcctttggacagagccatgttaagtgatgttatcacaggatggacagaaacattcccgtttgatttatttttcagacccagtttgtggagaaaaataatgatgctttacatatgtctcttgaatccttaatatgtgaatccagagataagtttatacgggaattatttgaatcatccacaaataacaacaaagatactaaacaaaaagcaggaaaacttagcttcatcagcgtgggaaacaagtttaagacacagttaaatttgcttctggataaacttcgaag

SEQ ID NO: 22509 - DNA, 1537 bp, Homo sapiens
  misc_feature 1, 1527, 1528, 1529, 1530, 1531, 1532, 1533, 1534, 1535,1536, 1537: n = A,T,C or G
natctgcctcataggccactctttcctttccctctgcccaccaagtcctcatatctgcagagaacccattgatcaccttgtgccctcttttggggcagcctgttgaaactgaagcacagtctgaccactcacgataaagcagatttttctctgcctctgccacaaggtttcagagtagtgtagtccaagtagagggtggggcacccttttctcgccgcaagaagcccattcctatggaagtctagcaaagcaatacgactcagcccagcactctctgccccaggactcatggctctgctgtgccttccatcctgggctcccttctctcctgtgaccttaagaactttgtctggtggctttgctggaacattgtcactgttttcactgtcatgcagggagcccagcactgtggccaggatggcagagacttccttgtcatcatggagaagtgccagcaggggactgggaaaagcactctacccagacctcacctcccttcctccttttgcccatgaacaagatgcagtggccctaggggttccactagtgtctgctttcctttattattgcactgtgtgaggtttttttgtaaatccttgtattcctattttttttaaagaaaaaaaaaaaaccttaagctgcatttgttactgaaatgattaatgcactgatgggtcctgaattcaccttgagaaagacccaaaggccagtcagggggtggggggaactcagctaaatagacctagttactgccctgctaggccatgctgtactgtgagcccctcctcactctctaccaaccctaaaccctgaggacaggggaggaacccacagcttccttctcctgccagctgcagatggtttgccttgcctttccaccccctaattgtcaaccacaaaaatgagaaattcctcttctagctcagccttgagtccattgccaaaaacggcacagctatctccaaacacatctgagttcatttcaaaagtgaccaagggaatctccgcacaaaagtgcagattgaggaattgtgatgggtcattcccaagaatcccccaaggggcatcccaaatccctgaggagtaacagctgcaaacctggtcagttctcagtgagagccagctcacttatagctttgctgctagaacctgttgtggctgcatttcctggtggccagtgacaactgtgtaaccagaatagctgcatgggctgaccctttggccggaacttggtctcttgggctccctccttggccacccaccacctctcgcacagccccctcctggtttttacacccaatggtagctcccttgattttaaaaaaaacattagccattacaccaccagggacaaaaaatccaacacccccaaaaaaaaacgcaaaaaaaacatttgtgcggggggcgggcccaaaaaatttttaaacacctcttgtggggccgcgcccatggtgcaacggccaaggggccaaaggacccggcggaagggggggtcccccaaaaaagcggggcccgggctggaacccnnnnnnnnnnn

SEQ ID NO: 22510 - DNA, 910 bp, Homo sapiens
  misc_feature 1, 2, 3, 4, 908, 909, 910: n = A,T,C or G
nnnncgtgttcacgtccgtttggcgccggttggtatcacggttcccaagtggtgccctcttacgcgcagccctgttgttcgcgtgtgttggcaggccgcaggctctgttcttgaggtcccgcgcgcgcccgtttgtcattgtgcggtcctgatccgtgtttgtgatgtgtcccacttggcctccagggctcgcccccccttgggcgcaattttcttgagtttggtgacacaccggccctgttcaccgggtgccaccccggtgtgttgttcttctttttctcggaccggggttctttttctgtgtccacgggcgtaccgcttcacgtgtgttgcaaattctcgggtgcacttgcaaaccttgccccccatgtggtgttcccccctctttttcttgtcgtgtcttcctccgcggtttctgtgtggtctatttgtgtcctccttcccccctcccgggctaattttgtttttttttttgttttcggtattgttttaggtagagtacagggtttcaccatgttagcccaggatggttctcgatcttccttgacctcgtgatccacccacctcggcctcccaaaagtgctgagattacaggcgtgacccccgcgtccggccgatcttcccaatttttgaagcaaagccagacactgaattttaacacaaaatcagctgacttttagacattgtgaactcctagcctgcggccaaccacttccagggttgtcagggcttccaccccacactgacccagggtggcttcattctgtaagggagaacctgccagaagcacaaccttatcttcagggatgaggccctccagggatgctacatgggccttgctctgggcaaccgtctccaggccggtcacttcaagagtgtgcacctcccgggcgcgcacgtaggcgacnnn

SEQ ID NO: 22511 - DNA, 1522 bp, Homo sapiens
  misc_feature 1, 1512, 1513, 1514, 1515, 1516, 1517, 1518, 1519, 1520,1521, 1522: n = A,T,C or G
nctaggtacgaggctgggtggccaagagatggaatccaagtgaatagtcagtaacaagcaaggtgggcaaggagatggaatccaagtgaatagtcagtttcagcaagaatttcccagcctgcaggcagctggggatcaggaaaaaaaagaaaaggaaacaaatgatgacaactatggacctggacccagtttacgtccaccaaatgttgcttgttggagagatggtggtaaggctgctggctcaccttcgtcatctgatcaagatgaaaagctccctggccaggatgaaagcacagctggaacatcagagcaaaatgatatcctcaaagtggtggaaaagaggatagcttgtggtcctccacaggctaaactgaatggacagcaggctgctctcgcttcccagtatagagctatgatgcctccttatatgttccaacagtatccgaggatgacatatcctcctctacatggtcccatgagattcccaccttctttatctgaaacaaacaaaggccttcgaggaagaggcccacctccttcatgggcctctgagcctgaacgcccatccattcttagtgcatcagaactgaaggagcttgataaatttgataacctagatgctgaagctgatgaaggttgggcaggtgctcagatggaagtagattatacagagcaactgaatttcagtgatgatgatgaacaaggaagtaacagtcctaaagagaataacagtgaggatcaaggttcaaaagcctctgaaaacaacgaaaacaaaaaagaaacagatgaagtttccaacactaaatcatcttcccaaatacctgcccaaccatcagtagcaaaagttccctatgggaaaggaccttcatttaatcaggaacgtggaacatcttcacatctgccaccacctccaaagttgcttgcacagcagcatccacctccagatcgacaggcagtacctggaagaccaggcccctttccctccaagcagcaagtagctgatgaagatgaaatatggaagcaaagacgaagacaacaatcagaaatttctgcagcagtagaacgtgctcgtaaacggcgtgaagaggaagagcgaagaatggaagaacaaaggaaggcagcttgtgcggagaaactgaaacgattggatgagaagcttggcatcctggaaaaacaaccatctccagaggaaattagggaaagggagcgagaaaaagaacgggagcgtgagaaagaacttgaaaaagaacaagaacaggagcgagagaaggagagggaaaaagacagagagagacagcaggaaaaggagaaagagctggagaaggagcaggaaaaacaaagagaaatggagaaagaaagaaagcaagaaaaagaaaaagaactagaacggcagaaagaaaaggaaaaagaactacaaaagatgaaagaacaagaaaaggaatgtgagctggagaaggaaagggaaaaattagaggagaaaattgaacccagagaacctaatttagagcccannnnnnnnnnn

SEQ ID NO: 22512 - DNA, 1575 bp, Homo sapiens
gcgtccggactagttccacgcgccgacccacgcgtccggcggctgggcgctgaggatcagccgcttcctgcctggattccacagcttcgcgccgtgtactgtcgccccatccctgcgcgcccagcctgccaagcagcgtgccccggttgcaggcgtcatgcagcgggcgcgacccacgctctgggccgctgcgctgactctgctggtgctgctccgcgggccgccggtggcgcgggctggcgcgagctcggcgggcttgggtcccgtggtgcgctgcgagccgtgcgacgcgcgtgcactggcccagtgcgcgcctccgcccgccgtgtgcgcggagctggtgcgcgagccgggctgcggctgctgcctgacgtgcgcactgagcgagggccagccgtgcggcatctacaccgagcgctgtggctccggccttcgctgccagccgtcgcccgacgaggcgcgaccgctgcaggcgctgctggacggccgcgggctctgcgtcaacgctagtgccgtcagccgcctgcgcgcctacctgctgccagcgccgccagctccaggaaatgctagtgagtcggaggaagaccgcagcgccggcagtgtggagagcccgtccgtctccagcacgcaccgggtgtctgatcccaagttccaccccctccattcaaagataatcatcatcaagaaagggcatgctaaagacagccagcgctacaaagttgactacgagtctcagagcacagatacccagaacttctcctccgagtccaagcgggagacagaatatggtccctgccgtagagaaatggaagacacactgaatcacctgaagttcctcaatgtgctgagtcccaggggtgtacacattcccaactgtgacaagaagggattttataagaaaaagcagtgtcgcccttccaaaggcaggaagcggggcttctgctggtgtgtggataagtatgggcagcctctcccaggctacaccaccaaggggaaggaggacgtgcactgctacagcatgcagagcaagtagacgcctgccgcaaggttaatgtggagctcaaatatgccttattttgcacaaaagactgccaaggacatgaccagcagctggctacagcctcgatttatatttctgtttgtggtgaactgattttttttaaaccaaagtttagaaagaggtttttgaaatgcctatggtttctttgaatggtaaacttgagcatcttttcactttccagtagtcagcaaagagcagtttgaattttcttgtcgcttcctatcaaaatattcagagactcgagcacagcacccagacttcatgcgcccgtggaatgctcaccacatgttggtcgaagcggccaccatgagatttgtgactagggggggtgccagacggcgccaagacgagaaacattaccccacactcggaagggcggaggatcagacaaaggcaacagcgacaagacaaagcctgtagcaacggctgtgattaaagagggaccaccagacgtaaacgcaggcgagaagacacacacaaagacgaggctgctgtgcaatcacagtaagatctaa

SEQ ID NO: 22513 - DNA, 1317 bp, Homo sapiens
ctaaagacaaaagaaaggtgtcttctattcaaccacagaaaaatgtcaaataatttcttcccatcctctcactcatcactgtgaaagcaaatgcacacgaccttgttaccatatatgcaggcaactatgattctgatttaggtcctagctttactttcctttagtacctcaaagctgcaagtcagattctgatattgaaagatggtaaaatggtgcagaaggggacttacactgagttcctaaaatctggtatagattttggctcccttttaaagaaggataatgaggaaagtgaacaacctccagttccaggaactcccacactaaggaatcgtacgcggggcggttccgggcgttaccatcgtccgtgcgcaccgcccggcgtccagatttggcaattcttcgctgaagtcatcatgagctttttccaactcctgatgaaaaggaaggaactcattcccttggtggtgttcatgactgtggcggcgggtggagcctcatctttcgctgtgtattctctttggaaaaccgatgtgatccttgatcgaaaaaaaaatccagaaccttgggaaactgtggaccctactgtacctcaaaagcttataacaatcaaccaacaatggaaacccattgaagagttgcaaaatgtccaaagggtgaccaaatgacgagccctcgcctctttcttctgaagagtactctataaatctagtggaaacatttctgcacaaactagattctggacaccaggtgtgcggaaatgcttctgctacatttttagggttgtctacatttttgggctctggataaggaattaaaggagtgcagcaataactgcactgtctaaaagttgtgcttattttctgtgtaaatttgatatgctatgaaatttggtttatgatctatgaatgttttcttaaaatttacaaagcttgggtaaattagattttctttaataaaatgccatttgtgcaaaaaaaacaaaaaaaaaattttggggggctggcagagaaggtttagacccttgtttggggggggcccacaataggtaatggacacgtggacaagcgcggccaagaaaccggggcagcgaaggtcgggggttcctcccaataaaacgcgcgcgggacccagggtgtcgacacccaaggggtcggcgaccctgctcaaacaggtgcaggaggcatgaagccgcccgggaggggagaagatagaacagagagtgacagaagaagaagcacgacaagcgaaaaacacacgagaacacagaaacacactaagaacagacaagagcaaaccgcacacacagaaaacaga

SEQ ID NO: 22514 - DNA, 1760 bp, Homo sapiens
  misc_feature 1, 2, 3, 4, 1759, 1760: n = A,T,C or G
nnnnacctacaagaacggaggacaggggcgcacgatggtcccggggggagcggaaacaaaggcacgcaaaacggaaaagcgtgtgtaggggagcggaaaaggaagtcaccaccgtggcctgcgacggtgttatgatgctacaacttctggaaaaagtaattgaattggaaaattggacagaggggaaaggcctcattgtccgtggggcaaaaaatactttctcttcaggatctgatctgaatgctgtgaaatcactaggaactccagaggatggaatggccgtatgcatgttcatgcaaaacaccttaacaagatttatgagacttcctttaataagtgttgcgctggttcaaggttgggcattgggtggaggagcagaatttactacagcatgtgatttcaggttaatgactccagagagtaagatcagattcgtccacaaagagatgggcataataccaagctggggtggcaccacccggctagttgaaataatcggaagtagacaagctctcaaagtgttgagtggggcccttaaactggattcaaaaaatgctctaaacataggaatggttgaagaggtcttgcagtcttcagatgaaactaaatctctagaagaggcacaagaatggctaaagcaattcatccaagggccaccggaagtaattagagctttgaaaaaatctgtttgttcaggcagagagctatatttggaggaagcattacagaacgaaagagatcttttaggaacagtttggggtgggcctgcaaatttagaggctattgctaagaaaggaaaatttaataaataattggtttttcgtgtggatgtactccaagtaaagctccagtgactaatatgtataaatgttaaatgatattaaatatgaacatcagaattactttgaaggctactattaatatgcagacttacttttaatcatttgaatatctgaactcatttacctcatttcttgccaattactcacttgggtatttactgcgtaatctggaacatttagctaaaatatacacttttggcttaaaaattattgctgtcaattccaataataattcttagcttataaccaaagagcagtgtttaaaaggagagcttctatacaaaacctattcctggcgttacttttcatacaatttttgttctgttttacctggaaataatttaccaaaataactgagtgttgctgctaaagaacaaaagtggggaggtatcagggaacaagaaaacaagaaagggtatgatcaatcattttcttctgctccaaacagctggagtaaaattcatgggaaatggcccttcatttaaaaaaagatgtacctcactacccactacaaatttggaactttgttcttttcaataattagttttctattgtaaattacctactaaacagtggtagccatgacatggaaagtcaactgattctacaattggacattcatttgtgtgccctggaatttccaactagtaataaacaactactgttgatgtagttttaaaccacttgaagggactcatgaagcatcctgcaacataaatttgcatttttacatcagaatatcttttctctgtggaacaacacctatacctgtgtataaacacttttttcacagggatagggtacacaatgtcgccccaaacgtgtctcgtatctccggcacccttttcaaagcggtacctcaagcactcgcgtctcgtgtccaatagtacccatcgctgtggtgacgaacactctann

SEQ ID NO: 22515 - DNA, 853 bp, Homo sapiens
  misc_feature 838, 839, 840, 841, 842, 843, 844, 845, 846, 847, 848, 849,850, 851, 852, 853: n = A,T,C or G
aaatgaggtagaaggataccgagctctaatgggtctataaatagaatgcagtgtgatttgtgaaaatacagaagccttatcttgtttttaaagatgaacttttatctaaagctagaattgttctcctttattaaagaccttcagatgagtggggcccttggaaggactcaagaatcccattggcttatctctctttgatttaggggaactgtgtcaatctgacagaagcactgtcgctctatgaagaacagctggggcgcctgtattgtcctgtggaatttcaaaggagatcgtctgtgtcccttcatacttggaattgtgggtattttacactgtttggaagaaagctaaaccctgaagatcagtagcccctaatcacatgtgctgcatatagccttcctgacctccatatgctgtacatgacatcaaaatgagtcaggcaattgatgtgaattccttaaagttttcctttttttaataattatttttaatttaaaaaagcaaatggaaaatgtatatttgatgagcttagggtgttttttttgaaagtcagctgaaggatggttagacagcacaggaagactgtaaatgcatgacccccccattagaatgtgatttcgtcctttttatttctctgtgggcttagtgtagttgggtttggtagatcttcaattggatattggaggagtgaacatcgtgtttgctggagggaagatcttgatggtgtttcttttccccaaaaatgggattagatattaaaattgggtgcaaaaaaaaacaaaaaagacaaaaacaaaattgtgggggggctgggacaccagaaaagttttaaaacaannnnnnnnnnnnnnnn

SEQ ID NO: 22516 - DNA, 2925 bp, Homo sapiens
ggaattcgcccttgcactgtgacaagctgcacgctctagagtcgacccagcaggatctgtgtggcagaccccttcgaggtcacagtaatgcaggacttcttcatcgacctgcggctaccctactctgttgttcgaaacgagcaggtggaaatccgagccgttctctacaattaccggcagaaccaagagctcaaggtgagggtggaactactccacaatccagccttctgcagcctggccaccaccaagaggcgtcaccagcagaccgtaaccatcccccccaagtcctcgttgtccgttccatatgtcatcgtgccgctaaagaccggcctgcaggaagtggaagtcaaggctgccgtctaccatcatttcatcagtgacggtgtcaggaagtccctgaaggtcgtgccggaaggaatcagaatgaacaaaactgtggctgttcgcaccctggatccagaacgcctgggccgtgaaggagtgcagaaagaggacatcccacctgcagacctcagtgaccaagtcccggacaccgagtctgagaccagaattctcctgcaagggaccccagtggcccagatgacagaggatgccgtcgacgcggaacggctgaagcacctcattgtgaccccctcgggctgcggggaacagaacatgatcggcatgacgcccacggtcatcgctgtgcattacctggatgaaacggagcagtgggagaagttcggcctagagaagcggcagggggccttggagctcatcaagaaggggtacacccagcagctggccttcagacaacccagctctgcctttgcggccttcgtgaaacgggcacccagcacctggctgaccgcctacgtggtcaaggtcttctctctggctgtcaacctcatcgccatcgactcccaagtcctctgcggggctgttaaatggctgatcctggagaagcagaagcccgacggggtcttccaggaggatgcgcccgtgatacaccaagaaatgattggtggattacggaacaacaacgagaaagacatggccctcacggcctttgttctcatctcgctgcaggaggctaaagatatttgcgaggagcaggtcaacgccaccttcatggtgttccaagccttggctcaataccaaaaggacgcccctgaccaccaggaactgaaccttgatgtgtccctccaactgcccagccgcagctccaagatcacccaccgtatccactgggaatctgccagcctcctgcgatcagaagagaccaaggaaaatgagggtttcacagtcacagctgaaggaaaaggccaaggcaccttgtcggtggtgacaatgtaccatgctaaggccaaagatcaactcacctgtaataaattcgacctcaaggtcaccataaaaccagcaccggaaacagaaaagaggcctcaggatgccaagaacactatgatccttgagatctgtaccaggtaccggggagaccaggatgccactatgtctatattggacatatccatgatgactggctttgctccagacacagatgacctgaagcagctggccaatggtgttgacagatacatctccaagtatgagctggacaaagccttctccgataggaacaccctcatcatctacctggacaaggtctcacactctgaggatgactgtctagctttcaaagttcaccaatactttaatgtagagcttatccagtctggagcagtcaaggtctacgcctattacaacctggaggaaagctgtacccggttctaccatccggaaaaggaggatggaaagctgaacaagctctgccgtgatgaactgtgccgctgtgctgaggagaattgcttcatacaaaagtcggatgacaaggtcaccctggaagaacggctggacaaggcctgtgagccaggagtggactatgtgtacaagacccgactggtcaaggttcagctgtccaatgactttgacgagtacatcatggccattgagcagaccatcaagtcaggctcggatgaggtgcaggttggacagcagcgcacgttcatcagccccatcaagtgcagagaagccctgaagctggaggagaagaaacactacctcatgtggggtctctcctccgatttctggggagagaagcccaacctcagctacatcatcgggaaggacacttgggtggagcactggcccgaggaggacgaatgccaagacgaagagaaccagaaacaatgccaggacctcggcgccttcaccgagagcatggttgtctttgggtgccccaactgaccacacccccattcccccactccagataaagcttcagttataaaaaaaaaaaaaaaaaaaaaaacgtcgaggttattgctcagtttcttatgtcttttttgttcaccaccctgattaaaaaaacaagggcggttccttctttattcttgaggcgggggaaatcccgcagtagccgagtgtgacacctcaaggggaggagacacacactatgccccttgcccagggcgccaccacaaaaaaggggggcctacttgttctacccccaacagaaaatccacgcgtggtgcaacaacacgctgtttttgtcaaacagagagaccccctttaacaattcaggcggggggtggcgcacaatctcacaaagccggcgaaccaacgacacaattacaccggcgcgacagtgccttgcgcgaacgcggggacaccacagcatacaccaggcgagcacggcgggctcaacgtactgagccccacggggcggcaaagggtgccacaccccacggacaactagcggggacccacacctcccaggacaaaaccgtggggacaacaaaggggctccaaaagcccgtatgtcccacaccccgctaacagggacaccagggcaaatgctgggaaacaaacgctggacgcaccggacgc

SEQ ID NO: 22517 - DNA, 1297 bp, Homo sapiens
cgtgggaaggcaatccagagcccatatgacattatgcagggtcagggatccgggttctttctatattgttcctccccattctcaacctgtagctattttttttttttttggtagagatgaggtcattgctatgttgcccaggctggccttgaagtccagggcttaagtgatcctcctgccttggcctcccaaagtgctggtgttacaggtgtgagccaccacacctggccaacatgtggctttcagttcttacttgaagacagctgctctagctagaaacttcctatcggcatctgagccagctggtagagggcattacctcccccacccccaagaacacttcttggaagttacacacaatacataaacttcaatttcaaacagttgcttggtcccactagccatgaagctggatgggacgtaatattctatctgggttgtcatgggccaaattaacattttgagattctgttaggaagacgagaattggataatgggcacctctaacagtgtctgtcagagttgacatacattgtgtatctcctgcaccaaagcatttttgagatcaagtgttcttccagctgagcagaaatttggaaggctattcagtgctgcttagtgtagcagctaataatgttccaacttctatatgatagtttgctttttgttttttgtttttttctagagacagagtctcgttgcccaggctggtctccaattcctgggttcaagcaatcctcctgactcagcctcctaaatgctgggattacaggcatgaaccactgtgcccagtctatatataatagattttagaagaaatttctgccactcagtgactgctttaaattctagagacagaggctgagagaaacttagtagcctgcctgcgcatactgcaagtacagactatataacaagttgaaagagaatcaccctggtatataatattttaaaacatgaaaaaggcattactattgttctggtctaagtactctaacaggacgatgatttctaaccctagcatcatgacatgtatatagtgtgttgtaagacatttgccagctaatagttacagtactgaagcttgtgaatacgttaattgagaaaactttaagcaggttcaaagttatcccatgatagtggcattcttatttgtatatatgtgctttccttttttatttgtatcaaggcatttaaaatgaatatatgtaacatgtacctaagttttaaaagcataataaaatgaacacatctgaaaccacccaaaatgccgaattcttggcctcgagggccaaat

SEQ ID NO: 22518 - DNA, 504 bp, Homo sapiens; identical to SEQ ID NO: 22504
  misc_feature 1, 2, 3, 4, 5, 503, 504: n = A,T,C or G

SEQ ID NO: 22519 - DNA, 2427 bp, Homo sapiens
  misc_feature 1, 2, 3, 2415, 2416, 2417, 2418, 2419, 2420, 2421, 2422,2423, 2424, 2425, 2426, 2427: n = A,T,C or G
nnngcgtccgcggctcgcgagctgagaggagcaggtagaggggcagaggcgggactgtcgtctgggggagccgcccaggaggctcctcaggccgaccccagaccctggctggccaggatgaagtatctccggcaccggcggcccaatgccaccctcattctggccatcggcgctttcaccctcctcctcttcagtctgctagtgtcaccacccacctgcaaggtccaggagcagccaccggcgatccccgaggccctggcctggcccactccacccacccgcccagccccggccccgtgccatgccaacacctctatggtcacccacccggacttcgccacgcagccgcagcacgttcagaacttcctcctgtacagacactgccgccactttcccctgctgcaggacgtgcccccctctaagtgcgcgcagccggtcttcctgctgctggtgatcaagtcctcccctagcaactatgtgcgccgcgagctgctgcggcgcacgtggggccgcgagcgcaaggtacggggtttgcagctgcgcctcctcttcctggtgggcacagcctccaacccgcacgaggcccgcaaggtcaaccggctgctggagctggaggcacagactcacggagacatcctgcagtgggacttccacgactccttcttcaacctcacgctcaagcaggtcctgttcttacagtggcaggagacaaggtgcgccaacgccagcttcgtgctcaacggggatgatgacgtctttgcacacacagacaacatggtcttctacctgcaggaccatgaccctggccgccacctcttcgtggggcaactgatccaaaacgtgggccccatccgggctttttggagcaagtactatgtgccagaggtggtgactcagaatgagcggtacccaccctattgtgggggtggtggcttcttgctgtcccgcttcacggccgctgccctgcgccgtgctgcccatgtcttggacatcttccccattgatgatgtcttcctgggtatgtgtctggagcttgagggactgaagcctgcctcccacagcggcatccgcacgtctggcgtgcgggctccatcgcaacacctgtcctcctttgacccctgcttctaccgagacctgctgctggtgcaccgcttcctaccttatgagatgctgctcatgtgggatgcgctgaaccagcccaacctcacctgcggcaatcagacacagatctactgagtcagcatcagggtccccagcctctgggctcctgtttccataggaaggggcgacaccttcctcccaggaagctgagacctttgtggtctgagcataagggagtgccagggaaggtttgaggtttgatgagtgaatattctggctggcgaactcctacacatccttcaaaacccacctggtactgttccagcatcttccctggatggctggaggaactccagaaaatatccatcttctttttgtggctgctaatggcagaagtgcctgtgctagagttccaactgtggatgcatccgtcccgtttgagtcaaagtcttacttccctgctctcacctactcacagacgggatgctaagcagtgcacctgcagtggtttaatggcagataagctccgtctgcagttccaggccagccagaaactcctgtgtccacatagagctgacgtgagaaatatctttcagcccaggagagaggggtcctgatcttaaccctttcctgggtctcagacaactcagaaggttggggggataccagagaggtggtggaataggaccgccccctccttacttgtgggatcaaatgctgtaatggtggaggtgtgggcagaggagggaggcaagtgtctttgaaagttgtgagagctcagagtttctggggtcctcattaggagcccccatccctgtgttccccaagaattcagagaacagcactggggctggaatgatctttaatgggcccaaggccaacaggcatatgcctcactactgcctggagaagggagagattcaggtcctccagcagcctccctcacccagtatgttttacagattacggggggaccgggtgagccagtgaccccctgcagcccccagcttcaggcctcagtgtctgccagtcaagcttcacaggcattgtgatggggcagccttggggaatataaaattttgtgaagacttggagatctttttttttttaagcaaatttacaagtttcaacagacaagtccacattcatccctaaaagtctcattttccagtagaaaatatacactggtaaaaacggggcatggggccgtggctcagggctgtaattctagcacattgggagaccaaagtgggaggatcacttgagcccaggagttctggatcctgtctctgcacaaaataaaaaattactcannnnnnnnnnnnn

SEQ ID NO: 22520 - DNA, 402 bp, Homo sapiens; identical to SEQ ID NO: 20098
  misc_feature 1, 2, 3, 4, 401, 402: n = A,T,C or G

SEQ ID NO: 22521 - DNA, 990 bp, Homo sapiens
  misc_feature 1, 2: n = A,T,C or G
nnctctatgtgccctcttattatctcatcggctcttaaagagggccaattgctctggtggtatcatagccccccctttttttttttgcccctcgaaaagaagttattaaatcaacacaaaagttgtgttattcggctccgcctgggtctacacagcggagcattcccaatgatgggacgccaatttaaaacccgccccggtgacagtgaacccacccctcctcaacagttgaacaagaacgcctccactcagcttgacaatgcccatgacctgagtgacttggcagagagctggcttcaggcgagttcagaaggctagcttcttcatcaggagataaactctgggagtccacctcgaatccatgcaggttgttggcatccccctgcagcctcatgagcaggcccccataggacacgtacgcagagctgaaaccagaaggcccccatcccgtgattctggagcactgccactcagcagctctcaatctcagcaggcgtgttgctgcttccagtagaagtttcatctccctcaatcctgtacactgtttccataccattacatactcaaactggtcagcctggaaggcctatcatcagtggggttgtattcaccatcatccagggtaccatcttcatacaaggtactagctatgaccaaccgaaacttgtcacccaagtctacagggtaaatttgaatgtttacatctaagattagatccatcttgaaagattcactctcacaatgcagtcgagacactcggtcaaacttcttgccctccgggtcaatatccttcacatcgaaaatatcctcaaacaggatgcccgccatcgcgagggggccacgagagcagcagaaggggtgagagcgcgaccacagttgggagtacgtgcaccccctagcgtggacaagaccggagagaaccaaacctcagtcactgcaagcttttgaggcaggctgttctttaaattagaaagccatcccaaggaaagt

SEQ ID NO: 22522 - DNA, 2586 bp, Homo sapiens
  misc_feature 1, 2332, 2348, 2372, 2375, 2383, 2387, 2399, 2412, 2425,2429, 2438, 2454, 2459, 2469, 2495, 2514, 2524, 2538, 2545,2552, 2562, 2566, 2572, 2573, 2574, 2575, 2576, 2577, 2578,2579, 2580, 2581, 2582, 2583, 2584, 2585, 2586: n = A,T,C or G
ntcgacatatgaactctcccgccacccgggaacagtggctgccaccgtttgtgttttcccgagtttgaattcttgcaggtgaccaagatggagttttctggaagaaagtggaggaagctgaggttggcaggtgaccagaggaatgcttcctaccctcattgccttcagttttacttgcagccaccttctgaaaacatatctttaatagaatttgaaaacttggctattgatagagttaaattgttaaaatcagttgaaaatcttggagtgagctatgtgaaaggaactgaacaataccagagtaagttggagagtgagcttcggaagctcaagttttcctacagagaaaacttagaagatgaatatgaaccacgaagaagagatcatatttctcattttattttgcggcttgcttattgccagtctgaagaacttagacgctggttcattcaacaagaaatggatctccttcgatttagatttagtattttacccaaggataaaattcaggatttcttaaaggatagccaattgcagtttgaggctataagtgatgaagagaagactcttcgagaacaggagattgttgcctcatcaccaagtttaagtggacttaagttggggttcgagtccatttataagatcccttttgctgatgctctggatttgtttcgaggaaggaaagtctatttggaagatggctttgcttacgtaccacttaaggacattgtggcaatcatcctgaatgaatttagagccaaactgtccaaggctttggcattaacagccaggtccttgcctgctgtgcagtctgatgaaagacttcagcctctgctcaatcacctcagtcattcctacactggccaagattacagtacccagggaaatgttgggaagatttctttagatcagattgatttgctttctaccaaatccttcccaccttgcatgcgtcagttacataaagccttgcgggaaaatcaccatcttcgtcatggaggccgaatgcagtatggcctatttctgaagggcattggtttaactttggaacaggcattgcagttctggaagcaagaatttatcaaaggaaagatggatccagacaagtttgataaaggttactcttacaacatccgtcacagctttggaaaggaaggcaagaggacagactatacacctttcagttgcctgaagattattctgtccaatccaccaagccaaggggattatcatgggtgcccattccgtcacagtgatccagagctgctgaagcaaaagttgcagtcatacaagatctctcctggagggataagccagattttggatttagtaaaggggacacattaccaggtagcctgtcaaaaatactttgagatgatacacaatgtggatgattgtggcttttctttgaatcatcctaatcagttcttttgtgagagccaacgtattctaaatggtggtaaagacataaagaaggaacctatccaaccagaaactcctcaacccaaaccaagtgtccagaaaaccaaggatgcatcatctgctctggcctctttaaattcctctctggaaatggatatggaaggactagaagattactttagtgaagattcttaggcagttttataaccctttttcctcaatagcctgtttcctgtttttaagattttgcctttgttgttgaaaaagggtttcactctgtcaccaaggcttagtgcagtgacacaattacagctgattgcagccttgaccttcccagctcaagtgatcctcctacctcagcctcccaagtagttaggacacacaggtgtgcacctcatatccagataatttttttcaatttttttttgtagaggtggggggtctccctatgttgcccaggcagatctcagactcctgggctcaagcgatcctcacacctcagcgtcccagagtgctgggattacagttgtgagccactgtgcctggccttttttttttttttaacctttttgtttaacttctctcttcactgcatcccaatccatctacaggcatgcacacttattaggaaaggaggtttgaggtaacaacagagactttcactatattttgctttgacagaaggaaagaggaggagtttctattaaaatctgtcacttgagtgatgtcatttaagtcctattttaggagataaaaacagctttggggactggttaaagtcccccagaaactacaataaagaacaacttttgttttaactcttaatcactttgtaattttgactcaatccttttctggaccatttttgttaataaatatcaaagtgtaaaaaaaaaaaaaaaaaaaaaanaaaaaaaaaaaaaaanctcgggggggggcccggtacccanttngccctatngtgngtcgtattacanttcactggccgtngttttacaacgtngtgnctgggaaanccctggggttacccancttantcgccttgcngcacattcccccttttggcccagctnggggtaaattggcggaagngggcccccgnaacccggttcgggnccctttnccccaancaaggttttncggnacgccnnnnnnnnnnnnnnn

SEQ ID NO: 22523 - DNA, 438 bp, Homo sapiens
  misc_feature 1, 2, 3, 4: n = A,T,C or G
nnnnccagtagctggtactaaaagcgggcaccaccatgcttggctaattttcatatttttcatagagacggggttccaccatgtggccttgcttggtctgaaagttctgagctcaagcaacccacctgccttagcctctcaacgtcctggaatgacagcatgagttgccacacctggctgcatgccgaatactttagagttgtttatgcctgacacttccagggcatgcagaactatggtggcattaaccgacacattaaccaactgcctcacttacttttcttttgactcagtttataaattttcttaatttaaattttaatttcaacatgtatacatctttgaaataaataaaataagctctttgaatgtttgacataacgtagaagaaattgacaaatggacatctttacttcattttctgtctcaaaatgtggt

SEQ ID NO: 22524 - DNA, 569 bp, Homo sapiens; identical to SEQ ID NO: 20236
  misc_feature 567, 568, 569: n = A,T,C or G

SEQ ID NO: 22525 - DNA, 555 bp, Homo sapiens
  misc_feature 491, 553, 554, 555: n = A,T,C or G
acagatttgattatgattttaatgtttgaaagattgcacttgtttgcttttactatagggggggtaaaatatattttctgttcacagtatatgaaaatatggagtaatttaaacagtaaataaacattctgtggatgcttatttttgtattggcaaagtatcaattaaactatatgtgttctttttcaaaaatgctggatccattcatgattggttcaaatatctaattatttcctcaacttaaatttgctttttaaattgcttaatatgtaggggtaggttaccaaatgatagttggataaggaatcatttagttatcagagcttcagagggtcatctgctttccaccaaggaagtttaagcattatggttcattagtgattttgcttgaagattttaaaaatgtacttattatttatttagcactggatttatgtgctactgatatacctccattaatagaggaatatttcttggacagagatgtgtgntctttccttttctctcttcttttgcccttacttaatcttttgacatttcccagatagacaannn

SEQ ID NO: 22526 - DNA, 803 bp, Homo sapiens
  misc_feature 1, 2, 3, 803: n = A,T,C or G
nnngtggtgtgttgtgtgtgtctcttttgttgaacggttgtgcccgttcacccggctggagtccaatggtgacctgcgtcgcctgaccccccctcctgggttcagcgtgtttctcctccctcagcctcccgagtactgggattacatggcacccctgccacgcccggctaatttttgttgattgtgtaatgtacgtgattctgttatttttagtagagaccggggttttcactatgttggccagctggtcttgactcctgacctgtgatgctgccctcctcagcctgccaaagtgctaggattacaggtgtgaccaccgcgcctggcctagactaattcttaaaggacagattagatacatacacaattgaatttagtatgcttttgtaagttaatataatgattgggaccattttgttttcttagctatgctttataacaaaatagttctagttactttcttttaaatggttactaaagtaataacttgctttttaaaaacatagtataactatttaaggtagactatgaagagtaggctgaggtttcattttaaattatctcctctttctgccatggaagagtttaattcccctgatgtgcttatggtattgaaagcccattgttggtgttggtattgaaagaaagcttagtttttctgcgtttcctaaaaggagagggaagaaagatttttaaaagtggaaatcccttgattttttttttttcttgattaggatttgtataatatatctgaagtgagactagagttcttaaagttgagagaaacagtaaatatgtacacn

SEQ ID NO: 22527 - DNA, 741 bp, Homo sapiens; identical to SEQ ID NO: 21831

SEQ ID NO: 22528 - DNA, 583 bp, Homo sapiens
  misc_feature 1, 2, 48, 49, 52, 53, 54, 55, 56, 58, 59, 60: n = A,T,C or G
nncacttgacctgcagaggcgagcttgctgtgagcaaagattgggccnnttnnnnntnnnccactgatacagagtaagaccctgcctcaaacaacaagtacaacaacagcaacaacaaaaaacaaaacaaaggaaaccaattctggaaagattacagaatactaattattttatggcatgagaatgttttctatgaaaactagtgattaactcttaaatgagaagatacaaggtgactttctttttccccttttctctgcatttcctaatttttctacaatgagcgtgtactaacaaaattttagtacaagaagcactatatagctcaaggacccattaactccaatcttgctttgcataaatatggcatttcagaagtcaagcatacaaaatactttccttagagaaataaaaatatatgtaaaagccagacaggccaacagggcgatcacattcctcagaaccgcattgtccaattcaataaccatcattcacatgtggcaattaaacacatgaaatgtggcttgtccaaactgaaatgtgctgtaaatgttaaatagacactaggtttcaaagatcttgt

SEQ ID NO: 22529 - DNA, 1656 bp, Homo sapiens
  misc_feature 1656: n = A,T,C or G
cgacccacgcgtccgcaagtgctgggattacaggcgtgagctactgcacccggcctgctttctttttagtgaaaaggatctgtgggagcttttattcccatggctgccttcctcaagtcaacctctttccccggaaatggcatcatctctggactgttgtttctccttcttccttctcctccttctcctcctcctcctcctccaccatgcccggctgatttttgtatttttagtagagacagggtttcactatatgggccaggcagatctcgaactccaaacctcgtgatccacctaccttggcctctgaaagtgctgggataccgtggcctctgaaagtgctgggattacaggcatgagccaccgcgcccggccccgttgtttcccttctaagaaacgcagtggtctctgaagcctgcaggggcaggccagccctgcactgaacgcctgttcttgccaggtggcagaaggttgctgctcatttgagcagtacctgtcacccctcctcccactgctgcggctgttaactcatcttcaggtctcacaccttctgcacataaataagctatttttaaaagttattatttttttactctttcttttctttggagagggtaccaaaggatagctgttctgtttaagtagggacctctcatggcctacaggctttgacatctgagaatcaaactggagaacattccgaagccgttcttataagtgtctccatctctacctgggctgaaatggaatgtgcaaatgtagcccagcctggtccttgggtgttgccagttgattgatgactgggagccaaagtggcatctcctttgacctaaacgggcgatgatgaaataaaactcaacagcctttctctcatcttgcattgtgagatgcgaaatagagcgtgtctctctgcctctcattttaggctgaggccgtccaaagcggccatgccccatgtttccactagatggcgctgacacttcaggcatcaaccctcatggcctctcagccttgcaaaggcagccacttaaagtcggtgtcctgtgtggggcaccaagctgagctgcagacacccagtaggcgcgaggcaaatgcgtcccattttaagaggcttgtatttatgagctctttgcttcctccctcccactaactttaaagaattgctctccatctcctttggcaaagttcctttgccctttgtcttatttttgtgaaaccctccaaggtatttccagtccatttgcatccaatctggcatctttacggagagcggtctcatatgctattgttgttaacgtggactagtatttatgtgttgagaacactggctgtttgtcaggaaaagtgtgccaaaacaaagagtacggccggccctggaaatgcatcagcaaaacccatttcccccgtgcactcattctgagcttccttccttcatttctgtcattactgctgagaactggactgtgcccagctgacctttcccttcttggcctcatcttggtgcggcggtcggcaggtggccggccgccgttgattggtttatggggggtccaaaaactcgcgttgcggggcgggggacccttgtattcttgtcggcccggttgtttcgagggtaaatcaaacgagggggtgggggcgcgcccccaggctgggtgn

SEQ ID NO: 22530 - DNA, 2076 bp, Homo sapiens
  misc_feature 1, 2, 3, 4, 5, 6, 7, 8, 9, 10, 11, 12, 13, 14, 2074, 2075,2076: n = A,T,C or G
nnnnnnnnnnnnnnaagcgggaggaactccgtcgtcctcccccgcgcgcctgcccgcggctggggaaccaagggcctggaggggaaacagctccctgctgcgttgttttgggctccgtgagccgaaagggggaggggagacgaaggagaagcaaacactgcgcagcgggaccgtgcgcggcctccgctcctgcgtgcgtgcgctcgctcgcgcgggctcatgtgctggcgcgtgaggcggaggcgggcggcggcggcggcgcctgcgcggtcggactcggtcgacggttcgcaggggaggaggcggcgggaggcggaggaggcggcggcggcgatggaggtgaagcggctgaaagtgaccgagctgcggtcggagctgcagcggcggggcctggactcgcgcggcctcaaggtggatctggcgcagcggctgcaggaggcgctggacgccgagatgctcgaggacgaggccggcggcggcggggccgggcccggcggggcctgcaaggcggagcctcggcctgtggccgcgtcgggcggcggcccgggcggggacgaggaggaggacgaagaggaggaggaggaggacgaggaggcgctgcttgaggacgaggacgaggagccaccccctgctcaagccttgggtcaggccgcgcagccgccgccggagcccccggaggcggcagccatggaggccgcggccgagccagatgcttccgagaagccggcggaggccacggccgggtcaggcggggtaaatggtggcgaagagcagggcctcggcaagagggaggaagacgaacccgaggagcggagcggggacgagacgccgggatccgaggtgccgggtgacaaggccgccgaggaacagggagatgaccaggatagtgaaaagtcaaaaccagcaggctcagatggtgagcggcggggggtaaagagacagcgggatgagaaggatgaacatggccgagcttactatgaattccgagaggaggcttaccacagccgctcaaagtctccactgcctcctgaagaagaggcaaaagatgaggaggaggatcaaactcttgtgaacctggacacgtatacctcggatctgcattttcaagtgagcaaagaccgctatggagggcagccacttttctcagagaagttccccaccctttggtctggggcaaggagtacttacggagtgacaaagggaaaagtctgctttgaggcaaaggtaacccagaatctcccaatgaaagaaggctgcacagaggtctctctccttcgagttgggtggtctgttgatttttcccgtccacagcttggtgaagatgaattctcttacggtttcgatggacgaggactcaaggcagaaaatggacaatttgaggaatttggccagacttttggggagaatgatgttattggctgctttgctaattttgagactgaagaagtagaactttccttctccaagaatggagaagacctaggtgtggcattctggatcagcaaggattccctggcagaccgggcccttctaccccatgtcctctgcaaaaattgtgttgtagaattaaacttcggtcagaaggaggagcccttcttcccaccaccagaagagtttgtgttcattcatgctgtgcctgttgaggagcgtgtacgcactgcagtccctcccaagaccatagaggaatgtgaggtgattctgatggtgggactacccggatctggaaagacccagtgggcactgaaatatgcaaaagaaaaccctgagaaaagatacaatgtcctgggagctgagactgtgctcaatcaaatgaggatgaagggtctcgaggagccagagatggaccccaaaagccgagaccttttagttcagcaagcctcccagtgccttagtaagctggtccagattgcttccggacaaagaggaactttattcttgagtcgggtcatgtggtcacctctggccacgcgggactcttgcgttcgaactctttcggaagtgaggggggtcccctgaggattgacaaagggttcgaagagagggagaggcgtacattggggagaccttcgaggannn

SEQ ID NO: 22531 - DNA, 2991 bp, Homo sapiens; identical to SEQ ID NO: 22457
  misc_feature 1, 2, 3, 4, 5, 6: n = A,T,C or G

SEQ ID NO: 22532 - DNA, 275 bp, Homo sapiens
  misc_feature 1, 2, 3, 4, 5, 6, 7: n = A,T,C or G
nnnnnnnactttcgaaatacttctagaattaattaacgcgggggttgcctctgatccttttgttatttggggcatggaaagtttgggttttccttttgattcagttccaggaaggcagcattaatcacccttaggtttcttgcctccataccctgttctcatacctcatttccccccgaaagacatgatcctcataaatctttatgggaggtaaagggattgatagtctttcttctgtaactgctttatgctgacctgaggcacagtccctacgt

SEQ ID NO: 22533 - DNA, 1339 bp, Homo sapiens
tatagggagtcgacccacgcgtccgcggacgcgtgggtcggctccagcgccatggcgccctccaggaagttcttcgttgggggaaactggaagatgaacgggcggaagcagagtctgggggagctcatcggcactctgaacgcggccaaggtgccggccgacaccgaggtggtttgtgctccccctactgcctatatcgacttcgcccggcagaagctagatcccaagattgctgtggctgcgcagaactgctacaaagtgactaatggggcttttactggggagatcagccctggcatgatcaaagactgcggagccacgtgggtggtcctggggcactcagagagaaggcatgtctttggggagtcagatgagctgattgggcagaaagtggcccatgctctggcagagggactcggagtaatcgcctgcattggggagaagctagatgaaagggaagctggcatcactgagaaggttgttttcgagcagacaaaggtcatcgcagataacgtgaaggactggagcaaggtcgtcctggcctatgagcctgtgtgggccattggtactggcaagactgcaacaccccaacaggcccaggaagtacacgagaagctccgaggatggctgaagtccaacgtctctgatgcggtggctcagagcacccgtatcatttatggaggctctgtgactggggcaacctgcaaggagctggccagccagcctgatgtggatggcttccttgtgggtggtgcttccctcaagcccgaattcgtggacatcatcaatgccaaacaatgagccccatccatcttccctacccttcctgccaagccagggactaagcagcccagaagcccagtaactgccctttccctgcatatgcttctgatggtgtcatctgctccttcctgtggcctcatccaaactgtatcttcctttactgtttatatcttcaccctgtaatggttgggaccaggccaatcccttctccactttactataatggttggaactaaacgtcaccaaggtggcttctccttggctgagagatgggaaggcgtggtgggatttgctcctggggttccctaaggccctagtgaggggcagaagagaaaccatcctctcccttcttacaccgtgagggccaagatcccctcagaaggcaggagtgctgcctctcccatggtgcccgtgcctctgtgctgtgtatgtgaacaccatgtaaggataacctgggctggaaaaacaaaaaacaaggaacaaaaaacaaaaatccgggcgttttggggggaaaaaaaaagctctcctttccctttaaggggcagccttgttaaca

SEQ ID NO: 22534 - DNA, 1161 bp, Homo sapiens
  misc_feature 1153, 1154, 1155, 1156, 1157, 1158, 1159, 1160, 1161: n = A,T,C or G
gcgtccggcctagtgcgcctgcgaccacacggccggggcgctagcgttcgccttcagccaccatggggaatgggatgaacaagatcctgcccggcctgtacatcggcaacttcaaagatgccagagacgcggaacaattgagcaagaacaaggtgacacatattctgtctgtccacgatagtgccaggcctatgttggagggagttaaatacctgtgcatcccagcagcggattcaccatctcaaaacctgacaagacatttcaaagaaagtattaaattcattcacgagtgccggctccgcggtgagagctgccttgtacactgcctggccggggtctccaggagcgtgacactggtgatcgcatacatcatgaccgtcactgactttggctgggaggatgccctgcacaccgtgcgtgctgggagatcctgtgccaaccccaacgtgggcttccagagacagctccaggagtttgagaagcatgaggtccatcagtatcggcagtggctgaaggaagaatatggagagagccctttgcaggatgcagaagaagccaaaaacattctggccgctccaggaattctgaagttctgggcctttctcagaagactgtaatgtacctgaagtttctgaaatattgcaaacccacagagtttaggctggtgctgccaaaaagaaaagcaacatagagtttaagtatccagtagtgatttgtaaacttgtttttcatttgaagctgaatatatacgtagtcatgtttatgttgagaactaaggatattctttagcaagagaaaatattttccccttatccccactgctgtggaggtttctgtacctcgcttggatgcctgtaaggatcccgggagccttgccgcactgccttgtgggtggcttggcgctcgtgattgcttcctgtgaacgcctcccaaggacgagcccagtgtagttgtgtggcgtgaactctgcccgtgtgttctcaaattccccagcttgggaaatagcccttggtgtgggttttatctctggtttgtgttctccgtggtggaattgaccgaaagctctatgttttcgttaataaagggcaacttagccaagtgaaaacgcagcaacaacacacacacaacaaaaacgcacaaaagaaaaaaaaannnnnnnnn

SEQ ID NO: 22535 - DNA, 1203 bp, Homo sapiens; identical to SEQ ID NO: 21765
  misc_feature 1, 7, 9, 11, 1199, 1200, 1201, 1202, 1203: n = A,T,C or G

SEQ ID NO: 22536 - DNA, 562 bp, Homo sapiens; identical to SEQ ID NO: 21327
  misc_feature 1, 2, 3, 4, 5, 6, 7, 8, 9, 10, 11, 12, 13, 14, 15, 16, 17,18, 19, 20, 21, 22, 23, 24, 25, 26, 27, 28, 29, 30, 31,32, 33, 34: n = A,T,C or G

SEQ ID NO: 22537 - DNA, 585 bp, Homo sapiens
  misc_feature 1, 582, 583, 584, 585: n = A,T,C or G
ngtacgcttcccttggcaccatgttataccatctgtgctgggctgaatagtgtccccccaaaattgaataatgtccccccaaaattcgtgtataccctgaacattagaatgtgatcttacttggtattacttggtatagggtgttgtagaaataatcaaataaagatgaggtcatactgcatcagggtagaccctaaattcaatgaccaggatttttataagtgaaaggagaggcggattcagagaaaaagacacagacacacacagagagaagacagccatgtgaagacacaagcataaattgaagtgacacagctacaagccaaggaatgccaaaaattgctggtaaccaccaaaagtaggaagaggcaaaggggagtttttttccagagaccttggcgggagcatggccatgccaacaacttgatatcagacttgtaatccctacatctatggcagaataaatttgtgttattttaagccactaagtatgtgctaatttcttatggcaaccctaggacattgatgtgccattggagtagcctgttaccactttgagaacaagaagctcactttgatgcnnnn

SEQ ID NO: 22538 - DNA, 687 bp, Homo sapiens
  misc_feature 684, 685, 686, 687: n = A,T,C or G
acagagaataacataatgacaggaaggggctggttatatttctcagagaccaaaaatcttttacatttcttcttgaccgccccccctccatttttcagccttggtaattgcaaaaatatatgaaataggtatctaaattttgcctttctgtagtattcttaatgccagtttcatttaggataatccaatattatatggcactaacttcagtaagtagctacttggttgtggttttcttgggtacatggttcagtagctctctgagtgatttctagatgaaaggcaatataaataaaagttttctgccgtgacttaaccaatgaaatgagtctctttgcgtatttcttttggccatttggtggaaagtaatgctttaaggaggaagctacatatgaataaattgaaagtgtctttctaaggcaactgtgaaacctccaaaacaggaacttctttataacaagaacattctaaaaaagggtcagtatatgcttgactgggccttaaacccatggtttttctagaacaccaatgtttaaatacttggcgtttttgcggtgaaaagcgttgttcgtatttggaatactgactacaggggaagggaaatgtgcctgtaaaagcctccacttttgtgttatacaaaaactttgtccactctatatctaggaggaaccttttttttgaaannnn

SEQ ID NO: 22539 - DNA, 718 bp, Homo sapiens
  misc_feature 713, 714, 715, 716, 717, 718: n = A,T,C or G
ccgcaaattttaaatgggtattatttttcatcttcaaacagcagacctgttatcctaaactaagtgagtcagcttttggtacatgtgatgattttcagtgtaaccattgacgtaatgattctgccaaatgaaatataatgatatcactgtaaaaccgttccattttgattctgaggttactctactaacaagcatcacacatttgtattttgccctgattaatatgttggcttcgctttcagggtttttaatgaccacaacaagcaagcatgcagcttactgcttgaaaggtgaggattggaaatgttgggactattataattgcagaatacatgatgatctcaatccaacttgaactctctcactgattacttgatgacaataaaatatctgatattctgcattcccatgtagcattttaattgaagtctgtaaatgtggctaaaagtcttgtcttattttttgagacagggtcttgcctcacccaagctagagtgcagtggcctttgaagcttactacagcctcaaacttctgggctcaagtgatcctcagcctcccagtggtctttgtagactgcctgatggagtctcatggcacaagaagattaaaacagtgtctccaattttaataaatttttgcaatccaaaaaaaaaaaaaaaaaaaacgaaggcggccgcaagcttattcccttttatgagggttaattttagcnnnnnn

SEQ ID NO: 22540 - DNA, 562 bp, Homo sapiens; identical to SEQ ID NO: 21327
  misc_feature 1, 2, 3, 4, 5, 6, 7, 8, 9, 10, 11, 12, 13, 14, 15, 16, 17,18, 19, 20, 21, 22, 23, 24, 25, 26, 27, 28, 29, 30, 31,32, 33, 34: n = A,T,C or G

SEQ ID NO: 22541 - DNA, 1090 bp, Homo sapiens
  misc_feature 1: n = A,T,C or G
ngagatgagagctcaccatgttgaccaggctggtctgaaactcctgtcctgaaacaattctcctacctcagcatcccaaagtgctaggattagaggtgtgagccaacacactcagcctaaggatatgatatatgaaattaatccctgagacatatcagtgaggttctgattaaaacaagtagagagtcatcttcattttcaagatgtattatattttagcagtgtccttttcttgaagttcaaattaacattcatatttgtatagctgacctctgcaaacatggcagacatgaggatttaatatgactttctctcaatttcagtttatgttcagttttggaattgcaagagaacagcctgtcccctagttttcctaactagcctctttggcaacaagtgggaagatcagtactccatgttggttggtagtattttaaatctgaagcattttcagagtctaaggcaattcagactgcacagctgtcaactcaggagtcccattaaactgactctaaaaattcctaaaagaaggcatgatttattataagcaaatggctaacctggcttttttggtaatagaattttaaatgaaaataaaattatacaagatacacattgtttggatttttaaaaactctattaaatgtttaagtggttgtgaatatgaggaataattaaatgttaaccccagctgattagtgaacatataagaaaatggggggaactgatcccaaaagatcttctcttctaaggagaacttcacttgaggggcaaacactagaagatacaattgttattgtaaaacaaacactaatgagagtccgtcaaataattttaaaagaaaatagaacgcatttgcaactttcaaatgcatttgatgcccaacaatttcatcacctaccctatgtttaaaactgggaggcaatccagaaactaaaaggaatcagaaatttgcaaaaatatgtttgcgatacactatccaacacttgtactgacaacattagtgtagatatttcaacatatgttaattttaaggagtaagttcggcagatgggcttctaaattatcaaatttcaattaagacggacgc

SEQ ID NO: 22542 - DNA, 508 bp, Homo sapiens
  misc_feature 1, 2, 493, 494, 495, 496, 497, 498, 499, 500, 501, 502, 503,504, 505, 506, 507, 508: n = A,T,C or G
nnagtgttaagcatctaaacgttagagtcccagaggaaggaggagtcccggacaggaatcatagcgttggtgtcactgtttttcatctaaatgaaaaataaaaacaagtcatacatgaaccctggggaagtagatattataattattttagaaatgaataaattaaaatttaatatacataaaagtcacaggggaccttttaaaattcagttccccaggactagagaactgcagtggatctggagaggccaaggacctacagtgataacaagcaccccagttgattgttgagacgtggtcccaaggtcactctctgattacttaggcttggcaatgcttttcaagatttgaggcatatggcatctcaaaaagatcaccttacggctgggcactgtggctcatgcctgtaatcccagtactatgggaggctgatgcggatggatcatctgaggtcaggagttcaagaccaacatggtcaaaccccatctttacnnnnnnnnnnnnnnnn

SEQ ID NO: 22543 - DNA, 2435 bp, Homo sapiens
  misc_feature 2433, 2434, 2435: n = A,T,C or G
cgacccacgcgtccgctttattatcctgacgtcttgggtcttttaagtatatacttttctgaaaggtatccattttgtaggcttgggttcttcatgagcatacgattgtttatttttgctgctgttctcaacatcatcattgcctgctgatgtgccacgatgctgctccaatagacagcaataagattgtctctaatttgagcagtaacatgattgcaagagaccaagtttcacagcttgtaaagttctgtatttgggattcttgcttatttttccgcctgtgtttttctgagaacttattcctgatgatcaattgaatccagtagtttttctatgctatttgttgttgtataagctactgtaagaaacttatcataaggaaaaatagaaaggaaaacttgaatcaatactcattgattaaaatggaataaagaaagagcagctgccacttttaaacaacataaaggaatatctttttttgtctccgtgtaggaaatcccataagttcttatatttgttccagttcccatttcctgccattgaccagataacatcattgactttcaaatgacttttagaagtgataactcttaatttcctaatagatactagattgtattgaattctgttttaattattctctaggtaagtatgttttaggattaaataccttttacagatactgaaagtgcctccttttgtggtgtaaaaaacaaattatggtgcaaaaagtaatcactagattgaaatacatgaaggttttttgctttttgacatacgaaaatgtcaagagaaaggccaaagatttgtactttttcacttacaaagcactcctttttcccttaaacttctttctgtcaaattagatttaatgagagagtactatttttaaggagctatctgtttatgtagaatgattttgttaagagtaatgtaaactattattgagtagaggcctaaagaggactgtgcatttttgctatttaaaggaatcacaaatgatcatacttaagtgagcaaaaatgacaagttttactagctaagtagagaaataaatctcaaatgcagcgctacaattttcattatcttaagtacattgtacatttctacagaacctgtgattattctcgcatgataaggatggtacttgcatatggtgaattactactgttgacagtttccgcagaaatcctatttcagtggaccaacattgtggcatggcagcaaatgccaacattttgtggaatagcagcaaatctacaagagaccctggttggtttttcgttttgttttctttgttttttcccccttctcctgaatcagcagggatggaaggagggtagggaagttatgaattactccttccagtagtagctctgaagtgtcacatttaatatcagttttttttaaacatgattctagttaaatgtagaagagagaagaaagaggaagtgttcacttttttaatacactgatttagaaatttgatgtcttatatcagtagttctgaggtattgatagcttgctttatttctgcctttacgttgacagtgttgaagcagggtgaataactagggcatatatttttttttttttggagagaagatagaagttgaatggtttgatgcatagcacatactgtcgttgtgtggtgttatccaggaaaacattctgcatgttgtatctagtctgatgtacttatccatctcattacaaacaaaaacacacagactgcatttgtagctctgtaatccttgaatacggaagtaaattttcttctttcctgactttgacattgtagctatactgtttccatttttgtttttacaaatcctttgggtctaattctgtgagcctacctatagcactggattaaaatgtctgcatcatttctttagttatccagttaactttaaaactgttgtaaaagtgtaaaccagcccatgacaggtttttgtacatgttaaagaacttcattgttcagttttcatgattattgtgtaaggaagactgatgtagatgttctgtgctgtcctggaccatgttaattacacttacgacgtattttagttccacatcacaatgatttgtccccagtgacccttttatcctttctaggcacatttcttgttgttgttgttgttgcagttcccctttgcattgtattgctttgacaactgtaatttgaatcagatctgaaagaggtccagaataaaatatattttgataccaaaaaaaaaaaaaaaaaaaaaaaaattgtggccccttggccctgagaagttttaaacctttcgttggggcgggccccgtgggttatgacctggcctagcgttccaagaacccggccggactggggtgggttccccaaaaacccgggacggcgtcgaaaatccggggtcggccccggttccgggcagcaccccgcccgcgcgnnn

SEQ ID NO: 22544 - DNA, 1103 bp, Homo sapiens
  misc_feature 1102, 1103: n = A,T,C or G
ccgcaccactgcactctagcctgagcgacagaacaagatcccatctctgaaaaaatggatgagtgaattaaatttcaaaatagagatttaatggaaaaatgagaattgttgtgtacatgatttatgaagtggcttacataatataattttggacatgaaagccctgaaaaatagcttcttattttaaggatgaacagactgggatttatttctgaaattctataattctcagtcagttgtaaggctttcattatataatagacttttttttttaaccaacggaagttggacctcttcaaaatgtgagatccaaaaaggttttggatattgtttgaataactctcttctccaaaggagactgtttttgaaaaatgattctttctgacatgttaaaattgaatatttttgacacgccaaatgcaccaaagtattatatgtcatgtttattgccgagagtagctatatagcttgtgggagacagttaacgtgaagctttcttgcatctggaagtatggggagagagaaggcttcttcacaccccctttcatgttatattctacagggaaagaatttctatcatgtagacactaggtgactcccttgtggataatttcatttaacaatgatttctgggtgttgctctatgccaggcactgttctaggagctgatgcgaaggctcagctgatgggctacagacctgaaggcctgtgctcctcagtggcactctgtaggtagatacagagccaccatctactgggtgcttctcctgagtgtgacagtgtaggctgggacacgatgctacccttcaaggagcttgaagctaaggttctgtgcacagataaaattagaataaatgcagagatgctataacaagatgtcttagaaaaaagaaaaacaaagaataaatgcagagagaaagagaaatgtataaaaggtagagagataaacataccacaagttcatagaaaagaaaggctgtgtgtttatctgtggctgggatgatcaagaaatgcttcatggataaagagcctttgagccagacattgaaagaaaggtaatgttggacttgaggtcttggagtatcctcgttgaaggaaacann

SEQ ID NO: 22545 - DNA, 1262 bp, Homo sapiens; identical to SEQ ID NO: 21868
  misc_feature 1, 2, 1261, 1262: n = A,T,C or G

SEQ ID NO: 22546 - DNA, 976 bp, Homo sapiens
  misc_feature 1, 2, 975, 976: n = A,T,C or G
nnactttttttttttttttttgagacggagtttcactcttgtcacccaggctggagtgcaatggcgcaattagggttcactgcaacctctgcctcccgggttcaagcagttctcctgcctcagcctcctgagtagctgggattacaggcatccaccaccgtgcccagctaatttttgtatttttagtagagacggggttttgccatgttggacaggttgatctcaaactcctgacctcaggtgatctaccctcctcggcctcccagagtgttgggattacaggcatgagccaccatgccaggctgctaattctcctttttagtgagttagggaactgagcctcagaaaacttaaacgatttctcagaaaacactcaagtgataaagtggccacattggaaaggagtttttatcttctcattgtcaggccagtgttcattgcacaatatcatgctacctcttgaatctttaaaatattcaattggcaaatgtttttcaatgtgatttactcatgtcttaagtgtatgaggaaagttcaaagcaaaatagaaaggaataattcaaactgaattgtccataatcagcttccagtctttcatgctaatcagcttcttaagagactgaagtatggcatacctacaggggaattccttcacaccatagcctgtatgaacagtgttccctggagttctccagtgctcagcttgagaccttgatacacgggccatgagccctgtcttccccaatggaaatttatttacacttaccttatccctatggacttagtctgattttattggctaggagtctaacagtcctgtgtggatatacagttttgcccatgacaacaaaggaatctatccgaaatatctttttttttataataaacttccaagatttgctgtcttccagcacttgagttaaagtaggtggagtgatcatcagcctgggcaacacggcaagaccctatctctann

SEQ ID NO: 22547 - DNA, 1029 bp, Homo sapiens
  misc_feature 1026, 1027, 1028, 1029: n = A,T,C or G
aaaaggaccatcaaaataacttttattatagtagcaggcgtaaacactaaactgaatattccaaattgtgtcaaaaataacctactagagacgagcttctagaaaacctattgttgaactgctctgaagctatcattttaactataaattactgttgttaaaattttatataccctggttgcaaattagaatgttttaaaaatatctttaaccacgttaaaacaatttgaacaaaatcttaccccatctaaaaatgatagtgtttagttgaatttaagttaagctctttagtatatgaccatatgaaggggtaaagttttaatcttttttgttatttacatgtgaaaatacagaaactaagtgattgaatcacatcctacacgaaagtttttggagtgctccaggcatatcatgtgaaatacagaggtatttatatctcttttggcaccaatagttcttgcttcagtaattcaccagtaggttttcattcatcgataatatatcagtttaaggctaaaataaaacacctacatttcttagggcttatcattctatatagaaagaggaaacatcctaatgagttttttcttttgtttttccaaagagattctaagcaaaaaaattttaactaacatctatattttgttattggagctagttacctttctttttcttagattctttaacgttttgagtagatagccatatttgataagcaggttggatgcttctgttgcttaggaggtaggtgtattgtgttatatgaagacagaatgaatttaaatatacccagtttggcagtatgaaaaagctcagactacataaaacttggaggtatggaacctttggacgcattaaagttaacgtttcattaggcaatgtgcctttgtttgactggtgtgtaagtccttcttccaggtttgtacgctcttaaacgcgttattctaccctctctaactcctcccagcagcaaaagggagacacttcagctggaacaaaatagtggaagaaatggctgtctggggnnnn

SEQ ID NO: 22548 - DNA, 1600 bp, Homo sapiens; identical to SEQ ID NO: 22455
  misc_feature 1, 2, 3, 4, 1598, 1599, 1600: n = A,T,C or G

SEQ ID NO: 22549 - DNA, 2078 bp, Homo sapiens
  misc_feature 1, 13, 2078: n = A,T,C or G
naccgaccccccnatccccctgcgaccccctttcggctcgggacgcgcgccattgtgttggtacccgggaattcggccattatggccgggtggaaaactcagtatcacgtatttaaacattttttttcttttagccatgtagaaactctaaattaagccaatattctcatttgagaatgaggatgtctcagctgagaaacgttttaaattctctttattcataatgttctttgaagggtttaaaacaagatgttgataaatctaagctgatgagtttgctcaaaacaggaagttgaaattgttgagacaggaatggaaaatataattaattgatacctatgaggatttggaggcttggcattttaatttgcagataataccctggtaattctcatgaaaaatagacttggataacttttgataaaagactaattccaaaatggccactttgttcctgtctttaatatctaaatacttactgaggtcctccatcttctatattatgaattttcatttattaagcaaatgtcatattaccttgaaattcagaagagaagaaacatatactgtgtccagagtataatgaacctgcagagttgtgcttcttactgctaattctgggagctttcacagtactgtcatcatttgtaaatggaaattctgcttttctgtttctgctccttctggagcagtgctactctgtaattttcctgaggcttatcacctcagtcatttcttttttaaatgtctgtgactggcagtgattctttttcttaaaaatctattaaatttgatgtcaaattagggagaaagatagttactcatcttgggctcttgtgccaatagcccttgtatgtatgtacttagagttttccaagtatgttctaagcacagaagtttctaaatggggccaaaattcagacttgagtatgttctttgaataccttaagaagttacaattagccgggcatggtggcccgtgcctgtagtcccagctacttgagaggctgaggcaggagaatcacttcaacccaggaggtggaggttacagtgagcagagatcgtgccactgcactccagcctgggtgacaagagagacttgtctccaaaaaaaaagttacacctaggtgtgaattttggcacaaaggagtgacaaacttatagttaaaagctgaataacttcagtgtggtataaaacgtggtttttaggctatgtttgtgattgctgaaaagaattctagtttacctcaaaatccttctctttccccaaattaagtgcctggccagctgtcataaattacatattccttttggtttttttaaaggttacatgttcaagagtgaaaataagatgttctgtctgaaggctaccatgccggatctgtaaatgaacctgttaaatgctgtatttgctccaacggcttactatagaatgttacttaatacaatatcatacttattacaatttttactataggagtgtaataggtaaaattaatctctattttagtgggcccatgtttaggctcttcaccattcctttaactggcttgaactcttttgcaagaccttgcacgcacggctgagccaaccccttcgcacaattcgcggagacgtaaacacatcccagaccgggcgcgcgaaacaacttgggcaactatcaagcaggaagcacacatggggccaacccacaacacaaagggggccgcgcctgagaaccccggcactaatcacaagcgcgacagcaacagatcggggcgcaccgagaagagaacatcatagcggtgccagcaacaccaaaaacaagagcagccacacagcgtgcacggggggtaggtagtgttggtgtgaagagcatcgcatccagggcccgacggcagcgaaactaaacacacacgaacccagcacacctagacagattgaagcgaggaggcacagacgacacacaaaacaacaacgcacgccaagagcactagcagcagctaggacggacgaacaacacgagccgaccaccgcaaacaacccacacaacaccaacacaacgacgacgaaacaagtacacacaacagcgcacgcan

SEQ ID NO: 22550 - DNA, 450 bp, Homo sapiens; identical to SEQ ID NO: 20659
  misc_feature 448, 449, 450: n = A,T,C or G

SEQ ID NO: 22551 - DNA, 1448 bp, Homo sapiens
  misc_feature 1444, 1445, 1446, 1447, 1448: n = A,T,C or G
acgcggggtaattgacattgtggacttcctggggtaagtcctgagtaaaaagcacttaagcacctgtggtacatcaaagagtctctttgagagttctgcaaagattcaagtgtggatacctgagtctatatatcaaaaagtaatggagataaatagagaagtagagagcctcctaagaagccatctgccttcaagcctgccattgaaatgcaaaactctgttccaaataaagcctttgaattgaagaatgaacaaacattgagagcagatccgatgttcccaccagaatccaaacaaaaggactatgaagaaaattcttgggattctgagagtctctgtgagactgtttcacagaaggatgtgtgtttacccaaggctacacatcaaaaagaaatagataaaataaatggaaaattagaagagtctcctaataaagatggtcttctgaaggctacctgcggaatgaaagtttctattccaactaaagccttagaattgaaggacatgcaaactttcaaagcagagcctccggggaagccatctgccttcgagcctgccactgaaatgcaaaagtctgtcccaaataaagccttggaattgaaaaatgaacaaacattgagagcagatgagatactcccatcagaatccaaacaaaaggactatgaagaaaattcttgggatactgagagtctctgtgagactgtttcacagaaggatgtgtgtttacccaaggctgcgcatcaaaaagaaatagataaaataaatggaaaattagaagggtctcctgttaaagatggtcttctgaaggctaactgcggaatgaaagtttctattccaactaaagccttagaattgatggacatgcaaactttcaaagcagagcctcccgagaagccatctgccttcgagcctgccattgaaatgcaaaagtctgttccaaataaagccttggaattgaagaatgaacaaacattgagagcagatgagatactcccatcagaatccaaacaaaaggactatgaagaaagttcttgggattctgagagtctctgtgagactgtttcacagaaggatgtgtgtttacccaaggctacacatcaaaaagaaatagataaaataaatggaaaattagaagagtctcctgataatgatggttttctgaaggctccctgcagaatgaaagtttctattccaactaaagccttagaattgatggacatgcaaactttcaaagcagagcctcccgagaagccatctgccttcgagcctgccattgaaatgcaaaagtctgttccaaataaagccttggaattgaagaatgaacaaacattgagagcagatcagatgttcccttcagaatcaaaacaaaagaacgttgaagaaaattcttgggattctgagagtctccgtgagactgtttcacagaagggtgtgtgtactcggnnnnn

SEQ ID NO: 22552 - DNA, 978 bp, Homo sapiens
  misc_feature 1, 2, 3, 4, 5, 6, 7, 8, 9, 10, 11, 953, 954, 955, 956, 957,958, 959, 960, 961, 962, 963, 964, 965, 966, 967, 968, 969,970, 971, 972, 973, 974, 975, 976, 977, 978: n = A,T,C or G
nnnnnnnnnnncggagtacttctagaattaattaacgcggggggcgccgcctgcgtcctgcccactccaacgctgggtgacattgagctcaccagcgccaccgtccccggcgaagttctgcgctggtcggcggagtagcaagtggccatggggagcctcagcggtctgcgcctggcagcaggaagctgttttaggttatgtgaaagagatgtttcctcatctctaaggcttaccagaagctctgatttgaagagaataaatggattttgcacaaaaccacaggaaagtcccggagctccatcccgcacttacaacagagtgcctttacacaaacctacggattggcagaaaaagatcctcatatggtcaggtcgcttcaaaaaggaagatgaaatcccagagactgtctcgttggagatgcttgatgctgcaaagaacaagatgcgagtgaagatcagctatctaatgattgccctgacggtggtaggatgcatcttcatggttattgagggcaagaaggctgcccaaagacacgagactttaacaagcttgaacttagaaaagaaagctcgtctgaaagaggaagcagctatgaaggccaaaacagagtagcagaggtatccgtgttggctggattttgaaaatccaggaattatgttataacgtgcctgtattaaaaaggatgtggtatgaggatccatttcataaagtatgatttgcccaaacctgtaccatttccgtatttctgctgtagaagtagaaataaattttcttaaataaaaaaaaaatccagaaaagaaaaaaaaaacagttgggggcgccgccccggaaatttaacctctgtgggcgggcgcctgtatgtgaatggccggcaagaacggctgagaggtgtgtcccaaaaacgcgggcacgggtgaaccagggtgggtctgtacaggccctcccccgcgccnnnnnnnnnnnnnnnnnnnnnnnnnn

SEQ ID NO: 22553 - DNA, 448 bp, Homo sapiens
  misc_feature 1, 2, 3, 4, 5, 6, 7, 447, 448: n = A,T,C or G
nnnnnnngcttgtcaatacttctaacttaagagcaagcaaacatatttcaggtttaattttatggaacaaacactctgcttgtgaattgtccacaatatttccataataactaacacactatcactccatcaggtttcactacacaaagtattgtgaaacggaggtgggaaattttttccagggtgtttagacaagtatttaatgaaggctgaagcaatatgttctttgaggcatttaaaaatatttgaggattaatttcaccaggatggatttcttaatcagtaaactggcttagataagaaaaagtcagaatattattaatgaacctaatgttctctcatgtttgagatcagccaacaggccacttacttataccctacttgccttaaggagtatgaaagaagtccagctttcttagtctaactggtagtttccaacaactgaann

SEQ ID NO: 22554 - DNA, 612 bp, Homo sapiens
  misc_feature 584, 585, 586, 587, 588, 589, 590, 591, 592, 593, 594, 595,596, 597, 598, 599, 600, 601, 602, 603, 604, 605, 606, 607,608, 609, 610, 611, 612: n = A,T,C or G
acccatcttgtcccaagtgccaagctcttcagttgtttctgctacttaagaaagacaccatctaatctgccatatagagagcttaaatggagctgtaaatatttgggggaaagagtttggtagtgttagcctggcctgtcctccactgtattataagtagctgttatctgaaacaattgagaacacaggggaaaaaaagacccaattatgcaccaggaagtccagtgccccatttttggagaaggaaagtgagagggcattgagtttcattgattgggtctccgtggcaggccagctgccccccaggaaggcctggtattcctgtcctctccgtgaacctgcctgaaagggatataggagttattgggtaatcaggacttgtcagcacctcggttatgcaggatggttcaatccgataatgtgaatggaacctgtaatagggctgatgaaaagcactccagtttcaaaagggccttgaatgattttttgttcattttctgtttacatgtaatgtgttattgatgtcattaccttataatacggcagcttgtttcatagaaaaaccaggaattattcattctttnnnnnnnnnnnnnnnnnnnnnnnnnnnnn

SEQ ID NO: 22555 - DNA, 358 bp, Homo sapiens
gcttccatttataaagcgagatggattggaaccaagttccagggtgcccttcaggtcaaaattggtatgagtctataatatcgaatttatttctaacctaaaatatacctccttctctttttccctcatagatgctgtggttagaaatgtatatcacaaatatttccatcctaaagaagctctagtttccagtggagtcttgaacaggtaagcatgttgaaagcagaaatatcttggcaaggcatcgtcgctcacacctgtaatcccagcactttgggaagccaaggtggatggatcattttgaggtcaggagttccaaaccagcctggccaacatggtgaaaccccatctccctgtc

SEQ ID NO: 22556 - DNA, 966 bp, Homo sapiens
agggagtcgacccacgcgtccggccgcctgagattgaccccgcgcgcgctgtgcagcgccgcccaggccgcctggcgggagaacttccccctgtgcggtcgcgacgtggcgcgctggttcccgggccacatggccaaggggctgaagaagatgcagagcagcctgaagctggtggactgtatcatcgaggtccacgatgcccggatcccactttcaggccgcaaccctctgtttcaggaaacccttgggcttaagcctcacttgctggtcctcaacaagatggacttggcggatcttacagagcagcagaaaattatgcaacacttagaaggagaaggcctaaaaaatgtcatttttaccaactgtgtaaaggatgaaaatgtcaagcagatcatcccgatggtcactgaactgattgggagaagccaccgctaccaccgaaaagagaacctggagtactgtatcatggtcattggggtccccaacgtgggcaagtcctccctcatcaactccctccggaggcagcacctcaggaaaggtactggcgcgtgcggctgatcacctcaggaaaggtactggcgcgtgtggctgatgtgctgatgccaccatctttcttggaggggacgtgcccgaggagcactgccagtcttctgctgaccccgcagccccagagcacaccttgtctcgttcagtccagttcacaggagggctgaacagtgggaccaggtcgttctgtgaatttcacacttaatttttctctcttttaaaatctttaacatgaagatggcttttctaaactttgatatttgttcatttatttaaatccctttggccgggtgcatggctcacgcctgtaatcccagcactttgagaggccgaggcgggcggatcatgaggtcaggagattgagaccattcttgctgaaacggtgaaaccccgtctctactaaaatacgaaaaattaggt

SEQ ID NO: 22557 - DNA, 2075 bp, Homo sapiens; identical to SEQ ID NO: 22242
  misc_feature 1, 2, 2070, 2071, 2072, 2073, 2074, 2075: n = A,T,C or G

SEQ ID NO: 22558 - DNA, 423 bp, Homo sapiens
  misc_feature 422, 423: n = A,T,C or G
actttttttttttttccttagagacatggcctcgctatgtttcccaggctgcagtcagtagctattcattcacaggcacgatcactgtgcactacagccttgaactcctgggctcaaaagcgatcctctcgcctcagcctcaccacatctggctactgtttatatttggtgtaaggacgggatgtttactttctggaaataagttagagttgttcataattgaagttgcagaatgaggaattattgtcaataataaacattaactcaaaatcccttcattaactgtttattgccttagaattaaaaggtgaaatgtatagttaaaaaaatctacacataaactgatgtgcaattccctatacttcactcaaagcctgttgcatcccaggagtaaaatataattacaaatcagtactatagann

SEQ ID NO: 22559 - DNA, 790 bp, Homo sapiens
  misc_feature 1, 2, 3, 4: n = A,T,C or G
nnnnaccatgagactaaatgaactcatgacattttatttgaatccattgctggttttgttttcccagatttaaggaaaattttcttttttctcttagactacctaattgcttacagcagcttggtagattactcctttataaacaaaatacgaattactttttctccctacttgacccgtccagaattcagaagctattagtgactatccttttttcatggcaataaagttatttatgtaagttcaataagaatctgttctcttcgtaacagaacataattggaagcattggttttataaccaaggttttgactggaacgtcgtacttgagaatgtgtatagatcagatatgaccaagcgatgcagaatttttgctccttagttaagctaaatctggattcttctgccacgaccaggaaaaattaggcatgtggacactctgaagggtgaggacagtggaatttattgggcaaaaaggaagaaaaaaaaaactttcagcaaagtgaggggtgtcctgccaatggcctccccccttcacagattgaaatatcaggcccccacacatgagctgaagagccagactcctccccctgcataaggtgcaaattcctggtcactccaccccattcctccagtgcaacatgtgggcattattcagaaagaatcagttgggaaagggtggacaaacaggggcagttctccctctgggtcgtgtttttcatctgggaccagcagtccaatctttcagccttcaggctgttttaggcctgaaggttgggtttcactgggt

SEQ ID NO: 22560 - DNA, 480 bp, Homo sapiens
tacaggttattagaatagggaagggacaccttgggcccaggagtgagtgtttcttcttttacaggtgtaactaaaaaagctagttggtctaacttgtgtgtctttgtcctataagcctctgcaggtgtgcgagcaggattgcttctgcaacaatagcctccacccagccacatcttgggaaaagaatggccacttcttggggcacagtctttttcatgctggtggtatcctgtgtttgcagcgctgtctcccacaggaaccagcagacttggtttgagggtatcttcctgtcttccatgtgccccatcaatgtcagcgccagcaccttgtatggaattatgtttgatgcagggagcactggaactcgaattcatgtttacacctttgtgcagaaaatgccaggacagcttcccattctagaaggggaagtttttgattctgtgaagccaggactttctgcttttgtagatcaacctaagc

SEQ ID NO: 22561 - DNA, 1621 bp, Homo sapiens
gtgtgttctgtgcttattcggtcttttgtttctttcgcggccggtgttttgtctgggacgtcccagtagccctatgtaccccctgggtgtcccacacgggcttctgtgcgggaccccccaattctagcaacttacgagttcgtcggcggtcggacattgcccggatcgccttacgccggggctcttcttgcctaacgcagccatggctcgtggtcccaagaagcatctgaagcgggtggcagctccaaagcattggatgctggataaattgaccggtgtgtttgctcctcgtccatccaccggtccccacaagttgagagagtgtctccccctcatcattttcctgaggaacagacttaagtatgccctgacaggagatgaagtaaagaagatttgcatgcagcggttcattaaaatcgatggcaaggtccgaactgatataacctaccctgctggattcatggatgtcatcagcattgacaagacgggagagaatttccgtctgatctatgacaccaagggtcgctttgctgtacatccgtattacaccctgcagggaggcccaagttacaagttgtgcaaagtgagaaagatctttgtgggcacaaaaggaatccctcatctggtgactcatgatgcccgcaccatccgctaccccgatcccctcatcaaggtgaatgataccattcagattgatttagagactggcaagattactgatttcatcaagttcgacactggtaacctgtgtatggtgactggaggtgctaacctaggaagaattggtgtgatcaccaacagagagaggcaccctggatcttttgacgtggttcacgtgaaagatgccaatggcaacagctttgccactcgactttccaacatttttgttattggcaagggcaacaaaccatggatttctcttccccgaggaaagggtatccgcctcaccattgctgaagagagagacaaaagactggcggccaaacagagcagtgggtgaaatgggtccctgggtgacatgtcagatctttgtacgtaattaaaaatattgtggcaggattaatagcattttggttttgtgggttgtttttttttttaattcagtttcctgctattttactgtataacatgaacagtgattaagttctcaggcaggcttaggcagtctgttattggctgggcttagttagtggtgggaagtagaagataccagacttgggaaaggaacagcaactaaccaaggagtagaaagagccaagaaatcccggagtatttatctcccccgccttgacttggccaagaacttctctacacagtggacccctctgccctgttaagttcccttggctttctaaaaatctgccctcattttcttctccagtctgtattgcactagcccatccacaagcctggctcatctgtttttcccactcctgtgcccatcttggccaaacgcaggatgaaaatctccagttgccattaaaggtggtcataaatgggctgttgatgttgcaaagcattgcagttccttggacttagtgcccttattctccagctgccgctgcagtcctcaactctgtttttcagaggacagagatgtagaacataaacttgttcttgc

SEQ ID NO: 22562 - DNA, 841 bp, Homo sapiens
gtataataccctgctcctttcggttttcttttgagacagggtcttttaatgtcacccaggctggtctcaaactcctggcctcaatcctccctccatggcctcccaaagtgctgggattacaggtgtgagccatgccatccagcctgccctgctcttttctcttctccacctggactctactcccttttgatcttgccaacttctacacacctttcaaggcaccagttaaatgtaaatcctccaggaacccttcctttgccatcctcagagccctcattggattgcttcccgcatacagcacttatcccttatgcagaattaatcggtttgtctctcacctactagaggcgttatccttgagtgtagggactgtcttatccattcttgcatcactggcatagtaggcactaaatgtagttgctgaatgcttaataagaggaatggaagtcttcgtagcttggggtagatactaatgggcagatagaaagttcccatccctgttctctgagaaagtgtcagtgttcttttagtttgcttaaaccgtgtgggtacttgagtccttttaaacgattaacgctgggaagaggcaccatttaattaattaatttgttctggaagggatcagtgtacaattttaactcagtgctttgtggatctagctaaaggtcaagaactaaagtcggctattagtgcctctggaagatatttctgcactttagcaccttctctgatgtttttccttcacctcgagctggcctcactctcttcaacaaaaccgaacctgcaggaagaatgttgtaccatatccagcatttttgtcccaacaaacatgggacaaacg

SEQ ID NO: 22563 - DNA, 419 bp, Homo sapiens
  misc_feature 419: n = A,T,C or G
acggcaaagcagtggaatgttttctgttagctgatgttttttaaaaacttaagttccttgtctttctttttctcttaatcaggattccggagtttgaatccacctttgacaattgtccgaaagacgtttgaatcaacagaaaacccagatgacttcttgccctctgtaatgacttgtgtgaactatcttaagttgccggactattcaagcattgagataatgcgtgaaaaactgttgatagcagcaagagaagggcagcagtcgttccatctttcctgattatagcaagaaatgcagtgtctgcctgttacagcaaaagaaacaaatcatgatttcttttctaatgttatcacctgagtcaaggaaacatgttacgccttcttgttgtaggaaaaacggcttgcagattataaagagan

SEQ ID NO: 22564 - DNA, 675 bp, Homo sapiens; identical to SEQ ID NO: 20117
  misc_feature 645, 672, 673, 674, 675: n = A,T,C or G

SEQ ID NO: 22565 - DNA, 696 bp, Homo sapiens
  misc_feature 1, 2, 694, 695, 696: n = A,T,C or G
nngtctccatggctatgtcctgtaaagattcacagaaaacccaattcccttaataaatccattatggcatgcctatgagtgactttaaataaacaatcctcaatgtcctcgtgtctagcctttcctccctttagggaagctggctgctaacacagcacctgaccagagtagacatttgataaatatttgttgagttgaattaatcctgccatctatccctttttactatgcaatctttatttttcctggagcttcttacttttaactttaagagatggcttctagttcaagtattttgaggcttggtacccaatgctgatttgtcatctctctagattttactttttcatattgaaattctttttttagtctattctcttgtagcttttgttacatccaatgatcatttgcctctctccaggcactaccaaactcattactgtggatagtttctgcctttacaggcttagaattgacaaattgagagacacatttttttttcaattctcaaaacaactagactctttccagcagatttgctaaggcacactagaagaaatgtaaaaatctcacattcttgttctagttaatacatgggagaatattactaatacatacatttgttttctacatttgtggttgccttatacatctccttcacgtttaattccttaaacacataaatatgagtcannn

SEQ ID NO: 22566 - DNA, 1435 bp, Homo sapiens
  misc_feature 1, 2, 3, 1432, 1433, 1434, 1435: n = A,T,C or G
nnnacgggaggaagacagaggagacgaacgtcgctaatcatgtcttcgtatggtgtgccccgctgtctcgctagacgcttagtgtgcggatcctgcttatgcttccgtgctctcttttttctgctctactactgtggccctatctgcagttgatcacttggacagccgatattgtgggctgtgttctcctatgctgttgcacccgctattgggctgttctcaatcgtacactgaggttggagagggtgtgtcttcagcgacagttgagcccagatgtcgggaatttcgtggttaacgtacttcttcctgggcttgattcctttttgaggggaagtttttaacctttccttagtagttacttttaatgaactgaagaagaattaaagcatcaaaggcctagtgtatgatttgactccgaagtgaccctctcttctactttgataaagtcaagataccttattggccataggagattcctccttttggggctacccccatacctggaaattccaagagtgtgagggctatatttgggcccagaggaaaatcaaggaaccccatatccagctgctaaagcccttgggcccaaggagtgtaccactgaatccaaggctctcttgggtagcctatgtgcctcttggatggtatgtgaacaaggtagggatgaaactgcagatgtctgaaaagagcttaagcatcctgacagcttgcattttttttttaatttttttttcctcaccgtattccacatacctgtggctggggaaggtaatgttacctctgcaaacagatgctctggtaagagaagaaagacacagggaaggcagagagagcaagacagagggctcaatcacaaagctgggacaaggagagcagctgtttttcacacattcctgctcctctctcagctgggctcatgttcactccgtttcattccaatcatcagggtggagatttcagaggtgactatccctaatccagtagagaacatgagccctgggagcacagctgcctggagtcctcccaagggtctcctccccttttccagactcagcatcattgaagccctaacgggtccttgtaaattaatgtttcatattatcgaaggactgtcagtttagtttggtacagtttattgtagcctaagaggtccagcaagatttcaagagaggagagatgattgcattacttgattacaatgaatacaatctttaggatactctttactttttgtacaataacgatatgaaaggaattttttattctacctatacacagctcaaaataaaggtataacttctggaactgagaaactgatgtcgacgcggccgcgatttctttcactgaatgttgatacgctttgataagtgtatacatcaagggcatatacatatacacccaacacccctctctctttgttctgattaactcnnnn

SEQ ID NO: 22567 - DNA, 424 bp, Homo sapiens
  misc_feature 422, 423, 424: n = A,T,C or G
actagggaggctgaggtgggaggatccctggagcacaggaggtcaaagccgtagtgagccatgatcacaaccactgcactccagcttgagtgacagagagagaacctgtctcaaaaaaaaaaaaactaagtctaaacttgtagatcatctcatgatagattcatagggaaatgatacagttgaccattgttctggcaggttccatgtgctgagtcctcgggtatacatctcacaggaagtgattctagcttgggtgggtcatctgcgttctctgttggccgagtaatcactggccgcgctgtgggcaccagagagagagagagtatgggcggttatcagtctgtctcgctgtctttagcctgcagaacctgtgtatcacccggttttgtcactgtctgcagggatgcgcgtcttcgggtcgnnn

SEQ ID NO: 22568 - DNA, 392 bp, Homo sapiens
  misc_feature 392: n = A,T,C or G
acctggttttaacattataccaaggaaggaggcactgaagagggtaggaaagacagtcttgaatggctgatgccacccctcccctatggaggagtgtggtgctgagagagaatctgtgcttgggagagggagagcacagtgactatggcactttgtattggaactcagtgtttgttggtctgtctgtcggaatggaaagcaatgcagggcacaatttcgctggtgcccacagaggctgcatttagaacagccctagccagagaagaattttccatcctagcaattggaacctgagttccagctagcccaccgctgtgggctaaagtgatgtaagctcctaaatagatttgaaagataatctatgccacaaggactacaatttctgggcacan

SEQ ID NO: 22569 - DNA, 611 bp, Homo sapiens
  misc_feature 1, 2, 606, 607, 608, 609, 610, 611: n = A,T,C or G
nnagcgcccgcccgggcaggtttattgctatgaactgccactgatgaccagaggaatcagatggacttggcttacctccaggatgggttgcgccaaaagactggtcaatctgttcaatggtaggagctatggcctgagaattaaaatgcacgccactgaaaaacaaaaatattttttaatactaggcttcacaagatgggcccacagatcatgtgagatagtagctgggagagttatttttaagacacaggcaggtgagtctctaattatatcaaaatacaaagcttaattagagaacttttaaataagagcattaatgaggtcaggagaaggtcagttctcatgaggctgatatacagagttgatcctctggggctttatgacaccagtgactcttaagaaaagggtagagaagagaagccaccagaccctgaggtatgaaggccccagtaaaactaaaagacaactagaacctgcaggggccagtggtaccacacatttgcttgtctactcctctatcagcaaaactgcctgagcctgccccaggaatcaggtcctcttcacaccctcaaaaagggaaagggaagccagttaaggagacttacnnnnnn

SEQ ID NO: 22570 - DNA, 392 bp, Homo sapiens; identical to SEQ ID NO: 22568
  misc_feature 392: n = A,T,C or G

SEQ ID NO: 22571 - DNA, 2408 bp, Homo sapiens
  misc_feature 1, 2, 3, 61, 2405, 2406, 2407, 2408: n = A,T,C or G
nnncacgaggtgcagtttgccatgaagcggctgctgccaagtgtctggtcagagtctgagnatgggcagggatcgccccacctaccgtcgtcgaaaagaggcccagctctgcccgacggcaccatcttggccctaccttgaagcccaccttggctacacgcacagcagtctggttgccaaggtccaaagaccttaaaaaacctggagctagaaagcagtagactggaggcttctacagactgtaggattcaaggtgatatttgcagactggctttatgagagacaacactgatctactaggggctggaccctagattggttgccagggcttgtgtgtgaatcaaccctaggaggaaaaacctactaccaaaccagaagagcaggcctaagagtactttgagcttctagaagaagtaagcgggaaaggaagagaaagagtagaaagttggtgcatcttctcctcccaagagcctgagtataagaagttggattttaagggtgggggagctgggttggagaaaggtaatataattaaagccaccacaaaacaacctaaacaagccatgttcatgagtaattgtaagtggcttctggatgagacctggcagtgtctctacatacttcctcagggagatagcaattgaaaatgtaattgaataaataaggaaaggaactgctatttggtgtgttcctctgtggacccagtttatttaatccttaaaataatatttttgggaagacattgattttgtccatttatgtggatgggaaaactgagactcattaatttgtccaatgtcgaacagctggtgttagtagagcctagactcaaacccagcttttaaagcccttgttctttactccactaaactgtaacctgtaatcctgtatgcactaacaggagttttcggtgaccttgaaaacacagattactataattactataataaatcccttacattcctgtctctagcatggtttagggagtgccaaggctcaatgtagatggggtcaccttgtcagagcatctgttcatacagaaactgggtttcctgcagaccccaggtgctgcataggattcctcaaaccctacaggatatatctccccactggctgctgtccattttgcttgttaccctgactccccctcttcagccagagcagtctttgtaactaaagctgccagcctggctcatctttcctgacaacgtgcatctcctgccctgtgatcacctttgtgcttggctcctgccctcagcctgaatgtgttctaggaggctgaattcctgcttcgagtcctgcccaagagccagtcttggctcagccctacctcactctctcccaattcttcattcataaagtgccaaaaagattagacctgtaatttgttagccagctttacagggccaggactgagtgagtgcctccttaaactttgtatcctgtgtgcctcccttgccttaccctagtcccagccctgcagctttaagtaattcagacatggattagccatttcccagttctgtctcatacagtccagcctctgccaccttccccaccccttcctttattccatcctaactagttcagccctagtcaagactggatagactgatactgctttgtttcccccaggaaccaaccacccaaccccagtattctggtaattttgacaatgatctatatgaaatttatttgattgacatttagactcatgagttaagcttctgctgaccatttatgttagggtacaatcagaggagcagaaccactaagataaagattatgtatatatgtattttaagggatttattatagggatctgaccgcatgccattgtgggagctggttaaacagtctctgtaaggctgttgtctttgcatctaatgctggagcttgaagtctgcagggcaggcactcgggaagggaagatggatgtaaagtgtgggagaccgaggacacagtggagcccacgagcacgagctggaacccacgaggatggcctggaacccatgtcagtctctcaccacctccagcttcgatgatgtgggtgtcctgcagaagaagctggtgcccttcctcacagagttaaatatgcatctggcccaggaattagagaagctgaaaggatgatcctggggaaggtggagcagctgcaggcctggctgcaggcctgactactgcccacaccaacgaggtgatctagcagatacatggcaacgtgtgaactgcaacaacgcctggtgccccagcaccaaccttccaagtgtaaaaacaatgtgctgctgcttcacttccgccctccggttatcaagcaaaatgtctcttgtggcccatcttactggaagagagttccggtaaacatagccttaccaaggtgacacattacaaagccaccctaccannnn

SEQ ID NO: 22572 - DNA, 384 bp, Homo sapiens
  misc_feature 1, 2, 3, 381, 382, 383, 384: n = A,T,C or G
nnnatggaattaagaaagaaacttgtgtgttgtctggttttaaaactgttttttaaggcatgtaatgttgcttattttacctttttaattctccctgaataacattttctttcttccactcagtgaacatcccaaaatagaattttacttgaaaaactttacatcagccaaagatgttttgtttgccataaaggaagtaggtttcagagggggtaattccaatacaggtaagtagactttgatacctgggatgtaacataggagagggttatcagtgatcatacatgtaaaacagtattatgctattttatatgagcagatgtgaaatcctcctggaactgaaatcttggctaggtctgcatttgatcatctgagataaannnn

SEQ ID NO: 22573 - DNA, 392 bp, Homo sapiens; identical to SEQ ID NO: 22568
  misc_feature 392: n = A,T,C or G

SEQ ID NO: 22574 - DNA, 488 bp, Homo sapiens
  misc_feature 486, 487, 488: n = A,T,C or G
acttttttttttttttttctttaggggcacagagctagcaaaagagccaggaatcaacccttattttgtcttattccaaatgatatagtgtttgtattctaccaagtcagataagtaggtggagaaaagacaaagtgacaaaccacaggagggacaaagagattatgccttcatgcttccctgctccttgaaaatgtagtatatgccaagttttcattgattcagtgggtaaggcaagggacactggcctggtgccagttcaaccactctttcagtctcttgtttattcaacaagctgttccactgggtcctggggaagagggaattatttggggtggcagcccatggcatatgtcctgatgcagcccatggcatatgtccaagcccctcccagtgtgacactcttgtgaccagggtccatatgctcatggcactcccttggacttggctattttttgttgcctctgggactgcaggctaaatacnnn

SEQ ID NO: 22575 - DNA, 1811 bp, Homo sapiens
  misc_feature 1, 2, 1809, 1810, 1811: n = A,T,C or G
nnagaaattgttttcaagattggtgcttttgcaccattgattagacgaggcaaccaagtgcatttattttgatgcatgcctggcccctaatctgctgaagaaagaagaatagaagaaaatcaacctgagtaaaagcagcactggttttgagttttctaagctcagggtcttcattagagacctctggaaatacattaaggatggtgggggtagataatccattcagccagacaaacggggccagctcttaaaataagaaagctgagactgaggaggtgaaactgaaaataaaaacagaaagttcatcctctaatccccagtgctgtatttcttcaaggtgcatcaggcctaggacagtggttaagtgttgggagctggagatcattttatcactgagttgagatttctttttcctgcagagtgtgggagattatatttagggtcatcagtcactgtcgcaactgatcactaaggcaagtttgcttccttctacttcttacaaagcaagaggtttaggggagcttcttgcccagaaacaaagtttatgctctatgtgatcagctacatctccttaggttccatacttatcaggggcttttgacatggaagaatgtgataattggggagcaaccttctgagaattcagcctttgaagtaattcaaagacagtttcttagcacacacgttaactccagacacagcagtggtgggtgcctccattgaggtttccgttttctcttctgtccatcaagggcccaacatccaactggtcccacagtgagcaggggcaactcttgcttcttcagcatctggccacttcgtttccatggtaactgccacgtgtacttttctagcagtctgtggccactccatactcagctgaaaacactgtttcagccccctctctggtgacctcagccttctccaggtgtatctcttgatgatcttggagaccagcagccacagctgctgctactcctgcaggagactgtcaggctgtggtggggggcaggggtgttggaggagaagttgaaaatccgtgtgttctctgcccctctgctcctccatcttagcttctggaggagttaaggcaccaagggcaccaagtcaggttggcagttttgctgcccttgcccaagcctccagcaaaactagctggtcccctgctttgctgggtcccagccaggtgtgatttggttgttgattagtaaccacacattgtttttccccacctttttcattagtggaggtttgtatgtgtgtttgttgtttgagacagagtctcacgctcttttcagactggagtgcagtggtgcgatgtcagctcactgcaacctccacttcccgggttcagacgattctcatgcctcagcctcctgagtagctgggattacagatgtgcaccaccacacctggtaattttgtatttttagtagagatggggtttcaccatattggcaggctggtctcaaatcctggactcaggcgattggccacttggctcccaaagtgctgggattaaaggtgtgaaccaacgtggcctgcgcccattagtggagtctgatgggccgggctcaatattattcatggaagagagacatcttggttacctttttcaacaactccttcatgaagaagggaggggggcgactctacatcgacgacaatggtccatggagaaaatgggcggagtacacatttgggcggttttcagcccctttttgttaaaccctttcactgggtataccgcgggagagtatacccccccggggcagcgttaaaagaaccgccccttgttggcgacaagannn

SEQ ID NO: 22576 - DNA, 853 bp, Homo sapiens
  misc_feature 1, 850, 851, 852, 853: n = A,T,C or G
nattctcctgtgaaattttctcccagtggcgcccatctccgggggggcctctttgtctcttctcctcttggtttttgccccccccagggcgccggcccacttgcgtgtcaggttacccaccctttagatcccaaatgcgaggtgaagactccaccatggcgggattgtccatagccatagcgccttgcccggttatcatcacggccagctccagacatcttgtctagccatatagaatggcaagatatgagcggcagaaggcactgctttgatgaagacaggaagggtgccatcagtgcagccccccgcaccacagcagccacacccatttttgtggacacgaggcaacgtaagtactgtggcatggcgcagtgggtgacagatggccacatagcggtcaaaagccatggccagcagcactgtggattccatgccagataaggagtggatggcaaacatctgtagcagacaagcatcaaactggatggtagtggaattgaaccagaagatggccagcattttgggcatggatgaggtggagatgaggatgtcaatgcctgaaagcatgcaaagaaatatatacatgggctcatgcaggctgtgctcagtccgcacaatgtagatgattgtcaagttacctagcacagcaataaggtagagggagcacaatgggaaggccaaccagaactgagcctcttctaaaccagggaggcctattaggatgaagtatgtagcactggattcattgccattgggatccaccatcatgaagaagctgaactgtgaccagcaccaggcaggtagaggctcaaccgtatggaaggaatgtgtgaccccctttgtccagtcnnnn

SEQ ID NO: 22577 - DNA, 1329 bp, Homo sapiens
acaccacctgagtccagaaagggaggtgtcaacaaaagaagataagcccatacagtgcacacctcagaaagccaagccaatgcgggcagctgctgacctgggagggagaagatcctcaggccaccagtagaaaaatggaagagacaggatgacaaagacttaagagaaaaacgttgttttatttgtggaagagaagggcacattaaaaaggaatgcccacagtttaaaggctcttcaggcagtgcttttacatgaagacaaaaagaaacaaaaaacaacaatatttttgagtccccagtcaggtagcctttccagtaaatatatgactcagggaaaagcctcagcgaagaggacccagcaggaatcatgagggaaggaaaatgcagcactctaaatggccactcaggcgttcctattcactcggaaaattaggttcatttcacaggacacagcagtgtagatcaggcttcaacttaacatttaagggaaatgtcagatttttttttaatttaatgaaattgttaatgaggaaaaatttttaatatagtcttatctaccacacatccccatagatttaaggattttaatagaaagtcatgatgtatgtatttaagccacgttaaaagaaaaaatataactatggaccggtattcagtgaatacagtttcatggtttttaattctttcaaagcacattaaaaatggtgtgctgataaaccccaagtaaattaaccctttttccgtataaatccattttttgttttgaagaggggaaattatatttattgttgtttactgaatcctggtgtgaaagcatatcagatatgtatgaactgctactgctgtacttccgatttacggacatcattttattgctatttgtagacgtgataacatgaacatgagtacctatttatgtgggccttcagtggatgggcagtgccactcaggtctctggggtttccctctctaattttaagtaaattgacatataactactatgcttataaaaatgaagtaaggaaaacaagtagtcctgtttgccactaaaaacattttcaaaggaaaaataaaatgaaagtactttttactttttatgatactcagaaattaggatgaagaacttttaaaattgctgaagatcaaagaggttatctctgccagtcacaagtgtggctggtgtcattctgggtctgactggagccctcctggactgtttctttaatttcaaaagccctgcagacatagtacctggtcagaactatgcctcggtttatttatcattttgaaataaaatcaaaatttcaacctgtaaaaaaaaaaaaaaaag

SEQ ID NO: 22578 - DNA, 1636 bp, Homo sapiens
ccgggcaggtacgcgggggctggggtctcaggaggcagcgctctcgggacgtctccaccatggcctgggctctgctgctcctcaccctcctcactcagggcacagggtcctgggcccagtctgccctgactcagcctgcctccgtgtctgggtctcttggacagtcgatcaccatctcctgcactggaaccagcagtgacattgggggttataacctatgtctcctggtatcaacaacacccaggcaaagcccccaaactcatgatttatgatgtcagtaatcggccctcaggggtttctaatcgcttctctggctccaagtctggcaacacggcctccctgaccatctctgggctccaggctgaggacgaggctgattattactgcagctcatatacaagcagcagcactcctctatttgtcttcggaactgggaccaaggtcaccgtcctaggtcagcccaaggccaaccccactgtcactctgttcccgccctcctctgaggagctccaagccaacaaggccacactagtgtgtctgatcagtgacttctacccgggagctgtgacagtggcctggaaggcagatggcagccccgtcaaggcgggagtggagaccaccaaaccctccaaacagagcaacaacaagtacgcggccagcagctatctgagcctgacgcctgagcagtggaagtcccacaaaagctacagctgccaggtcacgcatgaagggagcaccgtggagaagacagtggcccctacagaatgttcataggttctcatccctcaccccccacccacgggagactagagctgcaggatcccaggggaggggtgagggttgagaacctatgaacattctgtaggggccactgtcttctccacggtgctcccttcatgcgtgacctggcagctgtagcttctgtgggacttccactgctcaggcgtcaggctcagatagctgctggccgcgtacttgttgttgctctgtttggagggtttggtggtctccactcccgccttgacggggctgctatctgccttccaggccactgtcacggctcccgggtagaagtcacttatgagacacaccagtgtggccttgttggcttgaagctcctcagaggagggcgggaacagagtgaccgagggggcagccttgggctgacctaggacggtgaccttggtcccagttccgaagacaaataccacagtgctgctgcttgtgtatgaggtgcagtaataatcagcctcgtcctcagcctggagcccagagatggtcagggaggccgtgttgccagacttggagccagagaagcgattagaaacccctgagggccgattactgacctcataaatcaggagtttgggggctttgcctgggtgctgctggtaccaggagacaaagttataattcccaacagcatcgctggttccagtgcaggagatggtgactgactgtccaggagacccagacacggaggcaggttgagtcagggcagactgggcccaggaccctgtgtcctgagtgaggagggtgaggaagaggagtggggtccaggccatggtggagacgtcccgagagcgctgcctcttgtgaccccccccgcgttaattaattctagaagtatttcgaa

SEQ ID NO: 22579 - DNA, 681 bp, Homo sapiens; identical to SEQ ID NO: 20120
  misc_feature 1, 2, 12: n = A,T,C or G

SEQ ID NO: 22580 - DNA, 676 bp, Homo sapiens; identical to SEQ ID NO: 21408
  misc_feature 1, 2, 31, 671, 672, 673, 674, 675, 676: n = A,T,C or G

SEQ ID NO: 22581 - DNA, 579 bp, Homo sapiens
  misc_feature 578, 579: n = A,T,C or G
tacagttcagcccttctcgactggaggcggttctgcctattccgctccccacctggacacttagcaatgcctggagacatttttgattgttgtaaatggcatctagcaaggatgctgctaaatatcctataatgcacaggacagctgggaccctccccccgccaacaaggaataatccacccaaggtctccatagcactgaggcgccgacagcttgcagtggctcacgcaggaggaaggagcctggcgctttctagacgcctcctctgagaatattacgaatgcactacatgctaggcagaaaggattgtgcaagatcattatgctaatcgttgtaaccctgtgcactgtaagatcctggaatatgaattatcgcagtaaaaattccgtccagcgtggttgggatgtgttgcgtcaacagtatggtcgctacaacccagcactctctggagaagaaaaacagtgatgaggtgactgctgaaccagcttcacagggaagaaaggaaggtcaacagaaatactctcaacatggggcagcatgggcggcggcagctgtccgccttaccgctcaatgtgcann

SEQ ID NO: 22582 - DNA, 2170 bp, Homo sapiens
  misc_feature 1, 2, 2090, 2166, 2167, 2168, 2169, 2170: n = A,T,C or G
nncatcacatctcaacatctcagagccatcctctaagtgtcacatgttccctcttaatcttctccaccaaaagcccagtttttttttctttttttacacaaggccactccatttacccccacttgccgctaacctgcactcttgtccaatatacccctgacccaaatattgtttttcgacccctcaccaagttagaaatccggccctttcacaaaggtcaacattttcagcttcttttagcaggaatgctccttcaaagggtatctgcattcctgttcccacagcccccagcattccttgtcctttagctgcctggcttctctaggcacctgagttcatggtcctgggttagaagctgcagaaaggactgtgctgactccctcaactaaggggtggtactaccgcttgctcctctcagcagctgacatcccagagatcagtttcctttctgggagggactcctcattgaggggggtgcagaagacctgcagacctgcatcaaccctggtctttgaggcttcaactcctgaaaatcaatcaattgagccctacctttaccagacctttagtctctcttcttctgtttctttttggctttctggacagtgctgactccagctctttccttcttgggatgctgctgcctcttcctcttacctctgctgcttgagccagtgtgtgctctgctctctgcttccctagccccgctatccttctcatcccttacatccaagatgtcctcctcctcttgatgctgctgtcttttcttcttgcttttcctgcttcttccatcactgcatgctctgctctctgcttccctggttccaccacctaaaacagtttcctcacctctatcttctaggttcaagtcctcctcctcctgttgctgcctcttctttcttcggctgcatgggtcagcatatgccctgctctctacctcctctgtcctgacactgcctgcagcctccttgccttttcctccttcctccaagacccccatcttctcctcttcatggtgccacctcttctttttcttccctttcctgagggactgattggtttgctctctgctattcaattccccaagcccacttgttcctgcagcgtcctccttctcattccctttagttgtaccctctctttcatctgagacctttccttcttgatgtcgccttttcttcttcttgctttttctgatgttctgctcagcatgttctgggtgcttctcatctgcatcattcctttcagatgctgtagcttcttcctcctctttctgcctccttttctttttcttttttttggggggcttgctctctgactgcagttgaggggccccagggtcctggcctttgagacgagccaggaaggcctgctcctgggcctctaggcgagcaagcttggccttcattgtgatcccaagacgggcagccttgtgtgctgttcgcccctcacaggcttggagcagcatctcatcagtcagaatctttggggacttggacccctggttgtcgtcatcactgcagctctccaagtctttgtttggcttctctccacctgaagtcaatgtagccatcttcacaaacttctgatacagcaagttgggcttgggatgattataacgggtggtctccttagaaaggctccttatctgtactccatcctgcccagtttccactaccaagttggccgcagtcttgttgaagagctcattccaccagtggtttgtgaactccttggcagggtcatgtcctaccccatgagtgtcttgcttcagtgtcaccctgagagcctgagtgataccattctccttccggccgaggcctttgccttgagtccatccatgctttagcagctgctcctcagcaaacttcatcccacgactcttgacctctggggtgacattcatggtgagaaaaaagtctctatcctcagactctcaccagagaagaagaggtgatatcatccgtcattgctgggtccgctccgcggaaacatgtgccggacctgacttgtgcgccgccatcttccccggcatgccgctgcccgcccggcccgctcttagaactgagtggatcccccgggctgcaggnaattcgatgatcaagcttatcgatacccgtcgtacctcgagggggggggcccggtacccccagctgtttgttcccnnnnn

SEQ ID NO: 22583 - DNA, 937 bp, Homo sapiens
gaggtccccgggaggcatcactggtccccgggagttcaagactgcattgagccatgatcgtgccactacacagccttggtgacagagtgagaccctgtctcaaaaaacaacagtaacataaataaataaaaagaaggccataatacacgcctccacatagaaattatcctaaacaccaactttactatatgtaaacaaatatccccaaggacttcgctgtcaaatgtgaaaagtttctttatttctacagaaggtatttctcttgaatactatttttaaattcttgtgactttatagttttctgtgctgtcactttttttctgcttttaatagtagttttcttttaatttgctactttcagttcattgtgttaaaaatgttaccaggttttgtgattggttaaatactggtaagtaaatttcacctgagtgaattggattttacattttcttttctgaaggtatctttacatataaagattataacttgcatttatttataaaagagagtaacatggattcttttctttttgcagaaaatggtgtgaatggaacattaacttcaaatgtagcagactctccccggaataaaaaagagaaatcttcataatgaattataaactaattgattaatgtccccaaagaaatctgctttctactatatctttcagcattagagatttttctgttcttgaaaatacagtctgtgctcctgattggtatggaagggtaatgcatttgttaagggattgaggggaggaacatgctggaatgacaaatattaggtaaatagtacgcttaaaagttgggcccacatattatggattgaaattcaagatgggaacttgacatccttaggaatggtcaattaaaggggcaacaagatagcgaaaaaggaaaaaggatagggaaaagaaagggtacaaataaaatataga

SEQ ID NO: 22584 - DNA, 1767 bp, Homo sapiens
  misc_feature 1, 1767: n = A,T,C or G
ngtcacccaggctggagtgcagtggcgcaatctcagctcactgcaacctccacctccctggttcaagcgattctcctgcctcctccgcccgacgccccgcgtcccccgccgcgccgccgccgccaccctctgcgccccgcgccgccccccggtcccgcccgccatgcccggcccggccgcgggcagcagggcccgggtctacgccgaggtgaacagtctgaggagccgcgagtactgggactacgaggctcacgtcccgagctggggtaatcaagatgattaccaactggttcgaaaacttggtcggggaaaatatagtgaagtatttgaggccattaatatcaccaacaatgagagagtggttgtaaaaatcctgaagccagtgaagaaaaagaagataaaacgagaggttaagattctggagaaccttcgtggtggaacaaatatcattaagctgattgacactgtaaaggaccccgtgtcaaagacaccagctttggtatttgaatatatcaataatacagattttaagcaactctaccagatcctgacagactttgatatccggttttatatgtatgaactacttaaagctctggattactgccacagcaagggaatcatgcacagggatgtgaaacctcacaatgtcatgatagatcaccaacagaaaaagctgcgactgatagattggggtctggcagaattctatcatcctgctcaggagtacaatgttcgtgtagcctcaaggtacttcaagggaccagagctcctcgtggactatcagatgtatgattatagcttggacatgtggagtttgggctgtatgttagcaagcatgatctttcgaagggaaccattcttccatggacaggacaactatgaccagcttgttcgcattgccaaggttctgggtacagaagaactgtatgggtatctgaagaagtatcacatagacctagatccacacttcaacgatatcctgggacaacattcacggaaacgctgggaaaactttatccatagtgagaacagacaccttgtcagccctgaggccctagatcttctggacaaacttctgcgatacgaccatcaacagagactgactgccaaagaggccatggagcacccatacttctaccctgtggtgaaggagcagtcccagccttgtgcagacaatgctgtgctttccagtggtctcacggcagcacgatgaagactggaaagcgacgggtctgttgcggttctcccacttttccataagcagaacaagaaccaaatcaaacgtcttaacgcgtatagagagatcacgttccgtgagcagacacaaaacggtggcaggtttggcgagcacgaactagaccaagcgaagggcagcccaccaccgtatatcaaacctcacttccgaatgtaaaaggctcacttgcctttggcttcctgttgacttcttcccgacccagaaagcatggggaatgtgaagggtatgcagaatgttgttggttactgttgctccccgagcccctcaactcgtcccgtggccgcctgtttttccagcaaaccacgctaactagctgaccacagactccacagtggggggacgggcgcagtatgtggcatggcggcagttacatattattattttaaaagtatatattattgaataaaaggttttaaaagataaaaaaatattaaaaataaaaactcgagggggggcccggtaccaatttcgcccttagtgagtcgttttacgcgcgctaattggccgcn

SEQ ID NO: 22585 - DNA, 2051 bp, Homo sapiens
  misc_feature 2049, 2050, 2051: n = A,T,C or G
gcgtccgcggacgcgtgggcgcggggcgccggctgctctggcggctcccgcggctccggctggcggcttcgggccctgcacctgtgactctcggccgcgctcgccctcggcccgcccggcgccgcagccccatggccccgtccaggctgcagctcggcctccgcgccgcctactccggcatcagctccgtggccggcttctccatcttcctcgtctggacggtggtctaccgacagccggggaccgcggccatgggagggctcgcaggggtgctggcactgtgggtcctggtgacgcacgtgatgtacatgcaagattattggaggacctggctcaaggggctgcgcggcttcttcttcgtgggcgtcctcttctcggccgtctccatcgctgccttctgcaccttcctcgtgctggccatcacccggcatcagagcctcacagaccccaccagctactacctctccagcgtctggagcttcatttccttcaagtgggccttcctgctcagcctctatgcccaccgctaccgggctgactttgctgacatcagcatcctcagcgatttctgacccagggggtgaggtctctgcaccctgggggggccttaggacctggactcagcctctgagatgttgggagaggctactcccaccccctggtgaccccagaactgtggcagaaaatacacagcaggacgagtgtggtctcccaggaagctgtcctgcccgtcccctttcgaggaaacctgagtgtggtagagaggggatcctgccatgttgctcctcatcagcctggccagagggcagctttagaccttttcaaatgaatctgttttcttttctttcttttttttttcttttttttttttttttgagatggagtcttactctgtcacccaggctggagtgcagtagtgcgatctcagctcactgcaacctccgcctcccaggttcaagcaattctcctgccttggcctctcaagtagctgggattacaggcatctgccaccatgcccggcaaatttttgtgtttttagtagagacagggttttgccatgttggccaggctggtctcgaactcctgatctcaggtgattcacccgcctcagccttccaaagtgctgggattataggtgtgagccaccgtgcccggcctggatctgttttcttagcacgcagtgaggaatctttgtacttaaggccagggcaacaaagtcaagaggtcaaggtgtagggccatgaggcctggacctatgctgcaggcaagggtttccatccccgctgccctaggcactctcttcccaaggccaggttgggcacctggggaggtcagttcagaaatatctagcagagacctcttaaacccccatcccagcaccccatcctgttgttcccagagctggtctcccatgagtgtgctagagccagatagccgtggccccccacccatctcactcacacacacaggcatccatacaccccagaagacttcccaaatgaggccagactcagggtcacggggaatgtgcttctgcccctgtaagggctttggggaagggggcaacatagtagaggctggaaagagcccccaaacctgtgcccatgcccctccagccctgcgtttccattctgccttctcagagtgcccttgctgcacccagaccaccggccaggagagaccttctctcccactccagcccctctcactgcccttcaactagagctttcacctttttacatttcccttctgaaggacacaaatctgcttttctgcccatacactggcccaagggctcacctaacttgggagggaaggggctgttggtacaaggatgattttctgttagactgccattttgcacggtctcccccttcccatctgatgtgtcctgcccctcagctctttgccttatctgtgtcactgtcactttagcaaaaatacagcggccatttgtatcaaaaaaaaaacccgggttgccccccttttcgggcgggcacagattaatgggagggctgttccgccccctttaaggggatgcgcccctannn

SEQ ID NO: 22586 - DNA, 2412 bp, Homo sapiens
  misc_feature 1, 2, 3, 4, 5, 6, 2397, 2398, 2399, 2400, 2401, 2402, 2403,2404, 2405, 2406, 2407, 2408, 2409, 2410, 2411, 2412: n = A,T,C or G
nnnnnnagccgcgccgagtctgccgccgccgcagcgcctccgctccgccaactccgccggcttaaattggactcctagatccgcgagggcgcggcgcagccgagcagcggctctttcagcattggcaaccccaggggccaatatttcccacttagccacagctccagcatcctctctgtgggctgttcaccaactgtacaaccaccatttcactgtggacattactccctcttacagatatgggagacatgggagatccaccaaaaaaaaaacgtctgatttccctatgtgttggttgcggcaatcagattcacgatcagtatattctgagggtttctccggatttggaatggcatgcggcatgtttgaaatgtgcggagtgtaatcagtatttggacgagagctgtacatgctttgttagggatgggaaaacctactgtaaaagagattatatcaggttgtacgggatcaaatgcgccaagtgcagcatcggcttcagcaagaacgacttcgtgatgcgtgcccgctccaaggtgtatcacatcgagtgtttccgctgtgtggcctgcagccgccagctcatccctggggacgaatttgcgcttcgggaggacggtctcttctgccgagcagaccacgatgtggtggagagggccagtctaggcgctggcgacccgctcagtcccctgcatccagcgcggccactgcaaatggcagcggagcccatctccgccaggcagccagccctgcggccccacgtccacaagcagccggagaagaccacccgcgtgcggactgtgctgaacgagaagcagctgcacaccttgcggacctgctacgccgcaaacccgcggccagatgcgctcatgaaggagcaactggtagagatgacgggcctcagtccccgtgtgatccgggtctggtttcaaaacaagcggtgcaaggacaagaagcgaagcatcatgatgaagcaactccagcagcagcagcccaatgacaaaactaatatccaggggatgacaggaactcccatggtggctgccagtccagagagacacgacggtggcttacaggctaacccagtggaagtacaaagttaccagccaccttggaaagtactgagcgacttcgccttgcagagtgacatagatcagcctgcttttcagcaactggtcaatttttcagaaggaggaccgggctctaattccactggcagtgaagtagcatcaatgtcctctcaacttccagatacacctaacagcatggtagccagtcctattgaggcatgaggaacattcattctgtattttttttccctgttggagaaagtgggaaattataatgtcgaactctgaaacaaaagtatttaacgacccagtcaatgaaaactgaatcaagaaatgaatgctccatgaaatgcacgaagtctgttttaatgacaaggtgatatggtagcaacactgtgaagacaatcatgggattttactagaattaaacaacaaacaaaacgcaaaacccagtatatgctattcaatgatcttagaagtactgaaaaaaaaagacgtttttaaaacgtagaggatttatattcaaggatctcaaagaaagcattttcatttcactgcacatctagagaaaaacaaaaatagaaaattttctagtccatcctaatctgaatggtgctgtttctatattggtcattgccttgccaaacaggagctccagcaaaagcgcaggaagagagactggcctccttggctgaaagagtcctttcaggaaggtggagctgcattggtttgatatgtttaaagttgactttaacaaggggttaattgaaatcctgggtctcttggcctgtcctgtagctggtttattttttactttgccccctccccactttttttgagatccatcctttatcaagaagtctgaagcgactataaaggtttttgaattcagatttaaaaaccaacttataaagcattgcaacaaggttacctctattttgccacaagcgtctcgggattgtgtttgacttgtgtctgtccaagaacttttcccccaaagatgtgtatagttattggttaaaatgactgttttctctctctatggaaataaaaaggaaaaaaaaaaggaaactttttttgtttgctcttgcattgcaaaaattataaagtaatttattatttattgtcggaagacttgccacttttcatgtcatttgacattttttgtttgctgaagtgaaaaaaaaagataaaggttgtacggtggtctttgaattatatgtctaattctatgtgttttgtctttttcttaaatattatgtgaaatcaaagcgccatatgtagaattatatcttcaggactatttcactaataaacatttggcatagannnnnnnnnnnnnnnn

SEQ ID NO: 22587 - DNA, 566 bp, Homo sapiens
  misc_feature 1, 220, 221, 222, 223, 224, 225, 226, 227, 228, 229, 230,231, 232, 233, 234, 235, 236, 237, 238, 239, 240, 241, 242,243, 244, 245, 246, 247, 248, 249, 250, 251, 252, 253, 254,255, 256, 257, 258, 259, 260, 261, 262, 263, 264, 265: n = A,T,C or G
  misc_feature 266, 267, 268, 269, 270, 271, 272, 273, 274, 275, 276, 277,278, 279, 280, 281, 282, 283, 284, 285, 286, 287, 288, 289,290, 291, 292, 293, 294, 295, 296, 297, 298, 299, 300, 301,302, 303, 304, 305, 306, 307, 308, 309, 310, 311, 312: n = A,T,C or G
  misc_feature 313, 314, 315, 316, 317, 318, 319, 320, 321, 322, 323, 324,325, 326, 327, 328, 329, 330, 331, 332, 562, 563, 564, 565,566: n = A,T,C or G
nctgctttcctcctaacctcaagtgagccgcctgcctcgaagatgctttatttataagcgctttggacacactttaataaatgctctattgtatacagttgaactctatataacattttgaataatattgttaatgcttaccctaagtactactatcatctctgtattgtttaacaaaatatttccacatttgacaataaagtcagtatttgaaaggagnnnnnnnnnnnnnnnnnnnnnnnnnnnnnnnnnnnnnnnnnnnnnnnnnnnnnnnnnnnnnnnnnnnnnnnnnnnnnnnnnnnnnnnnnnnnnnnnnnnnnnnnnnnnnnnnnccccccatttttttggaaaaaaggggggccccccccccaaaaaaactttttttttccccccccccccctttttaacccaaatttttccccccaattctcccccaattttttacccggaaaaaaatttttaaacagaagggccccctccaaatttgcccggggttttttctttatgcaaaaagggggcttttttttaaattgaaaggccccttgcccctaacggggggaannnnn

SEQ ID NO: 22588 - DNA, 2242 bp, Homo sapiens
  misc_feature 1, 2, 3, 4, 5, 6, 7, 8, 9, 10, 11, 12, 13, 14, 15, 16, 17,18, 19, 2242: n = A,T,C or G
nnnnnnnnnnnnnnnnnnnacctctggttggagaaatgccaggttaaaggatagcaaatggcttaagcacaatggcacttctggttattcggcagagtgtccagtaagtccataaagttccaccgctataccaccacacatccgctcggggatgagcaagggctgactgattgataagctcttgaaaattcttaagctcactgcatcccttcaggtctccaaggaatgctaagtctgcctccctgccgtgagagacacgaagtgaacttagtgttgggagatggaagctggatggccctcaggggctgacccgcagggtgccagacttcggaatatagcggagagagcttggcatgacttattactccaggctgtagaatcctggaaaagagctaccatgcagcccacacctggtcgactggaggaccaccttagtggaagggggacaatcagggcctctggcctgccatgtgcacaagcataacaattgcttttgtttaacgtgcagatggaatatttgatccatttcaaccaggcatttgcatcttggtatgctgtcttaattgccaaagtttgttttaagtctttaacttctatgatcctttagtaaaatgaatgcttcctttagcacctatttttattagtttttagaccaaagaaagctaaacaccattttatatttaataatgcttcttgtatgatttttataccagataagctaaattttacctttatattagtgtgttattaatgttaaacttaattttaataaaaccttgtagacatatttatccaatttttcatgtttgaccataaggtaagattttatagactctttttaaccttttataatttttgttaaagagcaggttgatgctttaagaaaaacctgttgcattttttactttaatgtccagttcacagaaaaactggatgatacctttttaactttagctaatatgtttacacacagaattttctttacaattaacgttttaaaacttgcttaaacttttaaaacaataatttttttaaccttttaatgtaggtaaaaatccacattcttatgcccctttataatctttttaccaaaggtatgttttacttttcttatacaccttgcacataaactgtttttttaaaatagtactcaggaggccttattacttttaaattatacaacttttttgcataaatactttttataactttttctttcacgacttttgcagacaatttttcaacatgtcttaactttctgacttattacattttttttttaaacaaccagttaatttatttcaggacaagaatttaccatgtaacactctttttacataaattctgcctctccccgtttttttccttttttttttttctttttgaagataaccattccttttttttttttttaaagcgaactttctttatgtctttggactagactgtctaaggccacaagattagaagttaccataatacatgttacactgttaacttttagcaaacttcacttttgttgaaaaccttgtaagtttgggatttcaattatcctttgctattaataagaccttgtttagtctaaattaacttagaattggtatagatggcctttttttctctctgctggtctttccttgcctctgccagctgcttatgctgctgttctcttaactactgtgggggggaagggggtctaaaaccagctgtaactgtctatgtatggaaactggtctgggtgccttggcttacaggttaccttgtgtcatacctttgaaacaagggacctgtccaggcttccttctgatggccaacccacctctaatgctggccagtctatttcacacaaagttctaagttttcctggtgtcatagtaacactgtaatctcccttaaattctttcttgaaattttttttaacatagttcctagtggggtgggcttactttgcgcctgacccatgtttgtttttttccgagacaaaataccatgctcacaccacacatactcaccacaagacaaagaacgggtaaagagggcacacacacactgttaccgtttataccaaaccaaaatcacgaaattcaaaatccgagtaccaaaaaattcaagccaagtcaaaaccaaaaccacagtatccagcaattcaaatcaaaaacaaaaccccaaaaaaaaaaaaaaaaaaaaaaaaaaaaaaaaaaaaaaaaaaaaaaaaaaaaaaaaaaaaaaaagggcggccgcn

SEQ ID NO: 22589 - DNA, 1980 bp, Homo sapiens
cacgagcggcgcgatcggccgggctgtaaccgtcgtctgtccgggagcggctggagcggcagcggcggccgggcacggcgcgaggtgacgccacagggcagcggcggcagcggaggcagcggcggcagcaggagacgcagcggcggccgcagcagcagcagcaagacggactcgtggagacgcgccgccgccgccgccgccgggccgggccgggtgtcgcgcgccgaggctgggggggagtcgtcgccgccgccgccaccgctaccgccgccgccgccgccgccgaggtgactgaggagagaggcgcctcctcgctcccgccaccgccggacttcaatgcccagtccccagctcgccagcgtttttcgttggaatatacgttgcacatttatggcgattctgagtgtgagggcagacttctgccaggctcagcacagcattttcgctgacaagtgagcttggaggttctatgtgccataattaacattgccttgaagactcctggacaccgagactggcctcagaaatagttggctttttttttttttaattgcaagcatatttcttttaatgactccagtaaaattaagcatcaagtaaacaagtggaaagtgacctacacttttaacttgtctcactagtgcctaaatgtagtaaaggctgcttaagttttgtatgtagttggattttttggagtccgaaggtatccatctgcagaaattgaggcccaaattgaatttggattcaagtggattctaaatactttgcttatcttgaagagagaagcttcataaggaataaacaagttgaatagagaaaacactgattgataataggcattttagtggtctttttaatgttttctgctgtgaaacatttcaagatttattgattttttttttttcactttccccatcacactcacacgcacgctcacactttttatttgccataatgaaccgtccagcccctgtggagatctcctatgagaacatgcgttttctgataactcacaaccctaccaatgctactctcaacaagttcacagaggaacttaagaagtatggagtgacgactttggttcgagtttgtgatgctacatatgataaagctccagttgaaaaagaaggaatccacgttctagattggccatttgatgatggagctccaccccctaatcagatagtagatgattggttaaacctgttaaaaaccaaatttcgtgaagagccaggttgctgtgttgcagtgcattgtgttgcaggattgggaagaaaaagaaggggagcgttcaattccaaacagctgctttatttggagaaataccgacctaagatgcgattacgcttcagagataccaatgggcattgctgtgttcagtagaaggaaatgtaaacgaaggctgacttgattgtgccatttagagggaactcttggtacctggaaatgtgaatctggaatattacctgtgtcatcaaagtagtgatggattcagtactcctcaaccactctcctaatgattggaacaaaagcaaacaaaaaagaaatctctctataaaatgaataaaatgtttaagaaaagagaaagagaaaaggaattaattcagtgaaggatgattttgctcctagttttggagtttgaatttctgccaggattgaattattttgaaatctcctgtctttttaaactttttcaaaataggtctctaaggaaaaccagcagaacattagcctgtgcaaaaccatctgtttggggagcacactcttccattatgcttggcacatagatctccctgtggtgggatttttttttccctttttttgtgggggagggttggtggtatatttttcccctcttttttccttcctctcctacatctcccttttcccccgatccaagttgtagatggaatagaagcccttgttgctgtagatgtgcgtgcagtctggcagccttaagcccacctgggcacttttaga

SEQ ID NO: 22590 - DNA, 1252 bp, Homo sapiens
  misc_feature 1252: n = A,T,C or G
acgcgggggcgcgcagattctcgcaaatctggaagcggatcgcgtggagtgacggtcacaccgcggcgaattaattcccaaagactcatgttacaggagagagccaccaagaagaccaaagaaaaggagacaaggatggctcttcctcagggatgcttgactttcagggatgtggctatagaattctctttggaggagtggaaatgcctgaaccctgcacagagggctttatacagggccgtgatgttggagaactacaggaacctggagtcagcgcgattgacttctaaagactcttggtacctgaggaagaaacccagaagaggaagaggaaagcaaaggagtcggggatggctctttctcagggtctattgacattcagggacgtggccatagaattctctcaggaggagtggaaatgcctggaccctgctcagaggactctatacagagacgtgatgctggagaattataggaacctggtctccctgggtgaggataacttccctccagaagtggggatgtgcccttgtggatctttgtatttctcttgtttctcttgggagttgcatccttgcttgactaaaatggaagctgtattgatttgaaatgaaaagcttcatgatgtaggcaacaaagcaaaaaacaacgccaccaacaacacaacaggttgtggcgaccgtacgcaacacgacgacaaagatcttcgcagaacaacacgtgtgggcacgacgtggcacccaagtcgggatacagctaacacggtaggacaaggggacccacaagaggacaaccggggcgaccagacagacgcgtggagaatgctaaaccaaagcaaaaggcccgggaggtacacactacggtcttggacacaaccacgcgagggacgtgaggccaaaaagggacaacaaacgaggaccggggcggcatacaatatgcccggaccggggacggaagcaaacaaggacaagcagagacaggcgagaagagcagcgaagaaggagaacaagacagaaaactaaggacagaaaagcagaaacggggacaagtgcaagaagcgaagacaaaaacacaaaacgagacgcgagaagaaacgaagcacagaaaaaaagaaagcaaaaacgaacgcgaaagcagactagggcgaaaggaagaagagcaagcaaagcgagataacaaagacagcaagggacagccaaaagacagtagaaacaacacaaagaggaggaacagaaaaagcaaagagacacan

SEQ ID NO: 22591 - DNA, 2694 bp, Homo sapiens
  misc_feature 1, 2: n = A,T,C or G
nncgacccacgcgtccggcgggcgcggggtgtgtcgggtgtcgacggcggcgctttgcggccggtcgtgcgggtcgggcgcgggcgggcgcggcggcagtggcgcgcacaggtgattgactggccagctgcctgaaggagcgccaggtcctccttgctggcaggtggcgaagcccattggggcggcggtgcagaccgcggcggcggctgcggcggtctggctcgggaggcgttcctggggccaaggccatggccccgcggctgcagctggagaaggcggcctggcgctgggcggagacggtgcggcccgaggaggtgtcgcaggagcacatcgagaccgcttaccgcatctggctggagccctgcattcgcggcgtgtgcagacgaaactgcaaaggaaatccgaattgcttggttggtattggtgagcatatttggttaggagaaatagatgaaaatagttttcataacatcgatgatcccaactgtgagaggagaaaaaagaactcatttgtgggcctgactaaccttggagccacttgttatgtcaacacatttcttcaagtgtggtttctcaacttggagcttcggcaggcactctacttatgtccaagcacttgtagtgactacatgctgggagacggcatccaagaagaaaaagattatgagcctcaaacaatttgtgagcatctccagtacttgtttgccttgttgcaaaacagtaataggcgatacattgatccatcaggatttgttaaagccttgggcctggacactggacaacagcaggatgctcaagaattttcaaagctctttatgtctctattggaagatactttgtctaaacaaaagaatccagatgtgcgcaatattgttcaacagcagttctgtggagaatatgcctatgtaactgtttgcaaccagtgtggcagagagtctaagcttttgtcaaaattttatgagctggagttaaatatccaaggccacaaacagttaacagattgtatctcggaatttttgaaggaagaaaaattagaaggagacaatcgctatttttgcgagaactgtcaaagcaaacagaatgcaacaagaaagattcgacttcttagccttccttgcactctgaacttgcagctaatgcgttttgtctttgacaggcaaactggacataagaaaaagctgaatacctacattggcttctcagaaattttggatatggagccttatgtggaacataaaggtgggtcctacgtgtatgaactcagcgcagtcctcatacacagaggagtgagtgcttattctggccactacatcgcccacgtgaaagatccacagtctggtgaatggtataagtttaatgatgaagacatagaaaagatggaggggaagaaattacaactagggattgaggaagatctagcagaaccttctaagtctcagacacgtaaacccaagtgtggcaaaggaactcattgctctcgaaatgcatatatgttggtttatagactgcaaactcaagaaaagcccaacactactgttcaagttccagcctttcttcaagagctggtagatcgggataattccaaatttgaggagtggtgtattgaaatggctgagatgcgtaagcaaagtgtggataaaggaaaagcaaaacacgaagaggttaaggagctgtaccaaaggttacctgctggagctggtctgtaagatattctgggacagcactgttgccattaagtgccttgtttttttatgttcacaaatgtatatgaagaaactttctcaaacttactctttctaataacccactaaagccagcttaaacactctaaaagtactttgtaaaccaacaataacttgatgtgtagcattccatattatttcattacgttgtactcctaaaaatgggaagctgttaataaattataacatttaggtcagcactctgcatccatgagtattgtagatatttatattttgtgagatattaacttgtttaagaaaaatccgattggattactatggaaaaagcaacttgcctgttctgtttctttgcatactttgtgacctaacagttttaacagacattctattatatgaatacagtttttttgatactattagattaacttgaagtttaataccaaatattatgctaagagtagaaaagctttctgctgacccctgatttcttagaaatatcccacataatccagcttatcccttttctgtatatgtttattcaggtttacctgatgtctcaaaatgaaaccaaattaagcctttttaaaggctgatgtgccatttgtattaagttatctttgtcattttaaagacatgaattccccaagcctaattcctacttaaggaagagagacaatttagtccttactttagaaaataaatacttaagcataaaaaaaaaaaaaaaaaaaaaaaaaaaaaaaaaaaaaaagataacttaatacaaatggcacatcagcctttaaaaaggcttaatttggtttcattttgagacatcaggtaaacctgaataaacatatacagaaaagggataagctggattatgtgggatatttctaagaaatcaggggtcagcagaaagcttttctactcttagcataatatttggtattaaacttcaagttaatctaatagtatcaaaaaaactgtattcatataatagaatgtctgt

SEQ ID NO: 22592 - DNA, 726 bp, Homo sapiens
acaggtaaggcagaaggaaggaagggcaaagaaacaattccagggccctggtttctgggatgacaggcttcccaacactcatgccaggactattttccacctcggttcactatgggttttttttctttttttttttaatataatgaatttttaaaatgtgcgtttgttgcccagattattccagaaagagttgaagggaggaaaggtgtgcttggtgtgctggtgattctagcactctctccagcctgatttctagtttgtgtggtgcatccagacagctcacccaggtgcccgggctctttctggtatccagagccaacccatccagggcaggagggtgaagattaggaggggcaaaggttagcctggaggctgcaattaacaagaatcaaaatgggtttcaggattctcacacccaggtgctaatttcagctggtcctgtagaggtgacacgtagtaggacaacatggttttgggggcagtgctggggtgctggtctctgcttttctagggtagaaaggaatcatacattgaaaatgcttaaatcgatggaatgattctatgtctcctcatgcttccatctctttctggtctgcctgctcttcctgccagcccttcactgtgacagtcaccactcctagacctctgtctctaggcatctcccaggaaggagaagtggaaaggaaggagaaaagagctcagtctctggtgcccaagacattgtgc

SEQ ID NO: 22593 - DNA, 897 bp, Homo sapiens
  misc_feature 1, 2, 3, 4: n = A,T,C or G
nnnnaagaatcaggggagaagggacacaagcccttgaatgcatgccaacacgtgaatcctcaaatcaagactcaaaccatgcagtttaacctctcaagttgcccacttggccctcttccaagtgtactttacttcctttcattcctgctctaatactgtttagtacattttcactcctgctctaaaacttgcctcagtctctcactgtgccttatgcccctcagctgaattctttcttctgagcaggcaggaattgaggttgctgcagacgtgtatgcatttgccaccagtaacatactttggtgccacatgactaggatatgttctctagtgctaacatgttcgtttacagttcttaggactccctgatagaaaaaaacacaaaaaaaaacacaaaaaaacccaaccaaccaaacaaacaaacaaaaaaaaacacaggagtttctcccaaaaagaagtctgcagtgtcttttctgttttctctgaaggtatcccagggtgttagatttctgttgtttttcccttatgtggcaccgaagttggcaagaagaaggaagtgctgatataaataaatagggaaatgaacagagagactacatgtggttagcaggagtttaggatgagagaaatttagtggaccgagaaatagtctaaatatcagttttaatttgtgaaagaaaaataaaaacctgggaccccaattcactatgcctaaaggaaaaaaattaagctgaaagctgaatcatgcaagaagctgttttttcctttgttcttaagcagagcgctacagataaaaaggtgaaatatctccccaggtagctactctatgttcacctgaacttatgtaaagttctgatttactgagcacgagaagaacacataattgactattcctgt

SEQ ID NO: 22594 - DNA, 1030 bp, Homo sapiens
  misc_feature 1, 2, 3, 4, 5, 6, 1023, 1024, 1025, 1026, 1027, 1028, 1029,1030: n = A,T,C or G
nnnnnnaatgtgagagaatagaaagaatgttcatggaatgtacctgccctgtaaaatgtttgatcattttcattaatgttgcagagaatccgactgctattaagagaaagtgaacaaattaagaatttaaaagacaggttcaggcatgtcataagtgaaaacaagaaggcttaatacaaacttgttgggttttgttcgtgtgtgtgtgtgtgtgtgtgtgtgtgtttttttttggttcagcctatctagccacctacaaataatcacatttctgttacctgaatttatttctcagcctgtaaaccttagtcactgttacctgtttcttgctcagtgaatatgatcttggcactgtcatctagaaagcaagatatttgattggttttctggttccttcgaagataataattccatatccagtttgactgattttcatacccctgaatcaactagttattttcatgaaatggtttttggatatctctcctctagtttggagaagtaataatcacaaagattaatattttgcttctagtacttacagtagaagaattttaaactggtacgtctactcctgttaaatagaaaggggattcgttgtattatgtgcttgcttttttttaatcaatagaataagattcaatgcatatttatgttttatattttccactattcaggtatcatgaaatcactctagagatgatcaatcaacatcatatttatacttttggttaattatatactactcagggaaaaaatgaacaaaaataactactcatccttcaatttcattttcttgaaacagtaagagtataatttggtatgcctcagctgtcaccattttataagtggctcattctgttcttaaagtaagtatttttattggaactcagggtaattgggggaatttatttagcttctaaaatatccggcaggataggagaaggatttatttggcttcaaaaatgtcgggtgaccacttctcttattagccactactgcccatttgcttcaaaaatatannnnnnnn

SEQ ID NO: 22595 - DNA, 976 bp, Homo sapiens
  misc_feature 1: n = A,T,C or G
naacccgcctgtcagccagcctttcgagctaattagctcagcatacaacaaagataagtgagcctgggaagagggccccctgaggggtctttagattctgggaaatgtctgattggcagatgttaaaagggattccttggtaatccagtgcatcaatgagctgcagaaattcagcccaggactgcaagaattcaggcatgaggacactctgtacaggaggctcacacaggcagacccaagatggacagaaccttggaatctctgagacacatcattgcccaagtcttgcctcacagagatccggctctagtcttcaaagacttgaacgttgtgtcaatgttacaggaattttgggaaagcaagcagcagcagaaggctgcattcccaagtgaaggtgtggtggtctatgagtcactgccagctcctgggcctccctttgtgagttacgtgaccctcccagggggaagctgttttggcaactttcagtgctgcttaagtagagccgaggccaggcgggatgcagctaaagtggccctgatcaactccctcttcaatgagctgccctctcgcaggatcaccaaggaattcattatggaaagtgttcaggaagcagtagcctccaccagcggcaccttagatgatgcagatgaccccagcaccagtgttggggcctatcactacatgctggagtcaaacatggggaagactatgctggagtttcaggagctgatgaccattttccaactattgcactggaatggaagcctaaaagcccttcgtgaaacaaagtgttcccgacaggaagtcatctcctactattctcagtattctctagatgaaaagatgcgcagccacatggccctggactggatcatgaaggagcgggactcaccaggaattgtctctcaagagctacgaatggccctgaggcagttggaggaagccaggaaagcaggacaagaactacggttttacg

SEQ ID NO: 22596 - DNA, 3261 bp, Homo sapiens; identical to SEQ ID NO: 21399
  misc_feature 1, 2, 3, 4, 3260, 3261: n = A,T,C or G

SEQ ID NO: 22597 - DNA, 1175 bp, Homo sapiens
  misc_feature 1175: n = A,T,C or G
accagttttgtgctggttggcctcctgccaggaggtgacgctttcaagggagcaacagctgtggtagcataggaagaatcaggtggtgagcagggccctagaactcacaagagaatatgacctttgtcttcagctaccagggtgggtagaggaggaccatcaggttggggcagggctaggtgcgtctgagttcagactctctatgggcaggtcttgctgtggctgctgtaggggatgggggtggggttcccaggtcactagagttgtgtgcctaggaagattatggctacctctgctgagtcacgcatgttgtcagggaagtgggggaaagctggcaagatgggggtctcactaggttgcacaggttgctcaaactcctagcttcaagtgatccttccaccttggcttgttgtacccaagcgagttagaaaaacgccacactttgagacaaattaagagtcttttattagccggcgacctagagacggctaatgctcaaaattctctcggccccaaggaaggggcttgattaacttttataccttggtttaggaaggggagggggggtctagttaaaacaattttacggaagtaaagtagtcaaaaagttaaaaggacaaatggttacaggaaagtaaacagttccaggtgcaggggctttaagactattacaaggtgatagatccggggctttgggcgtttatcaatcggacgaattcctgggaactgcggatatagcttgccacagtatcttatcagttaattgcattcttggatgtgctaggagtcagcttgcacaagttaagtccttgaggaaggggctgccagtgaaagagccaagatggagtctgtctggctcttagctaagggagagtcaattcaggtggaaacaaggctaggtgattaaaggaaagagggagagtctaaaaacagggttagtgaaaacaaggttgggcattacagtactaagcactgggccacacgctgcctccactttgctctgccgcatgtcttcatacttttcttgccccaggtaaatttttttctttagacagtcttgctctgtcacccaggctggagtgcagtggcacaatctcagctgactgcaacctccgcctccggggttcaagcgatttaaagccccgcagatgtgggggatacctctagagatcgan

SEQ ID NO: 22598 - DNA, 2026 bp, Homo sapiens
  misc_feature 1, 2023, 2024, 2025, 2026: n = A,T,C or G
ncgtccgtggacgcgtgggtcgcccacgcgtccgcttcagacttcaaccacagttgtgattgtttgtagtttgttagctgcctggagtgttattttaagaaagcagaagcaccatcatttgcacactccttatagatcacacaccttaaccctgactttttttgctccagtttttcagaagaagtgaagtcaagatgaagaaccatttgcttttctggggagtcctggcggtttttattaaggctgttcatgtgaaagcccaagaagatgaaaggattgttcttgttgacaacaaatgtaagtgtgcccggattacttccaggatcatccgttcttccgaagatcctaatgaggacattgtggagagaaacatccgaattattgttcctctgaacaacagggagaatatctctgatcccacctcaccattgagaaccagatttgtgtaccatttgtctgacctctgtaaaaaatgtgatcctacagaagtggagctggataatcagatagttactgctacccagagcaatatctgtgatgaagacagtgctacagagacctgctacacttatgacagaaacaagtgctacacagctgtggtcccactcgtatatggtggtgagaccaaaatggtggaaacagccttaaccccagatgcctgctatcctgactaatttaagtcattgctgactgcatagctctttttcttgagaggctctccattttgattcagaaagttagcatatttattaccaatgaatttgaaaccagggcttttttttttttttgggtgatgtaaaaccaactccctgccaccaaaataattaaaatagtcacattgttatctttattaggtaatcacttcttaattatatgttcatactctaagtatcaaaatcttccaattatcatgctcacctgaaagaggtatgctctcttaggaatacagtttctagcattaaacaaataaacaaggggagaaaataaaactcaaggagtgaaaatcaggaggtgtaataaaatgttcctcgcattcccccccgcttttttttttttttttgactttgccttggagagccagagcttccgcattttctttactattctttttaaaaaaagtttcactgtgtagagaacatatatgcataaacataggtcaattatatgtctccattagaaaaataataattggaaaacatgttctagaactagttacaaaaataatttaaggtgaaatctctaatatttataaaagtagcaaaataaatgcataattaaaatatatttggacataacagacttggaagcagatgatacagacttctttttttcataatcaggttagtgtaagaaattgccatttgaaacaatccattttgtaactgaaccttatgaaatatatgtatttcatggtacgtattctctagcacagtctgagcaattaaatagattcataagcataaaaaaaaaaaaaaaaaaaaaaaggaaaaaagtttccttatgttaactttctttacgtaagttaacttgttattgatgaatggtttgtaagtatgatgtaatgaagcattaatcacagaactaatacatgtacatatttgaggtggctttgccattttatacccataattaaataaaagggcaaaatcccccctgataaataccatgtttatcatggcacataaaactttatggcagaaagccaaggccaattgacatatatatttaaaggtaccatggaaagtaaatgctaactctgaatttaaaacagtgggaagatgattagtaagagttggtttcttgaaaaggaattgttctggtaatagtcatctttaatgacttccacggattattcagtgtttctttagggatatgcataggacactggtgcttcagtagaaaccccagttttggtgtattaaagatacatccattcttgactgatctttaatctagagtgtggttttagccaagtctttgaatctcatttagtcagtaaacatttattaaatattaaccaaannnn

SEQ ID NO: 22599 - DNA, 2720 bp, Homo sapiens
  misc_feature 2719, 2720: n = A,T,C or G
cgcgtccggacgtactctgaaggctcctgacccccagatgagcatccttgtgtccgttaacttctgtgtttatgaacaggtgaggccagagacaggcagacgagcagatgtattgcagggagctggatgacatggcccttggaacctgtgcacatgcctgcctttctgatgcacgtccatgttttctctgcacctccccggtggtgttggtataaaaagcaggcttacatcagcaagggatgattgtcgtctcatgcgatcctgggagatggcagaagtcccgggacacatggagtgtgggctctttcggaggctgttggatccctcctgaatgtgttgtggccatggaagtaaggccagtggctacgagggacagtcttcatcttgggagatccctagagagggcagggagccccttgacatgtggaatgtgatctctgttgggtgctggtggatcccacaggtggtctggcatggaagaaggccagaggctgcgatggatcatctttgtcttgggagattcctggagatggtggggagcccctgggcacgtgcagcatatgtggcgtgggcttcttcaggtgctggtggatccctcaagatgcttttcaaggtttttctatgagttctgttaaagagtctgaaaatggagcgtagaagacatgcttcgatttccaggatggttgtgttttccagagaggcggagggtaaccactggcgcagccctgcctcccacagataattccgggtgcaagtgtttcatatctagacttggacttctatcctaccatacttctttgtgtgcagttcattgtggaaccagcacagattttcatacgaaagttatttctttttaagcctcaaaaagtgacagaatggagtgtatcatgaaaaagtctgacatcaaaacctcaaaatgtgatattgattgggtgagatagaattccatggaatttcattgccaaaccagtgaagtgctaattttgacatttgtaccagctaacgtagctgtgaagaaacacaccaatgcactgctaaggacagcatagaccaagatctaggtttcatatggatgaatttattcttccctttgaggcaagacaagaaggaaagaaagtatgggaataatgctgccctcccatcctcaagggccagtgggaactctaatattgattggttttcacagaattccatggactttaactgctgaaccaatgatgcactgattttgtcacttgtaccagctaacgcatctgggaggcaacaaaacaatactctcctgaggttaatgtggaccaaaaactagatttcatataaaagagtttattccttctacttgaggtgtgacatgaaggaaagtaatggaaataattctgccctcccattctcaagggccagggggaattcaaatattgaacggaagtgattttggaattgcatggaattctcactgccatcccaaagaaatgctgatcttgtcactcttacctgtttcattccctgggggcagaacaaaaggacgcactccaaagatcggcatgaaccaagaactgggtttcatataaaatattttattctgtcctcttgagatgtgacatgagaaaagtattgagaatacttctatcacctcatcttcaagaatccgtaggaattctcccatggtggactttacggttaacctgaacaggtcttggaaaaaggactttaaacattctcctgttctgtggaataagtatacttttttctggacatacaccttgtcagtgagttccatgtgatactagagttgcatagatttttaacctttacgccaatgaagatctgaggcacacattgccccttttttagaagtttgcatttgtcactgataactgtaataattgatcttgttgaaaagcctgggaaatgaagatctgatatgtcacttttaccggcttcctcaactgaaaaagaatacaatgaaacacgctgagaatttttgtgctttctcagtcttgctgatgatctttctatgggcctgaagcgtggagagtgccagagaggctgatcctcagcagtgtggcagaggaaagttgggtgcgactaaggggtatgcggtgcccacatgccactgggtcctcagcagtaccacctgattggaagtgatattggtggaagacaacattttgccgcttggaattctcacctccacaccaaagaagtactgtttttgtcatttgcaccagcttctttctccaggaaagatcaaaacgatgcactgcaagtgtgattggtccagatagctgccttatccaactgccttctttggaccacttcatcatgggacagcttgatgcaatctacttgacaagaccctggaaccccacacccctccatgggaaccagtgttccacctcccagttcacagtgtgaccccaggggaactcttgcctgcttgctttaaacccaccacttaaaagtctccacagacctgtttgaatagtacccttgacccaataagggcattggcccctgggtgtctctctctctctgtatctgtctctacctctgtgatcctatgtctctctcgataccttgaccttgcgtgtggacttcaggcatgccatataccgcttatgacctgaagcgtagaataggataacttgagcgggggcccggtacctaatattccctatagtgagtcgctttacttcactggccgccgttttacatccttgann

SEQ ID NO: 22600 - DNA, 769 bp, Homo sapiens
accgtgttatgcaaattaagcacttttcttctaaattcacatgaacttttagagacgtagactatgttattgaagtaactcatcctaagtgtctgtagtgattggagatattcttgcttatcaaattgaagtatttataagtgagtgacgtgatgtctgagatctatcttaaagtaatccagtagggcaaagataacttgagattggccagttcttgataatttttgaagtaggctgatgagtacgcggggcttccttttcgatccgccatctgcggtggagccgccaccaaaatgcagattttcgtgaaaacccttacggggaagaccatcaccctcgaggttgaaccctcggatacgatagaaaatgtaaaggccaagatccaggataaggaaggaattcctcctgatcagcagagactgatctttgctggcaagcagctggaagatggacgtactttgtctgactacaatattcaaaaggagtctactcttcatcttgtgttgagacttcgggggggggctaaaaaaaggaagaagaagtcttaccccacttccaaaaagaataagcccagagaagaacggtaaactcggtgtcctgaaaaattttaagggggtggaaagggaaaaataggccccttcgccaagggggcccttttgataaatgggggccggggggttttgggaaaggcctttgcgcagacatttttggggaaaaggtgttgagcttaaggtttacacaaacccaagagaccggttccttgtttggg

SEQ ID NO: 22601 - DNA, 1020 bp, Homo sapiens; identical to SEQ ID NO: 20647
  misc_feature 1, 2, 3, 14, 20, 35, 42, 48, 81, 1019, 1020: n = A,T,C or G

SEQ ID NO: 22602 - DNA, 3645 bp, Homo sapiens
  misc_feature 1, 3569, 3596, 3611, 3627, 3634, 3639, 3645: n = A,T,C or G
natagcgccgggcagagggacccggctaccctggacagcgcatcgccgcccgcccgggtcgccgcgccacagccgctgcggatcatggaacatctaaaggcctttgatgatgaaatcaatgcttttttggacaatatgtttggaccgcgagattctcgagtcagagggtggttcacgttggactcttaccttcctaccttttttcttactgtcatgtatctgctctcaatatggctgggtaacaagtatatgaagaacagacctgctctttctctcaggggtatcctcaccttgtataatcttggaatcacacttctctccgcgtacatgctggcagagctcattctctccacttgggaaggaggctacaacttacagtgtcaagatcttaccagcgcaggggaagctgacatccgggtagccaaggtgctttggtggtactatttctccaaatcagtagagttcctggacacaattttcttcgttttgcggaaaaaaacgagtcagattacttttcttcatgtatatcatcatgcttctatgtttaacatctggtggtgtgtcttgaactggataccttgtggacaaagtttctttggaccaacactgaacagttttatccacattcttatgtactcctactatggactttctgtgtttccatctatgcacaagtatctttggtggaagaaatatctcacacaggctcagctggtgcagttcgtgctcaccatcacgcacaccatgagcgccgtcgtgaaaccgtgtggcttccccttcggttgtctcatcttccagtcatcttatatgctaacgttagtcatcctcttcttaaatttttatgttcagacataccgaaaaaagccaatgaagaaagatatgcaagagccacctgcagggaaagaagtgaagaatggtttttccaaagcctacttcactgcagcaaatggagtgatgaacaagaaagcacaataaaaatgagtaacagaaaaagcacatatactagcctaacagattggcttgttttaaagcaaagactgaattgaaggttacatgttttaggataaactaatttcttttgagttcataaatcatttgtacccagaatgtattaatatattgctattaggttaatctgttaactgaatgctttgatcagcattgaggtgatgctcacctccgaggacctcagaactggtgcagcttctctctccctccctcccacagactgaacctttcgccagaagctgtccttataacgccttatacgcatacacagccaggaaacgtggagcattgtttctcacagagagtctccaaataaaaagggttttgttcagattaaaatgtttacaacaaaatgttaattatattctaaatacagggtatgttctaatctatattaagcaataatgccagtgcataatcattccatttgttcctttagcaatcaaccccagaaaatattaaaatgggatcatacacagaagatagaaaaatctagcaaaacttctctttctgtaagccagagtcttgtctatcagattcccacaaccactcctgattctaaatttagtgatatggtaatgaaattggtatttattttaaatattagttattctaaggagaaaaaaatgcttctgcaagattttcataattcaggggctgtggataggattgttcctctgtttccctaatcattcatctgttcatgtctccctcttgtgccagtcagcctaggttatacagatgccatgctccacaccacgagcagtgtacaaatctggctgcccgtttactttctgagcaagcactggagtccactccgacctttttctttgaacatgcatgctgctggaatatgtataaatcagaactagcagaagtagcagagtgatgggagcaaaataggcactgaattcgtcaactcttttttgtgagcctacttgtgaatattacctcagatacctgttgtcactcttcacaggttatttaagtttttgaagctgggaggaaaaagatggagtagcttggaaagattccagcactgagccgtgggccggtcatgagccacgataaaaaatgccagtttggcaaactcagcactcctgttccctgctcaggtatatgcgatctctactgagaagcaagcacaaaagtagacaaaagtattaatgagtatttcctttctccataagtgcaggactgttactcactactaaactctaccaagaatggaaacaaagaatattttctgaagatttttttgaagattaatttataccctataaaataaaacttgttagcttcgatgaagtcacttcatcttctctcctaccttatttttttaaataagtttttaggtcctgacactgacatcaaatacatgcacaccagaaaggcatttccaccaccgtccccactcattagcgtccagagtgcctttctctctcggctttttttcccccctgagctctagttttaaactttctcctgttaaaaaaattgtacttttatttcatgtaaactgcccctctgaggatttgggcatattttttggaaggtgcctaatgcttaggatagtctctagggtgatgcactgcacctgcttccttcccttcagtgcggccgacccatttctgttgaacagatgtctcctgtgtgatgcccctgactcttacatttatctttctaaatcattttctgaagctgacttgctctagggtgcttcatcaccacttccatcttgcatcaccttataactgttctgtcttgttctctcccagcaatttattttaaaacaagggctagcttcaagcatgactgttaatggctcctctgtgacaaaacacaagttggaccaaggagaaagccctttggagaaactggaccctagttcagtttagatctcaaatataggctgaaatctcttaccaaagtgcgttccagataaaaatgagacttagaagacagactggtctaatatgctcactggtcatcacattcagcttattcttacgtgccagtgaggccctaaggtctcagtgcatagcatacctgccactctggatgttttcctgggcttcatatctgtatggcaaggagggagctgtccttcagcagacaaagtcaagcagctttaagtacaaggcagcttgaaacctctctgatgaaagtgaaaaatgtgggtagcttatactttcaaactaatgccagtgactagagagaggtttcattcatgatgtgtatttccaatttggtcttcaattcaagagatgcttcataaaacacttatagccttaaaccattcaagggctaattaaaaaaatagttatgaaatcttagccacaaaaaataaatcaggtaaacattttaacctgtcgttaagtgttgtaacttcaaaaaaccaaaatgcttattttaatgtgatttttctaaaactattgaaaaattaatatttctataatctattaaaaaaaatggagaatgttttctctcaaatttcctctgacccatgggaatgaaaatacttaaatactgtaaagcatatctattaataattcccccantttttaaccaccaatgggtgttaccgntgggtttacctggcnttgtccggctccaatntattcgnacccntgggcn

SEQ ID NO: 22603 - DNA, 466 bp, Homo sapiens
  misc_feature 461, 462, 463, 464, 465, 466: n = A,T,C or G
acaattgttttagaagataatttgtttttctctcttcagtttcgcatattactaaagacaaatcatggtaggattggtttgtttattatacttggcctaactatttgtatacaatgcagcaagaatgattattttttacttaggcttttaagtaggctctgatggaactttgttccatagcaggaatctcagataagactttgtaaaacccgtaaaacccagccgagccatggatttatgccattaaatacccatgagttgggtgaaatttcctctccttttgagggcccaagataaacctggggcgtctgcacttgtcaaaaagtgatattctttacttacacagtcagaaaccctgttcagggactgtgtatacagaatatgaggccagtttttccaagggctttattggctccgtaagtcaagtttgattccttataaggaaagcacatgattccagnnnnnn

SEQ ID NO: 22604 - DNA, 481 bp, Homo sapiens
  misc_feature 42, 480, 481: n = A,T,C or G
acttttttttttttttttttgctcccagtggcgggacacggnggcttatttttactcttatttatttatttatttttggagactgagtctcactctatcacccaggctggagtgcagtggtgcgatcttggctcactgcaacctccacctcctgggttcaagcgattctcctgcctcagcctcccaagtagctgggattacaggcgcatgccaccacactcggctaatttatttttacaagcagataaaggtttcttttattttaatggctgatctatgtaatcacggaggccagtatgtacattagttccgtccggaaaggcggagacagctcaaagcaagaccccctattgggggcttcgaagtaacaggtaggtgagagacagatggttgcattcttttgagtttctgataagtctttccaaaggaggcaatcagaatatgcatctgtctctgtgagcaagtggatgacttgaatann

SEQ ID NO: 22605 - DNA, 1591 bp, Homo sapiens
  misc_feature 1, 2, 3, 4, 5, 6, 7, 8, 9, 10, 11, 12, 13, 14, 1589, 1590,1591: n = A,T,C or G
nnnnnnnnnnnnnnactctatgtttctctacatatttcaggctgagccgggctggcggaagaggcacgtgcgctgctgaatggagctggtcgctggttgctacgagcaggtcctctttgggttcgctgtacacccggagcccgaggcttgcggcgaccacgagcaatggactcttgtggctgacttcactcaccatgctcacactgcctccttgtcagcagtagctgtaaatagtcgttttgtggtcactgggagcaaagatgaaacaattcacatttatgacatgaaaaagaagattgagcatggggctctagtgcatcacagtggtacaataacttgcctgaaattctatggcaacaggcatttaatcagtggagcggaagatggactcatctgtatctgggatgcaaagaaatgggaatgcctgaagtcaattaaagctcacaaaggacaggtgaccttcctttctattcacccatctggcaagttggccctgtcggttggtacagataaaactttaagaacgtggaatcttgtagaaggaagatcagcattcataaaaaatataaaacaaaatgctcacatagtagaatggtccccaagaggagagcagtatgtagttatcatacagaataaaatagacatctatcagcttgacactgcatccattagtggcaccatcacaaatgaaaagagaatttcctctgttaaatttctttcagagtctgtccttgcagtggctggagatgaagaagttataaggttttttgactgtgattcactagtgtgcctctgcgaatttaaagctcatgaaaacagggtaaaggacatgttcagttttgaaattccagagcatcatgttattgtttcagcatcgagtgatggtttcatcaaaatgtggaagcttaagcaggataagaaagttcccccatctttactctgtgaaataaacactaatgccaggctgacgtgtcttggagtgtggctagacaaagtggcagacatgaaagaaagccttcctccagctgcagagccttctcctgtaagtaaagaacagtccaaaattggcaaaaaggagcctggtgacacagtgcacaaagaagaaaagcggtcaaaacctaacacaaagaaacgcggtttaacaggtgacagtaagaaagcaacaaaagaaagtggcctgatatcaaccaagaagaggaaaatggtagaaatgttggaaaagaagaggaaaaagaagaaaataaaaacaatgcagtgaatcacagatgtctcctgaaagaactcttttagatgaaatcattctactcaaatgtaccttaattttttttttttccctgagtaaaagcaagaaatttcttcctttggaaaaaatatatatattaaaaaaccacttttagatggttttttttaaaaaaaaaaaaaaaactggtaaaattacttttggcagacagtgttttatgaattatgtatcatgttgatatataatatgttaatgtgtcatgtaatttttactttgtacaaagcaaataaagatctttctcaaaatatactgtaaaataatataaaatattgaacacattctttatcannn

SEQ ID NO: 22606 - DNA, 617 bp, Homo sapiens
  misc_feature 595, 596, 597, 598, 599, 600, 601, 602, 603, 604, 605, 606,607, 608, 609, 610, 611, 612, 613, 614, 615, 616, 617: n = A,T,C or G
attggagctcaccgcggtggcggccgaggtacagaaaattagcaagagacattttctgcattgtgagaaatcaacatagacaccttaaagacccctttgagagtgtggctttttgaacttttcagattttgctcagtgacctgctaacacttacgtgagaggctccaggtgtaaatagaatctaatggcagaatctgtaagtgtaaacaagcatcttaggagtgagagatcaagaccacaaaatgtccagagctatgaccacagctatacctacccataaaatacgatactggagtagggtatttttgtctttttttcttacctaagagctagctaatcaggacaggtgatgcaggttctggagctctaccagggcagttctattttctttttttgagacagagtctcactgtcgccctgggctggagcgcagtggcacgatcttggtgcactgcaagctccgcctcccgggttcatgtcattctccctcagctacttgggaggctgaggcaggagaaccgcttggaggttgcagtgagctgagattgtgccattgcactccagcctgggcagcaagagcgaaactccatctcannnnnnnnnnnnnnnnnnnnnnn

SEQ ID NO: 22607 - DNA, 2065 bp, Homo sapiens
  misc_feature 2064, 2065: n = A,T,C or G
attggagctcaccgcggtggcggccgaggtactttggtatgtttttgtcttgaaaagaggttttctagctagaaattcggggcccagaaggtcaaggctccagagatccccttctcatcatccttcagttgtctgaggagacagaggatcacatgtgtcacagtgagtgctgattccccagaatctgcagtcttaagctcccctgctgacgcacacagccagttctctgcttcatattcatgtgacccactgtgaagtgacaggcagctgccaattctgtcatataagaagcagctctgcccatgcaactttgaaagttcctgcacttctccatagactgctccttcatggaaataaacacatcatcacactgtgggtgcctaagctaagtttgtttgcagtttgatgatgcccagctccttttcaactcagccttaattggcactttaagggccaggatgaggtttctctcaggccaagtcgagatttccagatttccttttgtccaaggctgaccagtttagaagttattcacatccttgttttagttctttccttcttgtcctggtacctcttcctttccaggattatttgcagagtctgtgatggcttacttggtgaccagacatggggtgagctactggtatagtctgattactttgacatctattctgaactggtcattggctgtacatgagtttttgtgctggtaaaggaatatactgggaagattggaaggcacagactgggaactaattctgagaagagaactgctgagttactgaaagaccttttggaccacccctaaatggagcatcttgatagatggcaaatccagtgtttcttaaacttgtccatgctgcccagagcccactgccttttatcagatgtgagacttcactgccacagtgtcatcccacagtttccttccctggacatttgataaagggaaaatcatttcttgtcctttaaggcagggactattattttttcacttttccacataccccacaacacctaacattgatttactcgtagtaggagtttcatactgttgaactctctaaaggccatttgttccagggcctagctgggcttgtgaaggacaacagagtcatttcctaaggaccccaaaagacagcatgaaggaaaaaataataataaactgctgttcacagtgccttgagtgtaccaccgtcctttctgctatgccttgtccattccaatctggacagtctctgtgcccctcctttccactcaagtgttatccagcactcaagttctggctcaaggcccaacatctccgtggggacctcagccatcccagggcattgtgaccccttcctctaagtccccggcacactcgctgattggtaccctctcattcgacaaagcatatgccattgtggcttacttgtcatttctttaggtcttgccttcccaagtagatcatgagccactataagaactagctcccatagtcccagcccctgggcctggtacatggcaatgcttagtgattggtgattgaggataatggtggtaaaaggatgtaccagacacgtcatctcctgaagaagaatgcccgaacaacctgtccttgttttaatgtactttctctttctttcctgtccagttttatttcctctcatagtaaactggctaaaaaaatatgtcaagtttcctggtcatctctttccaacccctttttcttcccctctcccctgcatggttggtctgggcctgttgggtccaactagcaactccccttaggtgtggctaaatctgcctcatggccaaagccaatcccatttcctgtcccccgttacccaaggactcccagtctgtatgcacaaggcgggttgtgaagtctgcatgtgcaagaaaccccagctgtaagaaacagcttccctcgttggcatgggtggtcatgctaatattccagcatttgagaaggtcgaagtgggcaaatcactggagccaggagttcgggactagcctgggcacatagaagattactttaaaaaaaaaaaaaaaaaaaaaaattgtgcgcgcggcgagaann

SEQ ID NO: 22608 - DNA, 2053 bp, Homo sapiens; identical to SEQ ID NO: 22286
  misc_feature 2052, 2053: n = A,T,C or G

SEQ ID NO: 22609 - DNA, 862 bp, Homo sapiens; identical to SEQ ID NO: 21330

SEQ ID NO: 22610 - DNA, 698 bp, Homo sapiens
  misc_feature 672, 674, 691, 698: n = A,T,C or G
gttgtgtgactgtcttatttctgggattccagatgcccatgataagagtgagttgctccttgcctgttcaactcacccactccacaggagtcactgaaggccatgaacaagtcccagtgtgcagtagccctgtgcagggttcccagcttcctcccctttcagcccagcatctgtttcttccttctgcccactctcaatgcctcccttctgaagatctgctaggagtgtaccagttttcctgatgtcccagtcctttggtgggaaatgttcctcctgcctgggtctagttggccatcttggagccctctgtgtgtattcttcctctatttttccaaaacaagttaccataaatgcaacagcttaaaataacccaaattcattagctcacagttatgtaggtcaaaaggccagaccaactcaactaggttctatgtttagtttctcacaagactgaatccaggttgtcagctgagctgtgatctaatttggaatatctgaggaggaaactgattccaagttcattcaggttgctgacagaatatagctccttgtggttgtaggacttaaatccttattttcttgctgttagccatgaactatcctcagctttgagccccattcatctttaaagctagaaatggtaagttgaatccttctcatgtttcaaatctntntgatttcattttttacnccggacn

SEQ ID NO: 22611 - DNA, 578 bp, Homo sapiens; identical to SEQ ID NO: 21835
  misc_feature 1, 2: n = A,T,C or G

SEQ ID NO: 22612 - DNA, 1536 bp, Homo sapiens
  misc_feature 1511, 1512, 1513, 1514, 1515, 1516, 1517, 1518, 1519, 1520,1521, 1522, 1523, 1524, 1525, 1526, 1527, 1528, 1529, 1530,1531, 1532, 1533, 1534, 1535, 1536: n = A,T,C or G
agggaatttggccctcgaggccaagaattcggcacgaggccacatctctttgtcccattagttgagatgacttttagtagtttattgtccacaactcttctgtgcaactcttctgacctctgggactactgcaacagtagccctattgcgagatggtattgaactggttgtagccagtgttggggacagccgggctattttgtgtagaaaaggaaaacccatgaagctgaccattgaccatactccagaaagaaaagatgaaaaagaaaggatcaagaaatgtggtggttttgtagcttggaatagtttggggcagcctcacgtaaatggcaggcttgcaatgacaagaagtattggagatttggaccttaagaccagtggtgtcatagcagaacctgaaactaagaggattaagttacatcatgctgatgacagcttcctggtcctcaccacagatggaattaacttcatggtgaatagtcaagagatttgtgactttgtcaatcagtgccatgatcccaacgaagcagcccatgcggtgactgaacaggcaatacagtacggtactgaggataacagtactgcagtagtagtgccttttggtgcctggggaaaatataagaactctgaaatcaacttctcattcagcagaagctttgcctccagtggacgatgggcctgattaccagctgggacttagagtttctgtgcaacagtttttcactgagcatgtcaagaaactgataagatcaaaaaggtctcctaactcactagatcagcgcacaagtcagtgtaaaccacttagatagtagttttttcataaatgctcatcatatttatgttccgctgtacatgttcagtataaatatatgtgtagtgaagctactgtgagtctttaaatggaaagagcaaatgagaagtggtttggatacacttgatgagagatgagagtgtcacattaataatttttaagactcttaggcagctatgggtttcttttgatcatttttgttctttattcatttgaacacgtttttgaagttcttcaaaactagtcagtttgaattttgacagctattcaatatgtgatctccaagtttaaaaaaatttttttccagacttccctaatcctaaaatgcgagtttttatttttaataactgtaccaaggaataagtatgaaaacagttctctgttaccatattttgtattctggaccacttactggtgaaagcaaccatgcaaaagaaattaatttggccaggcacagtggctcatgcctgtaatcccagcactttgagaggccaaggtgggtagatcatctgaggtcaggaattcaagaccagcctggccaacatggtgaaaccctgtctctagtaaaaaacaaaaaaaaaaaattggggccgcgccccagaaggtaacaccgcgggcccgcccaaaaaaagcacacgcccaaaccggccggatggggtcccaaaaacggggcgggtcaacccaggtggccgcacagcannnnnnnnnnnnnnnnnnnnnnnnnn

SEQ ID NO: 22613 - DNA, 1294 bp, Homo sapiens
actcttttttttttttttttggtagagacaggggtctcaccatgttgcccagtatggtctcaaactcctgagctcaagcaatctacctgccttggcttcccgaggtgctggggttacaggtatgagccaccacacctggccttgaaatgtatttcttaaataagccttgaaggtcaaaattactccttgaaccatttgctccaaaatggatagtgtgttgataggcctgaaaacaacattcatttccttgtacgcgggggggcatcacggacctaccaatatgtgatgtcacccctggtggcccagctgtgtcatggagaaactccagctgggcccagagattctgcagcgggaaaatccaaggcttatttatgccaggctgagtggatttggccagtcaggaagcttctgccggttagctggccacgatatcaactatttggctttgtcaggtgttctctcaaaaattggcagaagtggtgagaatccgtatgccccgctgaatctcctggctgactttgctggtggtggccttatgtgtgcactgggcattataatggctctttttgaccgcacacgcactggcaagggtcaggtcattgatgcaaatatggtggaaggaacagcatatttaagttcttttctgtggaaaactcagaaattgagtctgtgggaagcacctcgaggacagaacatgttggatggtggagcacctttctatacgacttacaggacagcagatggggaattcatggctgttggagcaatagaaccccagttctacgagctgctgatcaaaggacttggactaaagtctgatgaacttcccaatcagatgagcatggatgattggccagaaatgaagaagaagtttgcagatgtatttgcatagaagacgaaggcagagtggtgtcaaatctttgacggcacagatgcctgtgtgactccggttctgacttttgaggaggttgttcatcatgatcacaacaaggaacggggctcgtttatcaccagtgaggagcaggacgtgagcccccgccctgcacctctgctgttaaacaccccagccatcccttctttcaaaagggatcctttcataggagaacacactgaggagatacttgaagaatttggattcagccgcgaagagatttatcagcttaactcagataaaatcattgaaagtaataaggtaaaagctagtctcgctctagagggcccgcggttcgaacaaaaactcatctcagaagaggatctgaatatgcataccggtcatcatcaccatcaccattga

SEQ ID NO: 22614 - DNA, 731 bp, Homo sapiens; identical to SEQ ID NO: 20529
  misc_feature 1, 2, 3, 4: n = A,T,C or G

SEQ ID NO: 22615 - DNA, 424 bp, Homo sapiens
  misc_feature 420, 421, 422, 423, 424: n = A,T,C or G
acaaagaagagcatccgttcgagaagcgccgctctgagggcgagaagatccgaaagaaatacccggaccgggtgccggtgatagtagaaaaggctcccaaagctcggataggagacctggacaaaaagaaatacctggtgccttctgatctcacagttggtcagttctacttcttgatccggaagcgaattcatctccgagctgaggatgccttgtttttctttgtcaacaatgtcattccacccaccagtgccacaatgggtcagctgtacgcgggggggcaaaaaaatcaaggtatttggtcccggaacaaagcttattattacagacaaataaaacaccaaaagctttaagttatttgatttgtggagcaacagaccttgttatgagcaaaatgaaccgggactggaaccctggtcnnnnn

SEQ ID NO: 22616 - DNA, 2551 bp, Homo sapiens
acgcgggggcacaaagctggaataaccctgccagttcttagaagctttaagattcatcgtcttgaacttgatacacatagtatagcaccttaaaaacgaatcatctgctagttcagtattttctacttacaatcactccctcccagggcatgtaattaatttactgagcttaaaaaaaaatatcaggattactcacacagtcttgaagatgcaatgtcagctatttaggacagaaacatccaaggccgtgtcagaactcaattacgactacatatgcattaaggcaggaactggcaggcctcagggtacgccaactataggactcgtgcttctcgtacgctgggctataatctatgaaactgagctccagagccagccaatcacttagctcctcataacaagtctaactggctctggaaagctgaaagggctgcactggaacaacacagatgagatattctacacattaatctacttatctggaatcactttgcctctaaaggccagagaaaaatcacagcttccttgtcggaggggaaaaggacaggtgatctggggaaaacgcagctacacctggagcaaggtctcttcccggcttggcaatctcagctgtgccggcgctacgggacccgagccgtcccagaaaccaaagggcaggcacggcagcaaacgcctgagtgctgctgccttcggtgactatatgagaatggaaacttctaaggaagccaggttgttagaattgttaccccctttactcagagataacatagattatccaggctgagatggaaaacaagccctttattgaattttcaacacagactccctgcttctcatctccttaataaaatttcattaaaatccccttgaactcccatgttcaaatctccatttgttgacagacaaagccaacaatactctaaactgaggcctgcaagtcatttcatttgtatttttgtccagaaatttcccataggaagacttcacctcctacaactccgaagaaaacccttactgtccaagaccgtcaccagcaaccatccgcagtcattcaagtggaagctttcacagcttttgtacattctctgtgtcaatatacaactgagttacagactgtcccctggctccctgacccttacaaacactaaaagttttgtttgactcaacttcaagctgctcatctgttagtaagtgatgttcactccagaacacattcatgatgagaactttctaaaagaccagcactgctcttcccctcctataatcataataatcatgataacctgaaacatgttactgggactcgacatttttctggggattgaaatctttagtccttggagctgtcacatagcaggggcaacctcacactgaaacaaaggaagtgatgtcccattattatccaccctgagccaccataatatgctgtttacatttattttcttcagcctgtgcaaaacaaagcaatggaaaaggaaactaaaaaatatacatactagtaccattatcttcttttgcctaaaattactaatgcaccacgtcagtctgcttccttcaggcatcattctcaattcatcaggacttgtattagcaggttctggctagagagactatctcctgtcatcacgatcaattaatgttttctggtgatcacatcaggccctatctaagaagctcatggtatacaagggtcacccaaatagctgagtgcagtccttgctcatatttccttcatcttaaccccgcaaacaagaattaagatgatcccaataaaagaaaaattgctcaggaaactgaacctttttctgaaccaagcactgtcagcaaatctcaggtattagagcaactatggttgattgaaaagtgtctcaaaatctgggccaagaatgattgctaggtccataagctaatttgtctggccttgccatttacgtaagccaaagaaagtcactcatgagtaaactatagaaaacgttcagacccatcctgttagtatgtcaaatcaactaagactggcagggtattaactccattccaggtgacatggataaagagccccattattttcacagtgccagcctctacctaaggaaaccctagaccttggaaccagtttcctggtagggaactgctgacagtttcaatgctgacagttggagccaatgcctcatagtgtaaactgaaagaaaaatagttgctttttaaaatgtcagcaagaaggcctgcctcatcttaacaaagcaaaaaaaaatgctttaattcaaattaaaaatcatgatactagagatgggagtctgtggtcactataaagataaagttcatgttcttggttcagataacaaaacactttatctggataaatggacctcaaaatttgctcttggcacatgggggaaattttttgttgtattttgttgttgttgttgttcttgttgttattgtttaaattaatcttcctaaggccatgaatatgaaatcatattaataatgcatgtgacaaaattctaaaatatattacacttaaaattagcataaaccatcaacttttagt

SEQ ID NO: 22617 - DNA, 2012 bp, Homo sapiens; identical to SEQ ID NO: 20122

SEQ ID NO: 22618 - DNA, 2029 bp, Homo sapiens
  misc_feature 1, 2, 3, 4, 5, 2029: n = A,T,C or G
nnnnnacacagtccaatgatgctaaaaagcaagcacatatgtaagtctgcaaaataaccagctgacagcatgacgacaggataaattccacacataccattactaaccttaaatgtaaatgggctaaatgctcccattgaaagacacggggcaagctgggtaaagaaccaagacccactggagtatgccgtcttcaagcaacccatctcacgtgcagtgccatacataggctcaaaataaaggaatggagaaaaatatttcaagcaaatggaaaacagaaaaaaggtgttgcactcccagtttctgacaaaacagactctaccaataaagataaaaaaagagaaggacattacaaaggtggtcctgacctttgataaatctcattattgcttgataccaacctgggctatttgtattgcccaaaccaataggataatttgctgaggttgtggagcttctccccttcagagagtccctgatctcccaaaatttggttgagatgtaaggttgattttgctgtacaactccttttctgaagttttactcatttccaacaaggaaggcaagttttcctgcttccatgacgatggagagcaggcacctcctttcctgagtttcagcttgcttctgacagggaaggtgagtgtaagttttttccagcttctaagatggcagagaacgatcaccagcctgagccttatttccaggtaagtagctgaattagagttttgtcttaaaatttttccttaatgactaaaatttaagattacccaccagctgcttttaatttctccttaccattagaacactcagtaatcatatgaattgtgcatttgtttgttttgcttaactctttctgtttgtttatgtttggggttttattgttgttgtttcacttttctcccatctcttcctgacttggtcaaatccaaaggaatgttccaaattgtggggagcaaggcatctgaaatggctaaaactcctgtggctgcaaaaataaactcaacaagtttccaactaaccacccgaatgcaaccagacaaaagcacgaaagcaaaggaaaaaacccaataaatagagacgtggcgaacaaccacgcacacaaaatcaagcagcacaaaaaagggtgggccgccgcgaaactatacaactgttgggcccgagaagaaacgacagcctcacaccggcagtggttccaaagcggggctcaacgtgttactgcccacccgacaccagcaacaagcacgacagctcgcaccacaccaggagagcagagacagcggcaaggacaacacgcgagcggccaaggcgccgaccagcgaagaaacaaacaaccccagagagacacacagaagacgcagagacaagaagcaaaatcgcgacccgcgcagagacgcgacacgcgcacgcacggacgaagacagggaacggaaccgcagagcaagcacgaacacgacacacagcaagcagccaacggcggccgcaacaagggagccagcagcgggagagaaaggagagggaggacgccgaccccgagcacgaaccggagaaccccaccaggcaagacagagagaagcgagcgagacagaaggcagagagggtcgcgacggagcgcgggaagcgcgcagaccagagcgcgagagagctagaaagcccgaggacagcgggcagacggccaggcgagcagaagcacagacggacgcgcgagagaggagcagcgaaagacggccaagaggcgtagcgagcggaggcagaaggcgaagccaaaggagcagcagcaccgaagcgaaagacagagacacgaagactgacgagcagaccagaacgacgaaacgcaaggagcacgagagaggacgagcagcaggccgagccgagcagggagcggaacgcaggagcagagaggaaggcaggagcagcaaccagcacaaacggacagagggcggagaggacgaccagcacgacggcacagggggagacgcgaggacggcgcgaagcgacagcacgggcgcacgtaaagaacagaagcggn

SEQ ID NO: 22619 - DNA, 1207 bp, Homo sapiens
  misc_feature 1, 1202, 1203, 1204, 1205, 1206, 1207: n = A,T,C or G
nactctagtcaggagggtctggactaatgggaggtggtgcttggggacgaggatgcgtactggaaggtggaccgtcccttactttctgttaggttagatcaagctgagtatctgtggctttcttgtaaaactggtctttggggagcattgagttgtaaatcaagtaaaattattgtgactgtgtgtatatgctggggtggttggttttccaaagagagatgcggtggactttgatgtacgcgttgatactcaagaccaaggaatgtaccgctttttaacatcacaacaactttttaagctactggactgcttattagagtcacatagatttgcaaaagcgtttaattccaacaacgaacagaggactgccctgtggaaagcaggattcaaaggcaaatccaagcccaaccttctgaagcaggagaccagcagcctggcctgtggggctgcgcattctcttccggatgtacatggatgagagccgcgtaagtgcctgggaggaggtccagcagaggcttttgaatgtctgcagtgaagcactaagttacttcctcactctaacatcagaaagtcatcgagaagcctggactaacttactgctttcgtttctaactaaagttctaaagataagtgataatagggtaagtatgaggcttcgaatccagccccacatttctagcccaattcgcattgggatgcggggtcccagagccgccgtgcaagagctctcagagatgaatcaagcagtgcccaggctgcactgctgcttgtgcaaaagccaccagtggcctttgctgtatcttcctcagtccttgcttttctccccccttacccagctttgttcactaattagcagttctctaggggattcagtaggcgagggatcagaatcccttgggataccttgacaagttcccattatgaccccaggaatctccccctttgccccattttgaaaactgctgtccaaccacctcatggccttgtactctgcctactactcaagactacatctggttcctgggcctgtgctctgggctgcagctgttcctttggcatatttagtggttccaggtaacccagagtccctagtgaatgggcctcatctaagaattttaaaccagtagaaataaagataaaatacacatatatgactgtaaatataagtgcatatttaaggttttcaaaaatgtacactctannnnnn

SEQ ID NO: 22620 - DNA, 3031 bp, Homo sapiens
  misc_feature 1, 2, 3, 4, 3031: n = A,T,C or G
nnnnatatgggatattgtaatgggagagcaggaaatttaaggtcggaggtatttgtttaggatacctcagtattctagagctatgggatttattttgctttgaagtccagaggtatttagctttattctaaaagcgatgaagttcctcttaattaaagacgctcctggaaaaaaaaaaaggaaaaatttaatgctgtcttttaaaaggaaacatgccaaaggccaggatttgtttgatcagattgtgtaccacttggaccttgtggaaacagattactttggcctccagttcctcgactctgcccaggttgcgcactggctggatcatgccaaacccataaaaaagcagatgaaaattggacctgcttatgctttacactttcgagttaaatactattcttcagaaccaaacaaccttcgtgaggagtttacaaggtacctgtttgttttacaactcaggcatgacattctttctggaaaattgaaatgcccttatgaaacagctgtggaattagctgctctctgtctacaagcggagcttggggagtgcgagcttccagaacacacaccagagcttgtgtctgagtttcggttcattccaaatcagacagaagcaatggaatttgatatcttccagagatggaaagagtgcaggggaaagagccctgcccaggcggaactctcctatctgaataaagcgaagtggctggaaatgtatggggtagacatgcacgttgtcaggggaagagatggctgtgaatattctcttggactgaccccgacaggcatattaatctttgaaggagctaacaaaataggcttattcttttggcctaaaattaccaaaatggattttaaaaagagcaaattgacactcgtggtggtcgaggatgatgatcagggacgtgagcaagagcacacgtttgtgttccggttagacagtgccaggacctgcaaacacctttggaagtgtgcagttgagcaccacgcattcttccgactgcggacgccaggaaacagcaaatccaatagatccgactttatcaggctgggctctcgcttcagattcagtgggcggacagaatatcaagctacacatggctccaggttacgaagaaccagcacctttgagaggaagcctagtaaacgttatccatcccggagacattcaacgttcaaagcaagcaacccagtgatagcagcccagctctgctctaaaacaaatccagaagtccataattaccagcctcaatatcatcctaatatccatcccagccagccccggtggcatcctcactctccaaatgtcaggccatcctttcaggatgacaggtcgcattggaaagcatcggccagtggagatgacagccattttgattatgtccacgaccagaaccagaagaacttaggagggatgcaaagtatgatgtatcgagataaactcatgactgcactttgagagactgaagcatctctcttccattcaccttcatagtttcattgcattccatgaaaagtgtcttggcctcagatggatggatgtgtttggacgagtgtctttaaggagtagtcctgaaaggtgtttttggtgtccatgtaaatatttgaagataaaaccactatagcttgtcataatttactgttgactgcattctcattaaaatgaaggtaaaggctcaggaatcatattgatgttctgattttaaaattggagtcaaagtctatgtttatcattttactatgttcctgatgttctttgttatttaattaatgggagcaaataaaaccagaagagcttgggaagattgctcagcatatattcctgtcgtagaagttgagattgctagggtccagtttccctagtgtggcctggacgagtcatttccccttcattgacctcattttccccatctgaaaagagagggttggactaagtgatctccaaggtcctttccaactctaaaattctgcaatttgttaacatttcattttgtttaggttgaggacatacattcaaactaattttatcacaaggaaaactgcaatacccacttccttgacagagttactcctttcagaagctaaataaagtatataacttattagatgttatatagatacagggggactttgaatttcacatcttaaagcagttgagctactttgaatttaagcagtcgtactaatcttaaattgcatagcatttgttttgatcgaatttgctgctcaagtatgggaataatttttaatgtcttaatgattggtgctgctaacttgcgtgatttcagaagacataattgtgaatacacactgtcagaattgggggattggtttttaccctagacttcactcttaaaaagcaacgtgcaatcaagatcatttatggctcaaatgaaagcatataaggttttcttgaagttgtgccaaagcattctgtagagtaggatgagatggttgttgccctagtctgttggtagaaccagaaatcaatatgttgtcttttaggttaaagcttgtaccaaaatatttatttcccccatttcaagccctgagtcaaacatttttttctcttaataatagacctgaaatgttttattagtatttctgtgaaatcagttgattcttgtgccatttttgtatatgtaattgtaattttgcccatgttaggccctctaaaaaatgtttgacatcctttgagatattttattactaaaatctgatcttttttggctactgcaaaaatctattcagcaagaaggtatcagctgcataccttgcacagtggagctgactacctataaactctccctaaggcatttgtttacaggtgtattccattttagcagacgttctgatgctcagtgtatgtgctgcatacaaataaatgtgttctgaatcttttcatcttattgatagcatttttacaaatgtgtttccaaggaataaagattattcttgcaaaaaaaaaaaaggggggtgaaaattcgagcggatagccctttgaagccaagagaaaagagagaaatggaan

SEQ ID NO: 22621 - DNA, 2577 bp, Homo sapiens
  misc_feature 2575, 2576, 2577: n = A,T,C or G
gacgcgtgggtttttttttttttttatgcgctaaagttacaggaacacgatccctagttttcattgatagtaacgctgcatctaatttgggttaaccacattaatgcttaccctgctgctcatctttctcagggaagcaacttcaggaacactcctttcacttccctttttaccaacagatgttaggactgtcatttatctacacatttgtgttctttagaaaaaggcccaccccctgcacaagcacagcctcttgggcagataggtggctgggtcagtgcttaagacaggattctagtcttcacttgcctgtgcagctgggcgctgaccttccaggtagagcacagatggcacaaccccgaggcagccccaacttgcatttccctccctccaggggctattcctgtcttaggcgatttgtggggtgcagtgaatgaaactaaagagttgttgcacctgaaaaagacaccagtgattgtttattgggtagtcgattggagactttgattttttttttttttttttcacatgggaaagtcttagattccagtagatggaattgcaatcctttgcagtttgttctcattacagataatcaacatttcttttgtataattcaatacatgatcatcaagttaattggtaaatttttattgaaatttaaaacttgcatttttatatatgtgtatgtgtacacataaaaatattttttaccatatgaaaattgcagtagctaattttctgatttcctattttataatgatacatgggctggaaaaatgtagaacgtttttatattctagaaatttattttggaagtacatttttataagggtctaatctcacttttggaaaatgaaagcacaggaatgatggggtctggtttatgtgaacaagtgagtagaaacccctttggatcattttattactgcatttttatttggtgctttttaggaagtagatctttggtaccacttcactacgtagagcattcgaagttttatccatgttatatattgtactcctgtggcatgaaaaatagctcccaagatatagagaggagaggagtgaagaaaaggctgtggtttttttttgttttgttttgtttgccacttttttatctcctattcctcaccacatagtgctttttcctgaaaagctggactgagaattggccttgaatcaggtcagagtgttaactgtcaacatgaagtattttcacttcgcagcatcaactttcaagcataagtaaaaacacaacttgcatactttgatggagcttaattgtgtgagtagaatatgtagcaaagctttttaggattttcagaactagaatactttttaaggaattaaaagtgtttctggaagtcaaaaatgggaaagcaaaaagtagctgtcctccctaaagagctttagaagatagcttaacctgtaggtacatgttatgaaataaacctttctaacataccaggagtagggcaactgtgtgagattgcgggggctacttgagagcccaccatacattggtactgccatacctattcatctaacgaggcataccggggcaaaggagagctttattgcatgcaccctcgacaaaacgccggcctagcaaaccttcctcgctagcctctgtgtcttcttcaaatagtgattattgttttaaagcagacaacacaataacagcaacactccaacacacactctactagataggcagacaagctagaacacacaaaacacaacactcatcacaaaaggaagagaggcaggcggagaggagcacacgacacacgaagcaaggaaagaaacgactggacagaaagcacagaagaccaaagagggacgaagagcgaagcaggaggacacgcgcgaaaagaaaaaagggcagagaaggagaaaagccgacgaccaccacggaaaaaagacgggcagaggcggaccgggcaaagagcaggaagggagccgaacgacaagacgaagagagaaccgggagcgagaacagagagaagaaatcgatgagacgagacgggagaaaacgagaagagggacacagaaaggaaccgggagagagagaagaccaggaagacacgaaggtaaagagggcaaggacgaacgagcagcgaacagaacgagcggcaacagagcagagcgaaagaacgaagcgaaagagagagaagacgagaggagcgaaggaagaagacgcagaaggagagaacaagcgagagaggccgagaaggcaaagaacgagaggagcagacgacgagaacagaacagaagacgaacgaacagagagatagcagagcagtagacggacagagaagcacaaaacgcagagcaagagagcggaaacacaagagactagaggagacgagaggacgcgagaacggacagccgaaagcggcagagaggaaaccagagcaaagcagagacgacgacggagcagagaggggaacgaggccgaagacaacagagagaaggaggcggacgcgacgacggtagcagaacgccacagagaagagaaagagacacggaggacgaagccgagagggagagacgcaggacgagcagagannn

SEQ ID NO: 22622 - DNA, 863 bp, Homo sapiens
  misc_feature 351, 863: n = A,T,C or G
cgcattttattaaaacttgaaagctatggcttgccgccatcaatgacgcctattgggttccaatagcctcatgttcaaatctgactcgttagcaaatccacccaactcaacatcggtcatcttgacattgcaggatattcagcaagtctgaagtttttaatcgggaaggattttctaccgttactgaacaaataaaggttctttgtagcaatggctggaaatgcaaccccgcgtacaggaccagctcgggggggtgtggcaccgaatggaaatccatgagcagcacgtagccaaccagcaggaggaaggcgatgtagaagaccacattccaggagaagaccacgaaggggnaggtgaagaacgccacatagtaccaaagcagcttcttgtgcttgtcgacaggtttcttcataaatgatacaaagccacagcccaccaagggtataataaacagacacaggataatcttccagttcttggtgtctcgggaaatctctccataccattgcttagaaagaaaattctggaccccaggctgggcgatgaaatgctggtctgtggcctccaccgccagctccagacagttgcttccaccccaagcttcacaggaatagaccagcagctgttctgccaagtcttcatcgctgctgtaacactcagtgaacagctcaacagcccgggtctcgtactcattagccagctcctcggactccccagcagcattgatgtcgttcttcactttggccagagtcttcagaagcttgctggctcccagggctgccagagtgcagcccctggtctgctcccaaatgactttggagagttccttcttattctgaagcctcgtgccgattcggcacgan

SEQ ID NO: 22623 - DNA, 1370 bp, Homo sapiens
  misc_feature 1, 2, 1363, 1364, 1365, 1366, 1367, 1368, 1369, 1370: n = A,T,C or G
nnctgcggcccttcttgtgcacctctgcttaaaagagctcacagtgttggctttcatagcagagcagtctaggaaattttgtactctggttccagggctcagagtagcaagagtgctgggacctgtctgagaagcagtgctgggctgtggatgcttgcctgtggcaccagatgccttacagtggccaggaatgctgcgggacagtctactttgattgctttctttcctccatggctgagatctgagtgtagtgttaactgggcttaaaaatcaagtccgttgtatctgcatggtcacgtagttcggcatctcatggcttttgcacctagaggtgtgaaccataatacctgaaacacaatttcataacctggctccttgggcttagcctatatggtggaggttaggtctgtatatcatcaagactgtgtctttgcatggttgtcattctgttggaattgaactttcttatttctgtaggcctaggttctgtctattcttctcagacagctcatatgctgcttcttcccttcagccttctctgatacttgtccactccccgcctgcctacatctgagtacttgctttccctctggacacccctgtgcccagtccaactctcctgtacagacaccagcccctttcccctggtttataactgttgtgggaagtggcgtggagtgtgatggtctgctcatgggctgtggggtctgacagcctgactctttggctgattagctgagtgactttggatggaactagaatatgagttcctagaggctgagactgcagtctgatttgggtgtatagccttgtgaacttaatcctgtgcctggcacacaggaagcacatcaggaaatgcacgtcaaatgagtgaataaataaatgaatgaccatacaaggactccatggtatattcttgtagatcattagttaattatcaacaattggctaatgattaatgtttgcctgagaggctgactttttgtccattagtaatgacatcccaggaaacacctggcagagttcgtctttaatttcaggagtattctttctttcttggcaaatttaactattaaagagagaagaaagacaagcacttgatactttttgaatctgtaagttataaacctgtcttctgtattcaatgttgtatattagccacattgcaaatgattctatttggatggatgtgtgcctgtcacctttcacataaaaattgattgagccagtcatagtggtatgtgcctgtggtcccagctatgtggtaggctgagccaggagtcttggttgagccccggagtttgagactgtaggggactatgagtgagcctctgcactctagcgtgggtgacagagcaagacnnnnnnnn

SEQ ID NO: 22624 - DNA, 404 bp, Homo sapiens
  misc_feature 404: n = A,T,C or G
acgcggggggattatgtgtcttgcagttgacaacggcagtgaccagtgcctttttactagcaaaagtgatcctttcgaagcttttctctcaaggggcttttggctatgtgctgcccatcatttcattcatccttgcctggattgagacgtggttcctggatttcaaagtgttacctcaagaagcagaagaagaaaacagactcctgatagttcaggatgcttcagagagggcagcacttatacctggtggtctttctgatggtcagttttattcccctcctgaatccgaagcaggtaaaaaacttgattattatttgtgcttgtatctctcattcaaaggctctgctcttccttcctttccctaccccctctgtttctcaatatacgtagctaacatctaacan

SEQ ID NO: 22625 - DNA, 430 bp, Homo sapiens
  misc_feature 1: n = A,T,C or G
naggatagataactttcacagtacttctacagttggagagggagtactgactgctgatctggaggctgggacaaagacttctggtgcacaagcaaaaagaagccttatataccatttacctgtatccaaatttccagcagccaacgatggcgaagagcctcatagcagatgtggcagtggccgccacttcccatgacaaagggaggtaggcatgattcatctctagtgcatggggacggttgccttttgccccaaatcaactcaagacccctttccaccatatgtctgtatgtaactctaaatgcatctctaagacttaagaataaaaagccactgctacctggcaagtggatgaggcaaaagagaagacataccccaaagaactatagcactctgctccaaattacagaactttctaaactatgttagt

SEQ ID NO: 22626 - DNA, 1378 bp, Homo sapiens
  misc_feature 1, 2, 3, 4, 5: n = A,T,C or G
nnnnnagtaaaaaacatccatgatctccaaaaacagtcattattaaaatcttacaaatcatatttccaaaaaggtttcacaatttttaaaaaggagtctctcatctccctcacatcatgcaacctggcttgtcctttggcctggctacatcatggcagggatctctgaagacactgtgtccaggggctgccagtgacagtccatcagagcgtcatacagctcctcactctgttccatgaactccttgttggcctcagtcacatccagctgtggcatggggtcttccaatgcatcatctccaacttcttcatatgtctgcatggtgctctgggtatagccatactgggggtaactgtagctgtagctgcctgtgttctggtcatagccccactgagcatagtagttctggtactgctgataatactggttgtagctataactgtacatctgactatattccactggctttacacggctcgctttagggattgccacgctcagccgcacaggcttagaccccagtcccactgctccctggcactccgtcagggctcgcttctgttccagttcatctgtgaatttcacaaaaccataacccttagacacgcctgtctggtccaaaaccaccttgcctccccgacaggaggggtagactttgacgaagaattcatacagcatgccatcatccacgtccggggtcaggtcccccacaaagagggaatactcagggctgttatctggttgtttcccgtaagtggcatagttcagtttaaaacgtttcgcaggtgtggctcctggaaggggtttcccattaattttatgcaaacacttctcagctgtggccaaatctgcaaattctacaaagcagtagccagctgggatcccagtgaggcggtttcggataattttgacgctcattacggtctcccccatggtggcaaaggctctggagatgaagttctcatccatgtagggttccaggtcgcccatccacaggctggccgccatacccgcgcaccggggtggggctttgcgggcggggctctgcgggcggggctcgaaggcccgcgcgggcgccaatcctggctgcggagaccgctacagagcatgcgcctccgacggcttctgcgcaggctcccgagcgcagcggcccgggtcgggcagtgtgttcagctccgggtttttcctgcaacccactgggcgctaggcttccggatcgcggtgggcggagttcaggctggaatggggcgggccagataccacctcagcctccctaagtgctgggattacaggtgtgtgggcggcaagccacccagctgctgaggcgagagactgaaggcacaagctgttccagtataataaagaaaatccttaaaat

SEQ ID NO: 22627 - DNA, 2925 bp, Homo sapiens
tgtgggactctaagtggatttcttagcagaaaccttgcaggtcagaaagaagtgggatgatatagtcaaactgctggaagaaaaactgccagcaaagtactgtatgtggcaaaacttttctttaaaagtaaaagagaaataagattctcaaaatctgagagagttcatcaccactatatctgacttaaacgccaatgggagtctgttaaatggaaacaaaagtatgttcaacatgaaagtataaaattaaatgataaagctatggacaaatagagacctgcatattattgtaatggtgaatcctgcaaaaatgtctctctatccatctctcgaagacttgaaggtagacaaagtaattcaggctcaaactgctttttctgcaaaccctgccaatccagcaattttgtcagaagcttctgctcctatccctcacgatggaaatctctatcccagactgtatccagagctctctcaatacatggggctgagtttaaatgaagaagaaatacgtgcaaatgtggccgtggtttctggtgcaccacttcaggggcagttggtagcaagaccttccagtataaactatatggtggctcctgtaactggtaatgatgttggaattcgtagagcagaaattaagcaagggattcgtgaagtcattttgtgtaaggatcaagatggaaaaattggactcaggcttaaatcaatagataatggtatatttgttcagctagtccaggctaattctccagcctcattggttggtctgagatttggggaccaagtacttcagatcaatggtgaaaactgtgcaggatggagctctgataaagcgcacaaggtgctcaaacaggcttttggagagaagattaccatgaccattcgtgacaggccctttgaacggacgattaccatgcataaggatagcactggacatgttggttttatctttaaaaatggaaaaataacatccatagtgaaagatagctctgcagccagaaatggtcttctcacggaacataacatctgtgaaatcaatggacagaatgtcattggattgaaggactctcaaattgcagacatactgtcaacatctgggactgtagttactattacaatcatgcctgcttttatctttgaacatattattaagcggatggcaccaagcattatgaaaagcctaatggaccacaccattcctgaggtttaaaattcacggcaccatggaaatgtagctgaacgtctccagtttccttctttggcaacttctgtattatgcacgtgaagccttcccggagccagcgagcatatgctgcatgaggacctttctatcttacattatggctgggaatcttactctttcatctgataccttgttcagatttcaaaatagttgtagccttatcctggttttacagatgtgaaactttcaagagatttactgactttcctagaatagtttctctactggaaacctgatgcttttataagccattgtgattaggatgactgttacaggcttagctttgtgtgaaaaccagtcacctttctcctaggtaatgagtagtgctgttcatattactttagttctatagcatgttaaagatgcaagtatgctatagaactaaagtaatatgaacagcactactcattacctaggagaaaggtgactggttttcacacaaagctaagcctgtaacagtcatcctaatcacaatggcttataaaagcatcaggtttccagtagagaaactattctaggaaagtcagtaaatctcttgaaagtttcacatctgtaaaaccaggataaggctacaactattttgaaatctgaacaaggtatcagatgaaagagtaagattcccagccaaaatataagatagaaaggtcctcatgcagcatatgctcgctggctccgggaaggcttcacgtgcataatacagaagttgccaaagaaggaaactggagacgttcagctacatttccatggtgccgtgaattttaaacctcaggaatggtgtggtccattaggcttttcataatgcttggtgccatccgcttaagattatgttcaaagataaaagcaggcatgattgtaaaagttattacagtcccagatgttgacagtatgtctgcaatttgagagtccttcaatccaatgacattctgtccattgatttcacagatgttatgttccgtgagaagaccatttctggctgcagagctatctttcactatggatgttatttttccatttttaaagataaaaccaacatgtccagtgctatccttatgcatggtaatcgtccgttcaaagggcctgtcacgaatggtcatggtaatcttctctccaaaagcctgtttgagcaccttgtgcgctttatcagagctccatcctgcacagttttcaccattgatctgaagtacttggtccccaaatctcagaccaaccaatgaggctggagaattagcctggactagctgaacaaatataccattatctattgatttaagcctgagtccaatttttccatcttgatccttacacaaaatgacttcacgaatcccttgcttaatttctgctctacgaattccaacatcattaccagttacaggagccaccatatagtttatactggaaggtcttgctaccaactgcccctgaagtggtgcaccagaaaccacggccacatttgcacgtatttcttcttcatttaaactcagccccatgtattgagagagctctggatacagtctgggatagagatttccatcgtgagggataggagcagaagcttctgacaaaattgctggattggcagggtttgcagaaaaagcagtttgagctttgtctaccttcaagtcttcgagagatggatagagagacatttttgcaggattcttctagcccacaaggaaccggtcgcg

SEQ ID NO: 22628 - DNA, 485 bp, Homo sapiens
  misc_feature 474, 475, 476, 477, 478, 479, 480, 481, 482, 483, 484, 485: n = A,T,C or G
tttttttttttttttaaaacgaggatttggccattcaaaaacaacaacaacaacaacaaagcaaaatcccaccacatacaagaagaaaaagagaggcatgctttacaaaacagctatttcaaagtcatgatttttaaaaaaactatacagaatgtggaacgaaggggaaaaaaaagtctcatgtgggttgcgtcggcactgcagctgctcctcattaaagctcctctttactccctctgggctagtttccagcagaaaattctttaaacagaactctgctttcaacccactttcttcttgcactgggcctcttggccccccaatccgcagtggcagcctgccctagctgagctctagaggggggagctgtcgttaaggtaaatgaggtaagggcaggggaaaaaactaacaaaacccagaaaccaaattaagcatcggtcagcccgcgttaattaattctagaagacttccgannnnnnnnnnnn

SEQ ID NO: 22629 - DNA, 599 bp, Homo sapiens
  misc_feature 1, 2, 599: n = A,T,C or G
nncagatccactaactcccctcccaagcctgcaggtaaaaccatcccagatcacctttattcctgctttagggtttaaagaaccccagtgaggcaaacaaattaaagactgcagatttcttaggatggttagacttgacacagaagagaaagaggtacaactgttcatagagttcagtttgacaattaacatgtatattagtatggttgcctgtgtttgtgttatgtttcactgtgtttcatcttcctgtgcctgggatcccccatgccctcctttcctatctctctcaaaaccagctgtttttccccatctgctgcattttggttatagatatttatttgtaggtttgctttaaaacaaaactcctctaaatcctacttgataaccatccatgctctttactctctcctgtcctgggagctctcttcctaactcctgcccttcattctcgacgcctgcctggcctccttttggttccttctctacagcattgcttccacccaccagctgtagtgcccctgtcccttaagagtatggcagtgctcctaactgggttatatacctctgattgtccatttttaaatctgctaccaagagcn

SEQ ID NO: 22630 - DNA, 604 bp, Homo sapiens
  misc_feature 1, 2: n = A,T,C or G
nnatttgccagattccccttgttttgtctttctagccaatagaacaacactaaaatatatggagaatttaactaacttttgaaaaagagataacacaagttagaaccagaagaagtcatctgtgccataagtttgtgtcttctaagagccatcagcccaggcaaaatgaagtgggaaacttgaaacttaacatgtataaatgatttgtgttgttttgttttaatgctaagtactcagcaaaaagctgagttattagaaaatggacactagcctgtgcttgtgggcataaattctccatctatgagaaggcatgaattgaggcactatattgattacattatgttgtttattctcatataactctctattgtagaaacgatttctagccccatcttcaagatgggaaatggaatcctagagagacttcatttttctcctatatttgtatttagcaattgctattgctgccataagaaaataacacagggtggcttgaacaacagaaatttattttctcacagttctggaggctggaagtccaagatcaaggtgccaagcaaggctggtttctcctgaggcctctatccttggcttgcaaatggcc

SEQ ID NO: 22631 - DNA, 548 bp, Homo sapiens
  misc_feature 1, 2, 3, 4, 548: n = A,T,C or G
nnnnaatgaagtagggcatcctaaacctgagtgctctgcctccccaggtgatttgatacagtcaggtgtgggaactgctggcctagatgataaccccctttcatagaacagagagaaaaggcagagaaaatgcttacctgttggaaaatcattgtcctgagcctcatttgtaccatctatggaaaaagcaatggaaaatgaagtgtcaatcaaataatgcacccttggctgacacaaattaattgaagctaaacctagaacccttctttctcaccaagatggcaacttctcccaattgttctaaatataaaatcccggttatctgtcactttacccactccccctctccccagtccgatctgttgccaaatcctgtagtttctacctccataacggaactcgcaatcatctccttccatttctctccattccaaatctagaagaaaaaagaaaccaaatacatttagtttcatcagcaagttagaacctttctgtcaaaaatttcaagtgctcatgcctgtaaccccagcactttaggaggctgaacn

SEQ ID NO: 22632 - DNA, 984 bp, Homo sapiens
  misc_feature 1, 2, 3, 4, 984: n = A,T,C or G
nnnncgcggccgcgtcgacagacgacagaagggtacggctgcgagaagccgcaacgggtacgactgagagaaggcccggaggggctctgcgttctgtagtggcgctgcttgggcccgtggcggattgtaagctgctggtttgcggctgggaagagcggcgagagggttcggcatttttcgtcgggatccccgcaaggatgagtgctgccagagagtctcacccgcatggggtgaagcgttcagcctccccagacgacgatctgggatctagcaattgggaggcagcagacttgggtaatgaagagagaaaacaaaagttcttgagacttatgggtgcaggaaagaaagaacatactggtcgtcttgttataggagatcacaaatcaacatctcacttccgaaccggggaagaagacaagaaaattaatgaagaactggagtctcaatatcagcaaagtatggacagtaaattatcaggaagatatcggcgacattgtggacttggttcagtgaggtagaagaccatgatggagaaggtgatgtggtggagatgatgatgatgacgatgatgattcactgatcctgaaagtccagatgattctgaaagcgattcagagtcagagaaagaagaatctgctgaagaactccaagctgctgagcaccctgatgaagtggaggatcccaaaaacaaaaagatgccaaagcattattaaatgatgtgttgtgtaatccagggtcataactcccaaagcttagtctttgtttaaagtagccttttgttcatgccagggggactgcttatagagcacagaccttttttatttataaaaggcctttaatattacagaggtggtcaagccggtgcactttgcggcctaccctggacggaggtgacaaaaccacttttttaacccccggggggggggggagaaaccctcaggggggggcggggccaccccgggcggccggcgcagttatttatan

SEQ ID NO: 22633 - DNA, 2755 bp, Homo sapiens
  misc_feature 2753, 2754, 2755: n = A,T,C or G
ttcaggggggaaaggaggagctggagacagattgtaggaccgagcgcgggcaggcgggaggcaacggagctaccagccgctcctctctgctatatgaaatatgggagacgacagaccgtttgtgtgcaatgccccgggctgtggacagagatttacaaacgaggaccacctggcagttcataaacacaagcatgagatgacattgaaatttggcccagcccgaactgactcagtcatcattgcagatcaaacgcctactccaactagattcctgaagaactgtgaggaggtgggactcttcaatgaactagctagctcctttgaacatgaattcaagaaagctgcagatgaggatgagaaaaaggctgctgctgggccccttgacatgtctctgccttccacaccagacatcaaaatcaaagaagaagagccagtggaggtagactcatccccacctgatagccctgcctctagtccctgttccccaccactgaaggagaaggaggttaccccaaagcctgttctgatctctacccccacacccaccattgtacgtcctggctccctgcctctccacttgggctatgatccacttcatccaacccttccctccccaacctctgtcatcacacaggctccaccatccaacaggcaaatggggtctcccactggctccctccctcttgtcatgcatcttgctaatggacagaccatgcctgtgttgccagggcctccagtacagatgccgtctgttatatcgctggccagacctgtgtccatggtgcccaacattcctggtatccctggcccaccagttaacagtagtggctccatttctccctctggccaccctataccatcagaagccaagatgagactgaaagccaccctaactcaccaagtctcctcaatcaatggtggttgtggaatggtggtgggtactgccagcaccatggtgacagcccgcccagagcagagccagattctcatccagcaccctgatgccccatcccctgcccagccacaggtctcaccagctcagcccacccctagtactggggggcgacggcggcgcacagtagatgaagatccagatgagcgacggcagcgctttctggagcgcaaccgggctgcagcctcccgctgccgccaaaagcgaaagctgtgggtgtcctccctagagaagaaggccgaagaactcacttctcagaacattcagctgagtaatgaagtcacattactacgcaatgaggtggcccagttgaaacagctactgttagctcataaagactgcccagtcactgcactacagaaaaagactcaaggctatttagaaagccccaaggaaagctcagagccaacgggttctccagcccctgtgattcagcacagctcagcaacagcccctagcaatggcctcagtgttcgctctgcagctgaagctgtggccacctcggtcctcactcagatggccagccaaaggacagaactgagcatgccgatacaatcgcatgtaatcatgaccccacagtcccagtctgcgggcagatgatgcctcctctggtggagaggtcctcagccagagctcgcccgcccaagagccaagagagatgtcatcttatcccctcccatctgccttggacatggcaatatgggtggggggaattgtgtgttgtgagtaatggacagatatggggctttttagccatgtggtcatgtacgtttgacacctgtgctgggggcctcccagccccggagcctcatagatcatcccccagggtggggtttctgatgcatccacagccaaaggcctttccagatggtccgaacaatcacccctgccccatgcacgtgtatctgtctcttttaacactaacccttggcacttctaggtttggggtttctcagttccctctcttcccactaagccgtggctgttacctttttgttccttaccagcatgccacttcctgccagatagagggaggctagatttgatgacatattacccgctgacccagccccagccaccccatggactcaggactcaggtctcccatagctgcttatttacccgtttcctttttcctcttccttaattctagttaaaacattcacttacggagaatgtaaggttacctttgatgtatgaagtagcagtattttccagtttttccataagctttattccttctctctacctgccaccaaaaagaaagaaaccctcaagagttctaattctttttcatctatttgcagagctatttgggtacctcattttgtcccttgactttagtgtagtggtggggtctttcccaccaccccactaagccttggcaacctcattttgtggccttattattaaagattgcttggtagtgaaaagggaagggcccagaatctgactggctgattctgtctcctcccctccctccttctttagtttaaccatcagggcagacaggaacaaagtatttcaaagcttgttccatcaagttagggattaatcgattcctttatgttttataagagtttaccggccaaagcatattgtcatctttggtcatttttctgctcctgcttctctctcttcattggggtatcaacattaccgcccctgtctctcttcattcccctatcaacattaccgcccctgtctcttctgtaactacttcagactcagccctcctggaggctgtcatgtaggggactctcgaggttcctttgttctaccccatctctcccccccgaannn

SEQ ID NO: 22634 - DNA, 417 bp, Homo sapiens; identical to SEQ ID NO: 21875

SEQ ID NO: 22635 - DNA, 736 bp, Homo sapiens
tccggcctctactgtttattagttttgtgaacttgccaagctctttcactgtttatgcctcagtttcctcatcaggaaaatggagagaaatatagttccctcttcatagattttatgagaattaagtgagatatgcatttagtgtacagaataatgcctgtcacatagtaagtatgtaataagcatttattattacttatcagggtatgatttatgaattgtggaacctgggattatgggagagtctggcttcaatcaagggctgaaattccatttccactgacatctcttccttccccatcccccgattctgtcctgcaacagggtaacaagaaggggcccttaggccgttgggactttgatacccaggaagaatacagcgagtatatgaacaacaaagaagctttgcccaaggctgcattccagtatggtatcaaaatgtctgaagggcggaaaaccaggcgcttcaaggaaaccaatgacaaagcagagcttgatcgccagtggaagaagattagtgcaatcattgagaagaggaagaagatggaagctgatggggttgaagtcaaaagaccaaaatactaatcactagttacaaccagagatgctccacaaggatatgctccccactgttttctttctacaatttccaaaggttgcaagatgtttttttgtggatgaatataaaattttattgtgtaattacttggttccattaaaattggttaacttgcag

SEQ ID NO: 22636 - DNA, 3424 bp, Homo sapiens
  misc_feature 1: n = A,T,C or G
nataggggagtcgacccacgcgtccgcgaggcaggaagttatatgctttttctggagtcctgtagagaaagtgctctctgccgcattgatagcagcgagagctggaggtgttgggtcgggagaccagccattcgatcccgccgcaggtaggagctggtttccatcctggcaccacggcacacacctccagcctcgagcccggcgctgctgcccgggggtctccttcaggctctttgacgccgttccagggggcacctatccaggcatcctctgggcctctagccagaggactggctcccggcttcagcactccgggctgcagtaagaagtgcccttatcgctctgagccctgccaccatcccgtgaaccaccgaaaccctggtccagcgcgacagccttggacctgggactggacggatccaaaacgctcagcctcggccccccacagacggggctctgcatcgtctctgatatgtcacccaccatctcccacaaggacagcagccggcaacggcggccagggaatttcagtcactctctggatatgaagagcggtcccctgccgccaggcggttgggatgacagtcatttggactcagcgggccgggaaggggacagagaagctcttctgggggataccggcactggcgacttcttaaaagccccacagagcttccgggccgaactaagcagcattttgctactactctttctttacgtgcttcagggtattcccctgggcttggcgggaagcatcccactcattttgcaaagcaaaaatgttagctatacagaccaagctttcttcagttttgtcttttggcccttcagtctcaaattactctgggccccgttggttgatgcggtctacgttaagaacttcggtcgtcgcaaatcttggcttgtcccgacacagtatatactaggactcttcatgatctatttatccactcaggtggaccgtttgcttgggaataccgatgacagaacacccgacgtgattgctctcactgtggcgttctttttgtttgaattcttggccgccactcaggacattgccgtcgatggttgggcgttaactatgttatccagggaaaatgtgggttatgcttctacttgcaattcggtgggccaaacagcgggttactttttgggcaatgttttgtttttggcccttgaatctgccgacttttgtaacaaatatttgcggtttcagcctcaacccagaggaatcgttactctttcagatttcctttttttctggggaactgtatttttaataacaacaacattggttgcccttctgaaaaaagaaaacgaagtatcagtagtaaaagaagaaacacaagggatcacagatacttacaagctgctttttgcaattataaaaatgccagcagttctgacattttgccttctgattctaactgcaaagattggtttttcagcagcagatgctgtaacaggactgaaattggtagaagagggagtacccaaagaacatttagccttattggcagttccaatggttcctttgcagataatactgcctctgattatcagcaaatacactgcaggtccccagccattaaacacattttacaaagccatgccctacagattattgcttgggttagaatatgccctactggtttggtggactcctaaagtagaacatcaagggggattccctatatattactatatcgtagtcctgctgagttatgctttacatcaggttacagtgtacagcatgtatgtttctataatggctttcaatgcaaaggttagtgatccacttattggaggaacatacatgacccttttaaataccgtgtccaatctgggaggaaactggccttctacagtagctctttggcttgtagatcccctcacagtaaaagagtgtgtaggagcatcaaaccagaattgtcgaacacctgatgctgttgagctttgcaaaaaactgggtggctcatgtgttacagccctggatggttattatgtggagtccattatttgtgttttcattggatttggttggtggttctttcttggtccaaaatttaaaaagttacaggatgaaggatcatcttcgtggaaatgcaaaaggaacaattaatatatatgctactggacattctagcaaggtaattgtagtttagttttaattcggagagcaatgataatcagtgcacaggagtataaaatattattttaaacagcgaaattaataatataaaatgccaaatggttgaaaaaatagaaacctttctgtatatttgatcatattttttttttgccttgtcaatgtatttaaagtttacttaaggtcaggaaattctaaaacaacttttctggccttgttatttgatgtatatcttttaaatttactgaccaaagcatgttttaagctgcaatgcagtagtcacgggtggtaaccatgtagtcaggtattgttattagtacctatcactgctgagctgtatttaaaattttggtacaatatataaaatggagaagagcttgatattcaggtactaaccacaactagtctgacattgttggcagttaaaatcttattttgaattgtaaattagttaaattttatgtggaatttgctgagaaaagaatatagactactgaaatgtcattttagttatttttcttatgaccacattgtacaaatgaatctgtgttaaaaagactattttaaatgtatttcctgcttttgtaagcattaaagatttataagaaaattattcaaactattttttataaaatgaaagttatgatttttaaacttattgattcctcttgcccctaccccctctttttggaagatattttgattccttataaacttttaccctaagcttatatatgttttctgtcacaagtgcttcctggcacacagacagccaatggaggggatcaaattcagtgttgtatgtatgtttatggcaacattttgaaaataaaaattaaatgtttttcttcaagtagtttttttttaattgctgagagaaaaaaacagtaaagctttctgattaagtaaaatttaaatgggcagtaccataatttaaaaaactaatactttaaagagagagacaaagatattttgtgctttgacaaattaaatctaatagtggaaagttgtttcttaatcttagcactttactagtgaaaaagatctcacatttatgcaaatcaggtactgattttcatgtatttaccaattaactttggtgaatactaacggttcagggggagtgctattccaagaaaattaggtttgggtacttacaatcccggtttaattaaccaggaaaggttgggtcgggtagttaaccggctgaaaatttaaaccacagttggaaagaagacttagggcacatccggggaagtcaaccgttggaaaaca

SEQ ID NO: 22637 - DNA, 2452 bp, Homo sapiens
acagtgttttaggtgaaaattcaaaagtttttttccaagtccaagtaatttatgtttgtagtggagtaatgattcctatactaagcagttttgttttctttaatttggtgaagttagcattgggtgttgccctcagttagggttagcaattattctttaccccacgtacgcgggggcaccttccttctgtcaatagatgaaacaaatacttcatcctgctctggaaaccactgcaatgacattattcccagtgctgttgttcctggttgctgggctgcttccatcttttccagcaaatgaagataaggatcccgcttttactgctttgttaaccacccaaacacaagtgcaaagggagattgtgaataagcacaatgaactgaggagagcagtatctccccctgccagaaacatgctgaagatggaatggaacaaagaggctgcagcaaatgcccaaaagtgggcaaaccagtgcaattacagacacagtaacccaaaggatcgaatgacaagtctaaaatgtggtgagaatctctacatgtcaagtgcctccagctcatggtcacaagcaatccaaagctggtttgatgagtacaatgattttgactttggtgtagggccaaagactcccaacgcagtggttggacattatacacaggttgtttggtactcttcatacctcgttggatgtggaaatgcctactgtcccaatcaaaaagttctaaaatactactatgtttgccaatattgtcctgctggtaattgggctaatagactatatgtcccttatgaacaaggagcaccttgtgccagttgcccagataactgtgacgatggactatgcaccaatggttgcaagtacgaagatctctatagtaactgtaaaagtttgaagctcacattaacctgtaaacatcagttggtcagggacagttgcaaggcctcctgcaattgttcaaacagcatttattaaatacgcattacacaccgagtagggctatgtagagaggagtcagattatctacttagatttggcatctacttagatttaacatatactagctgagaaattgtaggcatgtttgatacacatttgatttcaaatgtttttcttctggatctgctttttattttacaaaaatatttttcatacaaatggttaaaaagaaacaaaatctataacaacaactttggatttttatatataaactttgtgatttaaatttactgaatttaattagggtgaaaattttgaaagttgtattctcatatgactaagttcactaaaaccctggattgaaagtgaaaattatgttcctagaacaaaatgtacaaaaagaacaatataattttcacatgaacccttggctgtagttgcctttcctagctccactctaaggctaagcatcttcaaagacgttttcccatatgctgtcttaattcttttcactcattcacccttcttcccaatcatctggctggcatcctcacaattgagttgaagctgttcctcctaaaacaatcctgacttttattttgccaaaatcaatacaatcctttgaattttttatctgcataaattttacagtagaatatgatcaaaccttcatttttaaacctctcttctctttgacaaaacttccttaaaaaagaatacaagataatataggtaaataccctccactcaaggaggtagaactcagtcctctcccttgtgagtcttcactaaaatcagtgactcacttccaaagagtggagtatggaaagggaaacatagtaactttacaggggagaaaaatgacaaatgacgtcttcaccaagtgatcaaaattaacgtcaccagtgataagtcattcagatttgttctagataatctttctaaaaattcataatcccaatctaattatgagctaaaacatccagcaaactcaagttgaaggacattctacaaaatatccctggggtattttagagtattcctcaaaactgtaaaaatcatggaaaataagggaatcctgagaaacaatcacagaccacatgagactaaggagacatgtgagccaaatgcaatgtgcttcttggatcagatcctggaacagaaaaagatcagtaatgaaaaaactgatgaagtctgaatagaatctggagtatttttaacagtagtgttgatttcttaatcttgacaaatatagcagggtaatgtaagatgataacgttagagaaactgaaactgggtgagggctatctaggaattctctgtactatcttaccaaattttcggtaagtctaagaaagcaacactactgttaaaaatactccagattctattcagacttcatcagttttttcattactgatctttttctgttccaggatctgatccaagaagcacattgcatttggctcacatgtctccttagtctcatgtggtctgtgattgtttctcaggatt

SEQ ID NO: 22638 - DNA, 367 bp, Homo sapiens
  misc_feature 367: n = A,T,C or G
acggaaacaaaagagataataaactaatagttatttaatatgctgtaacaacaaattagaaacattgagaattaaagtgtgttttctttgtaacaaacttatcaagagtagtttgaacaagggttgcccttcttctggtataatttagatacatatcagagcaaacatcttttctgtggctttgcaagttgtcatactgtattttgtttggatcagcttccaacattttatcttttatgctttcagtattgtaaaatacctctcagttttctttagcatgcagattttttttttttgttagcgtctcttcctctaggacgttgtcattcttttcatcactcccactttcttcattgctaagttggcn

SEQ ID NO: 22639 - DNA, 932 bp, Homo sapiens
  misc_feature 1, 2, 930, 931, 932: n = A,T,C or G
nnagtgactccagcctggctaataaagcaagaccttgtttcaaaaagaaagaaagaaatgagcatggtgggaatggggacagatggcaatgttaagtagagtggtcagggttggcctcataagtgaatattgagcaaaagtttgaagcaggtgatggagctggccaaggtgctgagggaagagcattgtaggctgagtcaacaggatctttatcctgttgcattaaggaggaaactctctggtgtgtctgaggctctggaaggaggccagtggagcaaagagatagagggagcgaagtcagcgaggaggccagggagttgctgggctgggatcggtacagatcgtgtaagccctgggacgctattgctggggctttggcttttactctgactaaaatgggaaccaccgagggcttctgagcagagaggcgacatgatccgtctcctgatttaaaagcacgacctggctgccgagttgagaaagactatgggaagatttgggtagaagcatgggggccaagctgtggcaacatcctggtgggagatgatagtgatcctgaccggattcatggtggtggtgagagatggtcagagcctggatacgtgttgaagtcagtcagtaggatttcctgacagactggatgtgagctgtgagagaaggcagtggtcaaggttgagtttgattctaattgaattattaagtaaaaaaaacactactgcctttctcagtcctaccaagtaaaggatgctagattaaagaagtctcaagtcaggccaggtgcagtggctcacacctatggttccaacagcttgagaggcagagatgggagtaccgtttaaggccgtgagtttgagagcagcctgggcaacatagcaagacctcctctctacaaaaataaaagaaatgtaataaaataaaataaatatagcnnn

SEQ ID NO: 22640 - DNA, 1011 bp, Homo sapiens
  misc_feature 1011: n = A,T,C or G
attaattaagtcgggggcggaaggagcggcgttacttcctggagacttcaggtgtggtagccggcgccgcgcccatagccggacggggatctgagctggcaggatgaatgtgggggtggcacacagcgaagtaaaccccaacacccgagtgatgaatagccgaggcatctggctggcctacatcatcttggtaggattgctgcatatggttctactcagcatccccttcttcagcattcctgttgtctggaccctgaccaacgtcatccataacctggctacgtatgtcttccttcatacggtgaaagggacaccctttgagactcctgaccaaggaaaggctcggctactgacacactgggagcaaatggactatgggctccagtttacctcttcccgcaagttcctcagcatctctcctattgtgctctatctcctggccagcttctataccaagtatgatgctgcgcacttcctcatcaacacagcctcattgctaagtgtactgctgccgaagttgccccagttccatggggttcgtgtctttggcatcaacaaatactgagggatgggttttgggacagctccatgggcatggggaaggcactgaaacagaggactataaaacatccttctcttaaaaaaaaaacacaaaagacacaaaaaaaaaaaaaaaacgggggggagtacaatgggggggggggacaaacgaagggtatgtactggggacaggggatccatgcgtgtgtcaggacccaatctctcggcaaagggggtgaagccggggggcccccaaggggggggataaaacgaaaggccgggtacccgttagatgagcgaacgagcgcaatagacgcgacagagcgagtcgagccagggacggaagccaacgcgcagaaagggcacaaagaacgacacagcggggcgcaagaaccctactaccacaggcagcagacacacacagtcaacatcgaagaacaacggacggatacaggaccgcagacagcgaan

SEQ ID NO: 22641 - DNA, 3432 bp, Homo sapiens; identical to SEQ ID NO: 21750
  misc_feature 1, 4, 3412, 3413, 3414, 3415, 3416, 3417, 3418, 3419, 3420,3421, 3422, 3423, 3424, 3425, 3426, 3427, 3428, 3429, 3430,3431, 3432: n = A,T,C or G

SEQ ID NO: 22642 - DNA, 499 bp, Homo sapiens
  misc_feature 1, 496, 497, 498, 499: n = A,T,C or G
ngtcgacgcgtaagacgtgttttgcgacccggcaccaccgtagtttttacggcggccgcccgctcaggtacccagagtgcagagccgcatttccagcatgcaggggctgctcagcgtttagtcacatcaagaaatagaacagaattcagccatggccccaagaaagagaggtggaccaggtattgcattcatcttttgctgtttccgaaataatgatcacccagaaatcacgtatcggctgcgaaatgatagcaactttgcgcttcagaccatggaaccagcattgcccatgccccctgtggaggagctggatgtcatgttcagtgaactggtggtgagtcccagttttctatcctggcattggtggggagccagagaaggagaagaggagaggatgtgaatgagttggtttggtttgacatggacttttccttttcagtgaaatggcccccattcacctttatgtctgcaccctcactgtcagcactaaacctgnnnn

SEQ ID NO: 22643 - DNA, 2187 bp, Homo sapiens; identical to SEQ ID NO: 21516

SEQ ID NO: 22644 - DNA, 1162 bp, Homo sapiens
  misc_feature 1, 2, 3, 4, 1155, 1156, 1157, 1158, 1159, 1160, 1161, 1162: n = A,T,C or G
nnnnccgaatttcttatttagtttcttgtattttgcctactccctcccttctccatgattcagcctagtctttccgtcctctgtggacttgggtgtgccttcctctgggccacctcgtcttttgctgctgttagccctcccgcctgcgcacctgccacttcaccctcgcctgtggtccacttacgttccactcagcccggtcagtcctgctttgttcttctccaccgccttggtctcccgtgtgtcttatctagctctggttccttctcgtctccacatttattttgttttcttcctgtgcttgttagtccttgtgcacttggtccttgagctctttttctattaataggtattactagatggatttgttgtctgcctttacatagaacacacatccttactgtgcatttcctgggtagccaggatgaatcaattattattaacttcccttcgaacattgagcttcctctgttttctgtttctaagaattagattagtattctagaagactaatactactttaaagacagtcaaaacagtcatacgctgccatttcagccctttatttaagagtttgtgacatttatcactcccttgaaagattaaagaacacccaaagcaagtttggggtggaggtggggaaggcaggaagagaaaggtaagtgctataaaaggactcattgttaatttctagaaattggactgagatctgaaagcataagccttaacattttttagataaacggtccctgaaaagaataaaaagtatcagtacttccgttaactagctttagtattgggtcatttgtagtttacattctcctttaagttttaagaccttcagtagttaacaaagcagacagagactggccaggcacagtggctcacacctgtaataccagcactttgggaggctgagttgggtggatcacaaggtcaggagattgaaaccatcctggccaacatggtgaaaccccgtctctactaaaaatacaaaaaaaaaaaaaatttggccgggcgtggtggcgggcgcctgtggtcccagctactcgggaggctggggcgggggaatttcttgagcccgggaggccgaggttgcagtgagctgagatcgcgccactgcactccagcctgggtgacagcgagactctgtcnnnnnnnn

SEQ ID NO: 22645 - DNA, 399 bp, Homo sapiens
  misc_feature 1, 2, 3, 4, 5, 6, 7, 8, 9, 10, 11, 12, 13: n = A,T,C or G
nnnnnnnnnnnnnccgcccgtgtcaggtacatcccctacatcagtatcagtactttatgaggacagtgacagtagcccgagtcacaaaaaaaggagagagcaaacagcaacgcaaagctcggcacagaccacatggccctcttttgcctactattgaagattcttcagaggaagaagaattgagagaggaagaagaattattaaaggagcaagaaaagctgagggaaatagaacagcaacaaagaaagagttctagtaaaaaatcaaagaaagacaaagatgaacttcgagctcagagaagaagggaaaggccaaagacaccacctagtaatctctctcccattgaagatgcatctccgacagaagagttacgtcaggctgcagaaatggaggagctcc

SEQ ID NO: 22646 - DNA, 749 bp, Homo sapiens
  misc_feature 1, 749: n = A,T,C or G
ngagactccatctcaaaaaaaaaaaaaagcccagagttcaaggctgcagtgcccaatgattaagcctctgaatagccactgcattccagcctgggagcaaagtgagactgtctctaaaaaaagaaaaaatatatatatagtcttcttctgttttgttttgtttgtttaattcaaagttacatcacagttgtcctcaactacagaaacagatccagctacaatgtttaattcttctccattacttaaattaaatgctgccaccattgagtatggcattgtataatcatattccttcagcggttaaaatagaaaaaaaatgcagatagagatgtgtataattggcatgcatagaaatacagaaccagttacatgacaaaagtaaacaaaactctaaaccttcatattttaaaaacaagattttccatttaacaagaattacattcattaaactggagagtatctcctatagagaaaacttttagagtcagatccaaacattcctatattcatacttggaagcactttgacaactcaaggctgaaaaccccacactgtgcttgttgtcagtccactgttttcctgcctagtagactgcaaaagtgaatattctacctctttgtgcaggtgatgctgaatcctgtgtccactgaggtggggccgcccagggtcaccaatcagtactccagttctataggtccagaagcgcttcttcagcctctgatgaagactatatgcaaggtcttcatcan

SEQ ID NO: 22647 - DNA, 3054 bp, Homo sapiens; identical to SEQ ID NO: 21514
  misc_feature 1, 2, 3, 4, 5, 3054: n = A,T,C or G

SEQ ID NO: 22648 - DNA, 550 bp, Homo sapiens
  misc_feature 1, 2, 3, 4, 5, 6, 7, 8, 9, 10, 11, 12, 13, 14, 15, 16, 17,18, 19, 20, 21, 22, 23, 24, 25, 26, 27, 28, 29, 30, 547,548, 549, 550: n = A,T,C or G
nnnnnnnnnnnnnnnnnnnnnnnnnnnnnntacaaatttttaattaaaataagtttatttaaaagttttatttttaatttataaaataaagttaattttaaatagtctcagcaaaaaagaaggggggcagaaaccctgctcgttctactttataaatagtagcttatcaaccggcagccagtgaaacactaaacccaaaatttgcctcattgtgtcatggagattatgccgcaaagggagaaacctgccaagccctttccaagaggtgctgtgtgccagcccaatccccaaaccctgccaagccacggagtgctttctaggctggtgacaggccccagtgccagctaaatgcccgtatgctcggggatggaaacagaaaggagctcatttcactgctctcagagagctggagtgcagaggaccttagaactcaagtgcaccagaagcttcaagagtttagcggcgagtgagctcttctccccaccaaacgaaattctatgcacaatatgtaacacatatggatgcagtataataccaaaaatgcagnnnn

SEQ ID NO: 22649 - DNA, 1013 bp, Homo sapiens
  misc_feature 174: n = A,T,C or G
actttttattccactctcttcttgcttgcgtggtttctagaaaagacagctgcagtttgcatctttattcctctataagtaaggtttatttttccctcctctggtttctttcaaagatttatttttttatccttggtttcctgcagtttagatatgatatgccttagatgtggnttttttttttttttttttttggcttttatcctgtttgttgttctctgagcttcctgaatctgtggtttcgtgtcacatattaatttagaaaaatctcattcattattgctttgaatatttcttctattcctttctctctttcctctccttctggggttccactatgcatacttacatcttttatagttgtcccactgttcttggatattctgttccttttttattcagtctttttccctttgctttcatttttggaagtttctcttgaaatatactgaagctccagattctttcctcacccacatccagtctgctaatgaggcttcaacaccatgcttcatttttgttagtttcttgacttctagaatttttatttgattctttcttagactttccatttctctgcttatattactgatctgttcttgcaaattgtctattttttccattatcactcttaccatattagtcatagttgtttaaaattaccaatctgataattctaatatacctgccatatctgaatatagttctgtcagctagctctgtttcttgaaactttttgttgttttgggttttttgtttgcttgtttgttttagggtttctttttttcctcttacaatgtttttttaattttttgttagaaattagacatgatatactaggtaaaagggagtctgggctgggcacagtggcttccgctggtaattccagcaagttgagtggctgagatgggaggatggcttgaggataggagtttgagaacagcctgggcaacataacaagaccctgtctctacaaaaataaaaaaataaaaatattagccaggcatagtggt

SEQ ID NO: 22650 - DNA, 810 bp, Homo sapiens
cctggattgtaaccagattttcttttttcccccttctcagctgtagatatgatatctcctttcagggccccagcttaagggcaaagtgagttaatgtgtagacaaaggcgagggacaagagagagttaacatctagacagtggaaaaagccatggtgtgtggtttctgggaaccaccaacacttgcaggtttagctttttcccagggttgactacaagaaagaaaaccatgtttttgcaagattaaaatgtggttgagtgtgcctaaattaaccatccccatttttatcatatttccaccatcacttcagggttttaagagtcagtgctcacctgggcggagctggtagtacattttgcttcttagaaagctaagtcctgggttccgtctgattttaggttccaggaacttcctgagaacacccgatcgcagagggtaattttctggagtttgttttgcagggatagctgggagtatggccaccctgctccacgatgcggtaatgaatccagcagaaggtaatgtttcatggtcccagggaggggcagtaggggatgtgcaaaggggcacaaaaaatggttgtgggagagtggagaggactgaaggtgggcagagcggctcctagtctccagtcagagcagacaggagaattgaattttttactacgttatcaaaggcctcaagaaaggacgtgaacataagagtttttggtattcctgtgctcggagctactcaaagtgtgttctacagaccagcagcatcagacatcttgaggggtgttggaaatgctaattctgagggctggtgcag

SEQ ID NO: 22651 - DNA, 268 bp, Homo sapiens
  misc_feature 1, 2, 3, 4, 5: n = A,T,C or G
nnnnngtcttaaaatttttccttaatgattaaaatataagattacccaccagctgcttttaatttctcctaagcattagaacagtcagtaatcatatgacctgtgcccccctttgttccccttaactctttctgtttgtcccccctccgcgtttaaatgttgttgtttcacttttctcccatctcttcctgacttggtcaaatccaaaggaatcttccaaattgtgggaagcaaggcatctgaaatggctaaaactcctgtggctgcc

SEQ ID NO: 22652 - DNA, 917 bp, Homo sapiens
  misc_feature 1, 46, 268, 908, 909, 910, 911, 912, 913, 914, 915, 916, 917: n = A,T,C or G
naatgggtgcctgaaactgatgatagtaccgaatccaatataccanaatgaagcattggtaaaaacatttcataaataaaatgggtgtcaaccacactttctgattacattgccagaagacgagcaaatgtttttgtgagcacatgggttttttgctctgtatactacacctggttttattatatgcccgagagtgttgctacatagcagaagagttagcttgtcctttcatgtttaatgccatggtacctcctttgtacttttatanatagtatgtacttccctcacctggacataattctcaatatctgaaaaattcaataatgttatcatagcaaattcagaaacaacttcagtatctactaataagggaatggttaaatcaaaccacaaataaggaggagactactgttgttacagaaatagtcttcaagaaacaatagcatttcctagaagttataaaatttttactggttccagactgatcctaatatcaggtatgattatttcctttggagtaagaaaaaaaattttttaaggctgaaatttttgcacaaaagtcttagattaaatatggtatatgatttgggacacaaggaaaagcctataatttaaaatcttggcttcttatcacaagtccaatgtataaaagttccacccttctccatagttcatgaaaactccaaaaagctattaacatcaattactcgagaatgaaattatataagccctcaatttagaataaaatgagattcatgtctaatattatttatccttattataaaaggaatgaaatatttggaactaactgtaagcaaagcataatttacaaaatccccaaattcctatatcaattcttatactcctatcatgtggagtatgcaactaaaataccaatttaatcctannnnnnnnnn

SEQ ID NO: 22653 - DNA, 678 bp, Homo sapiens
  misc_feature 1, 2, 3, 4, 5, 6, 7: n = A,T,C or G
nnnnnnnaacatttgggagaacatgaaaatgaggaggtaaaacagaaggctgaaacagggaaggggcacatttcacactaagtatttgtaccccaagataggatcagggctattttaatgatcatgtgatttattaaaaacttgagatttccaactactctttcacacgtatgtggaagaaatgtattccaagaagagttgctataatcagtattaatctgtaaaatcacattgatttatcttagaaggataaaaagaacagaaacaaaactctaccagctcatataatttttctttgcaaaaattttttgcttctttactatactgaattagttacatcaattgttgtatcaatgaaataattaggtattattacctgtaactattttgaaaattaataaaagaaccaagaagaatagagtaatatccctaggctaaaactaaaacaaaatctcagcaacccagaactttcgggaaactgatgttcaggaaaacattttccagataactaagggttgctattttaagcaggactcccccactcccattttctgattaaaaaaacaaattgttcttaaattgtataccttcctgtgtccttaaaacaagggatgacaagttctttcgagttgagggtttggtgtaccccatatcaaacagccagactgtagtgctaag

SEQ ID NO: 22654 - DNA, 2850 bp, Homo sapiens
  misc_feature 1, 18, 2849, 2850: n = A,T,C or G
natatgagagccatgtgnggatctgtacggcagggtgacaaggagaagacaaagcaggaatgggggctgggttaagaaagacttgagagacactaacttgcttatcttgagtttctgtgttcatcttaaagaacagaaaaaggcatttgcttcatggtgatgaaaaaatcagagctagctgatattggaaactagcactcatttcatataaacagaatagagctgtacccttcaaactaagtcacagttactttcaaagattggcacaagggtctcaacacatcaagtgtatgttaggggctgggctccgttggagtcaaatcttcctggtaaacaaagctacactgcagtcatatttggcatatgtgacatataggcccactgcatttccttccaaaggcaagatgccaagggaaggtgccagtaattttatgaccaatatgacaccattttgtggtgtttgtaagttgaaacaatatatttccctgcattacacaagtttataaaaaacaaacaaaaaaaagaggccccagctgtggttgatcgatgatgaattgaatagagcctaaccttccaggcttctcacttgcacaggcccttccaaggtcctgggagggcccctggaaatttttgtagtcataatttttttaatgtttttactagataaggctcaggccccacaaaatcctgaaatcatccctgggttccaatagttacaacccagtaaatctcttgaatgaagcctctatgttattgacaaatactgactggccaagttagcagggtgatagggtcagtctattttgaatctgaaatccatctcaaagacaggccaagagcttattagtggacttaactggattctgctggcccaagcgcagtaaagtcaaacaaccatatcgaggttttgcactggggaaaggaggacatttatttgcagggcatccaagcaagaaggaccaggcggctaactatcaaagtccctcactgaatgggggcaataatcatatctcttacagatgaaatcatgaatgaaatggtttatggaaaagcagcaatggttgataatcctaaatgttaagtatgtttatattttttccctgactttaaagtgcttctccttcattcctatacacaggtccagactgatggcttattttttaaaatcttttagcacttcatgggtctaacattaatttagaaactggatgactttgcaatgtagaaaggctatactttattcagatagagtacactcacatattggcttgtctatggcacatcgatatcatgccaagaatgtaagcactaagagagaataagaggaaaatccaggctttatccctattgaattatttatcccactattagaatattagtgaggtaggtgtggccacactgtgatggcaaattgagcttcggtcacaaacatgccttactgttccccccagtctactgacatcagcttcctttacatagcggtagatgcacaaaagtttgcacagttgagggtattgtcatcatgttttggtatgtactggaatcctggcagcttcttctctgattcggagaggcgcaaacattaaagacaaaaagaacaactcgagtctgtcctttggggtgatttagggtggctgtttaaatttgtagtggttgaaaagtcttgagattgtcacacctagcaactcttatacttttcttctctcagctgcagcttgttcttttcacctgtgtaacaagctgtcttctcttctcacagaagcttagcatttcttcctctgccccatagcattttttcaatacttaatttaccaggtgctgtttatgttgtaggcacctaagtacttatacaagtgagataacatgtccgaagttcttagaacagtgcttggcctatggtaaatgctccatacatgttacctcctatgatacctcattttcatttttccaacaactcttgcgatgcggttattattatcatttctattttgcagatgaggaagttgaaactcagagacgctaggtaatttgctaaggttcacacggctaataagtggcagaaccacttacaagctttgcaagtaattttcaatgcagctcttagttcccctgtaataggagctgaatgatgacaatttggctttgtgtgcattgtatcttactttctaacttgaacaggacctgtagagcagtgagctccacttccctctgagaatcccacgcttctggagctcctggctgtaccagctctgggcatccccagggtttatgctcaccggtcagtgctggtgtgacatgatggctgagcaccggcactgtgtccagcgcattgctaggcactagacacgtgctctttcatttattcctcaaattgctttgtgctgtaaacgctacccagaaaggctcatgttcattactcaagtcacttcaccagaaagtgacagagccagaattcaaacccaggtctgccagattccaggtcccttgcttcttctgttgttgctcattgcaagggagtcttcttcaaggttattctcaggactttgattaagatacaggctcacagctgggcatggtgtctcatgctgtaatctcagcactttgggaggccaaggtgggtggatcacttgagctcagaagttcgagaccagcctggccaacatggtgaaaccctgtctctactaaaaatacaaaaattaaccaggcatggggacgggcatctatgatcccagctactctgaaggctgaggcaggagaatcacttgactccaggaggtggagtttgcagtgagccaagatcacaccactgcactgcactccagcctgggcaacagagtgagacttcatcnn

SEQ ID NO: 22655 - DNA, 444 bp, Homo sapiens
  misc_feature 1, 2: n = A,T,C or G
nnatagggcgaattggaatttcccccgcgggggcggccgcccgggcgggtacgcggggagaaacaagcagctgctgcctggtggtaacagcaaagggtggaagtcaatagggtctctgtgagactgtttcacagaaggatgcgtgtttacccaaggctgcgcatcaaaaagaaatagataaaataaatggaaaattagaagggtctcctgttaaagatggtcttctgaaggctaactgcggaatgaaagtttctattccaactaaagccttagaattgatggacatgcaaactttcaaagcagagcctcccgagaagccatctgccttcgagcctgccattgaaatgcaaaagtctgttccaaataaagccttggaattgaagaatgaacaaacattgagagcagatgagatactcccatcagaatccaaacaaaaggactatg

SEQ ID NO: 22656 - DNA, 1828 bp, Homo sapiens
  misc_feature 1, 2, 3, 4, 5, 6, 7, 8, 9, 1825, 1826, 1827, 1828: n = A,T,C or G
nnnnnnnnngccccctgagacggagtctctgtgtcacccaggctggagtgcagtggtgcgatctcggctcactgcaacttctgcctcttgggttcaagcagttctccctgtctcagcctcctgagtagcttggattacaggcgcccgtcaccgcacctgcctaatttttgcatttttagtagagacggggtttcgtcatttggccaggctggtcttgaactcctgaccacaggtgatacgcctgccttggcctcccaaagtgtgctgggattacaggcgtgagccactgtgcccggcccactgttcactttttgaatggcatcattttatagctgtagaactaaaatcaatgtttgccccaattttcttaagtaaaactctactttgagctcttacctccaacttagtaaaaagcagcttcacacacaaacaagattcttactggtggaatgttaggtttcgttgttaagttaatctgtctataagctcatccttagaggatatttgaggaggaagaacaccttgcagctgacttgcaaacatctaaataatttatttcgggtgcttatgaatgttactaatggattttgtatgaatttttatcccttttcatttatacaaaaacctgggcttttatgttaattatatcatctgaggttctaaggttttttttttagattttgaaatttagggataatagctcttaggtttgggtaccactttgctgcagtttaagaaagggggaagggaactcatttattaaacatcaatcacgtgctgtgttctgtttgttttctagtcatcatatcacacacctttacgacagctcactgaaggaaggtgatactgttcccattttgtagatggaatagacaaaacctgaatttaagtagcttgctcaaggttccatattgaatatggaaagttcaaatcatctcagtaatgaatataccatatatacttgctgtattgtatctatgataattcagttacccacaatacccttttaaatttctgttaatgacatacctttaaatgtctccttgatgaacagaatcatggtctttaaaaacattttcatgggttgattgcattttcaagctctaaaggattgaaagataaatcttcacgttaaaggtgagagtgaagtatctgctcttgggttacagaaccagatagtactagaactaagattacagggtaaagctgcttttatcttttttctttttctttttctttttttttttgacatggggtctcactgtattgcccaggctggaatgcagtggcatgatctcagctcacggcagcctctgcctcttgggctcaagcgattctcctgctctcagctttccaagtattggggaccacaggcgcacaccacaggcctggctaatgttttggtttggttttgggtagagacggggtttcaccatgttgccaggctggtctcgaactcctgagctcaagtgattcacccaccttggcctcacaaagtgtcaggcttacaggcgtgagccactgcgcccggctcacagggtaaggcttctgtctggtgtgtcgtattacggatttgcttaataggcacagtgaggcattaaaaagaaaattcagtatgcctgtagaaagggataatcctggctttaaagtcttcaaattgccgtccaagatgttttgactgtgccttttttggttccctgctgtcctttatggtgaattctgtcagtaccatggaggcgtcatcttgtggaaattcttctgacgggagcctgatctgggtgtgttcacccactctttttccaatggtgaacccttacttgggaannnn

SEQ ID NO: 22657 - DNA, 1746 bp, Homo sapiens
  misc_feature 1741, 1744, 1745, 1746: n = A,T,C or G
ttgactatgagaattataacccaaattgcaaggggaggaactgtccctgaaatcctgtttagaaagccataaacaaggaaacacctgtttgtatacagtttgaagggtggtatagctagactggcaatagattcttgtgaacaagttagtagggcaatagttttgtttctttaaaggattaacatttaggtaataatgcgtacgtgaatgtttgcctagaagtcctgttccctatataataatactttgataatcatttcaaatgccaacccttccttaatataaaagttttgcgttatgttaaataaactatttttttctttattcttttcttttagctttatcttcaagccaggatgaagggagactgggcaagactcttacgccccacactgcaatttggtcttgttgccgtatccatttatgtgggcctttctcgagtttctgattataaacaccactggagcgatgtgttgactggactcattcagggagctctggttgcaatattagttgtaagtatacaggtcaacagcctacatcttgatattgctaaacatttagataagtaaatagaaaaaaaaaaaatccaaaaaatccccagctgaggagaagactatgcagtgggcaagaatctcaatgttattaaaagtcacttcaggatacacaccaggttaaaaactaggttgctctttctaaaacttagtatttttgtaaaatcttagtatttttattgtgaaaggctctggctagaaatagtttttttaggggattatgacttgaaaaaactaattcacatgtagaaataactcttttattcagtattggcaaaatgaagctatttgctgaaggcataacaaagcaactcttaatttggaataatctttaaaaaatcccagttagtctctaattttttatatgcttaatctgtacacctcaaagtatatccttttgtttatatttatcttaggatgctgttgatcacaactttgtatgtagtttttaacttgatctaaattataccattaaatattttgcactgtaggctgtatatgtatcggatttcttcaaagaaagaacttcttttaaagaaagaaaagaggaggactctcatacaactctgcatgaaacaccaacaactgggaatcactatccgagcaatcaccagccttgaaaggcagcagggtgcccaggtgaagctggcctgttttctaaaggaaaatgattgccacaaggcaagaggatgcatctttcttcctggtgtacaagcctttaaagacttctgctgctgctatgcctcttggatgcacactttgtgtgtacatagttacctttaactcagtggttatctaatagctctaaactcattaaaaaaaactccaagccttccaccaaaacagtgccccacctgtatacatttttattaaaaaaatgtaatgcttatgtataaacatgtatgtaatatgctttctatgaatgatgtttgatttaaatataatacatattaaaatgtatgggagaaccaaatccacacttgcaggcatttgtagtcaactgtaatcaaacaggtggtcaataatttaaaatctcacattcctttagctgactctacaagtagaggctggcagcaaacacaatatctctcttgattttggtgattccttgtaaagtccaagttggggcaggtcactcccaaactccacacctccagtcactgcagagttgagaagctggggctggnacnnn

SEQ ID NO: 22658 - DNA, 4008 bp, Homo sapiens
  misc_feature 4001, 4002, 4003, 4004, 4005, 4006, 4007, 4008: n = A,T,C or G
ttggagctccccgcggtggcggccgaggtacgcggggctcctcgctacggcagaggggaaccgggcggagcggccaacatggcggaacgcaggagacacaagaagcggatccaggaagttggtgaaccatctaaagaagagaaggctgtggccaagtatcttcgattcaactgtccaacaaagtccaccaatatgatgggtcaccgggttgattattttattgcttcaaaagcagtggactgtcttttggattcaaagtgggcaaaggccaagaaaggagaggaagctttatttacaaccagggagtctgtggttgactactgcaacaggcttttaaagaagcagttttttcaccgagccctaaaagtaatgaaaatgaaatatgataaagacataaagaaagaaaaagataaaggaaaagctgaaagtggaaaagaagaagataaaaagagcaagaaagaaaatataaaggatgagaagacaaaaaaaagaaaaagagaaaaaaaaagatggtgaaaaggaagaatccaaaaaggaggaaactccaggaactcctaaaaagaaggaaactaagaaaaaattcaaacttgagccacatgatgatcaggtttttctggatggaaatgaggtgtatgtatggatctatgacccagttcactttaaaacatttgtcatgggattaattcttgtgattgcagtaatagcggccaccctcttccccctttggccagcagaaatgagagtaggtgtttattacctcagtgtgggtgcaggctgttttgtagccagtattcttctccttgctgttgctcgatgcattctatttctcatcatttggctcataactggaggaaggcaccacttttggttcttgccaaatctgactgctgatgtgggcttcattgactccttcaggcctctgtacacacatgaatacaaaggaccaaaagcagacttaaagaaagatgagaagtctgaaaccaaaaagcaacagaagtccgacagtgaggaaaagtcagacagtgagaaaaaggaagatgaggaggggaaagtaggaccaggaaatcatggaacagaaggctcggggggagaacggcattcagacacggacagtgacaggagggaagatgatcgatcccagcacagtagtggaaatggaaatgattttgaaatgataacaaaagaggaactggaacagcaaacagatggggattgtgaagaggatgaggaagaggaaaatgatggagaaacacctaaatcttcacatgaaaaatcataatctgactaattttgggactgaatgaataagtacaagaggttggattttctatgttggctgattaccatattgaacacatggcatttgtagcattctttaaatctatctactgaaatgtatttgacattcaagcagttatattcggtccttcattttatagaatattggcactattattggtacagtttaaagccattaatatgttttatccatttgataattttacagtaagtaggtctcattcattttgacagttatcaaagatgtactttccacagttaaatttacattaatggcaatttttgatagttttatggctttttactgttagactaatcaaaaataactttaaaaggaacaaagaaactccaacatttcacattatgcatagttatgtagccatttcacagtttctttaagatgtgtaaactcattgtccttgatagtttttatttttcattataaaattataccaggagatttcttttaagattctgagttagcagagttcaaaactattttgtggaaacaagccaactagtaacaatgcagcaacacttctggtttagctaaattatttttccaatgtaggaaatccacactgatttgtacgtctgactgagagaaagatggtcgtctccagcagagaaagtgaacagcatttgttggaaggtgatggctctccctcctccctccccatttcattggcgtaacgtaaagtgtattctgtacataatttacaaataaaacattttattttaattgttacttattatttagatatttctcaacacttaaattcataaaattaagaccatgtaagggtatgtttttagagaaatggaagtttgagtaacccacagaacatctgtgatctttctacagcagcttcagttttgtgccaacattccatgtattttgaatatgagcaaaaactgatcttaagagcagacttaaagtagctttgtacgccttaatgttcattttgatttattttaaatctttacattcagaaatgagatactgtattatcagaccaggaggcattgctgtgaaagataatttcctattctaaaatatcaaatttaaaataaagataatgaaagaaaacataagagaactattggactctaattgctttgaactagttttgcagtttgactttacgtcttatacatcttagttacaagtctttggaaactcttgtttacttatgagcataatcattccttggagttatactaactaataatgaatattaaatgatttttcttcagtcacagtgagagcatcttgctttgtggttgaaataggtagtgtatgtcagtctttgctttaggctgtttctcatctaagtgtttgaattaaagatgttaaatttttctaattgtgaaaaatatgttttctgtatcgacacattttattaaacttggcttgattgcttctttatagtagtccctgtaagtggacataaatgtggctatttgatgttaatgcaactatgtcaaggctgcaatcactttaatagtttctttttagcaaataaatgttcattgatgaagtgcctgggtattttcccgtcccatttgcagagctctactacttcatttccacagtaagcatatatataatgatcacttctgagtttatcaccagtaacattgatacctattttggggtataaacatggtgtttttcagaaataaaaattatttcattaacctttactattactgtgataatacccaggcactcaatattcatcctgaaattttttataatatatgtaatttgtctagtcttaaagacatttggagcatggccaacaggaaggtcagcttcttactgatgtgtgtggattcttacagaatgttagtacaaatttttataaatatttggtgatccctggggggaaatatcattcttactatggttagaaagtgaattagaaatttcagctcagtttctattttactattcaagttgtgtactttaaacaaatataaaaatcaaaaggctgcctctattacaatcctcagtggaatagatggctatctttcttggctaacattaaatattcttgtaccagagcatggaaaatcgtttataattgttaatagaatggcgatttttttttaagaacttcagatttgctatgctgctgtaagtagaaagcatgaagctttttgatcatgtagggcttattgtagagggtatcaattggcctaactaagcaggattgaatttaccagaggctaagttcagatagtaagaataatgcatatgtgattgttcttaaagtcaatgtattaaataaggtatttttccttttccctcttactggatttttcaattttcaaaccatatggcctaggtaactttaattgaaataatatagatttagttgaatactattcaggaagtaataaattttaatatatcacattgaaattatgcagtggtgatgaattttggtgtttcccccctctttctggttttacatcatgaggatcagttagctgctgacaagaaaagtcatcttgtgtcttttgtaaattgaatttttttttaaatctataggaatggacaccagttggggaccatatcaggagaggcttaaaggcggacatggttggacaaaaaaaaaaaatggggcgcgaaataaaagtgggcgcgaagaagaagtcacacggagtgtaaaaagcgggaaagtgtgtagtannnnnnnn

SEQ ID NO: 22659 - DNA, 290 bp, Homo sapiens
actcctatgaacaaaatttgaagcatgtttatttctctgcctggttcctctagaatttggaaattatctgtctggaagctctgagtttatcttgggacctcaagaggagaggatcacccaactaacagcaatcaaactccaaatggtgctataaactgaaccacacatggacacgtcagtcttccgaggacccttagatcaaccccaggaggagccctagctgctgttccccattctacgcccctttccagcaggaagaagccagaagacatcgtctcccaaacctttaa

SEQ ID NO: 22660 - DNA, 1002 bp, Homo sapiens
  misc_feature 1, 2, 983, 984, 985, 986, 987, 988, 989, 990, 991, 992, 993,994, 995, 996, 997, 998, 999, 1000, 1001, 1002: n = A,T,C or G
nncgcatatttggcctgggccccttgggcgcccgtggcccctaacctcttggggtgtcacacgccgttccccgccgttttttcttggtaggaaccccacactattctggcccggttttcttgggacaccggttatgcagtgtgtccctcacatattggggcgctcgccctctaccagagggtgttttaaaagcctttcttggtggcccagcgcggccccgaaacaagtgttgttgtttgtctttgttttttttttcctttttttttttcaggagatgaggtcttgctatgttgcctaggcttaattatttacttttaattaacctaaacttaaaaagctacatgttggtgacatcagccaaaaaaaaaaagtaaggacctctgaaaatcatcttcacaaaaagaatgaaaacatggacaaaaatagtcaaaatcagctttttcagaactttggaaattagccaaaagcttatacacatagcacttattcaagaaaaatagctgaatatcagcaagaacagttatcttcatggtgttttaatttgcgctgtacccatcagaactgcatgatcagctgtatggtagccttgaaaaccaacaggccacaatcacagtgaaaacctcaggttggcagccactggaggatacaaaatgagtttggatctccttcaatgccccattcccagagaactgtcattatttgacctgctggtagttccctaaaggacgtgcaaggatgtttttatttgactggacacttgaagcttgccctgtatgaacagcccccatcttcccatgcttgtcaaaaatcagaggcaactaacactgcggcttcctgagagtctcactctgtcacccaggctggagagcaattgcacaaacacttggctcactgcagcctcaacttcttgtcctcaagtgatcctcccaccttagcctcctaagtagctgggaccacaggtaagcaccaccatgccctactannnnnnnnnnnnnnnnnnnn

SEQ ID NO: 22661 - DNA, 634 bp, Homo sapiens; identical to SEQ ID NO: 21681
  misc_feature 1, 2, 3, 4, 20, 40, 617, 618, 619, 620, 621, 622, 623, 624,625, 626, 627, 628, 629, 630, 631, 632, 633, 634: n = A,T,C or G

SEQ ID NO: 22662 - DNA, 6073 bp, Homo sapiens
  misc_feature 6067, 6068, 6069, 6070, 6071, 6072, 6073: n = A,T,C or G
acgcgtccggaaaaaagagactcggcgagccctcgctgtggtgctgccgccgccgccgccgccgccgctggagttgactcttctgctcgcactgctgctgcagcacaaacgtgacttccaacattttttatttatctttcccttttcttttccaagatgtaactacggatcagacactaaggaccttcacgtttcgctgatgtagtttttggaggaaaaaggggggggagtgaagggcgtcggtttttttttgtgtgtgtgtgtatgtgtttcgggggaaattttccattatgagtgttttactaaagtgaatttttttttgtttgcttcgttcgtctttggctctttttttttccttcccaatttcggatttatttcaaggcgaatctggctttgggggaagaggaagaaaagtcggattacaagatcaaccaccaccaacaacaataaaaaccaccaggatatttttttgcaaatttctgacggctttaaattcatgaagcaattgtccccttttgcaatcagcatttggatctcagaatgagcaaggaaagacccaagaggaatatcattcagaagaaatacgatgacagtgatgggattccgtggtcagaagaacgggtggtacgtaaagtcctttatttgtctctgaaggagttcaagaattcccagaagaggcagcatgcggaaggcattgctgggagcctgaaaactgtgaatgggctccttggtaatgaccagtctaagggattaggaccagcatcagaacagtcagagaatgaaaaggacgatgcatcccaagtgtcctccactagcaacgatgttagttcttcagattttgaagaagggccgtcgaggaaaaggcccaggctgcaagcacaaaggaagtttgctcagtctcagccgaatagtcccagcacaactccagtaaagatagtggagccattgctaccccctccagctactcagatatcagacctctctaaaaggaagcctaagacagaagattttcttacctttctctgccttcgaggttctcctgcgctgcccaacagcatggtgtattttggaagctctcaggatgaggaggaagtcgaggaggaagatgatgagacagaagacgtcaaaacagccaccaacaatgcttcatcttcatgccagtcgacccccaggaaaggaaaaacccacaaacatgttcacaacgggcatgttttcaatggttccagcaggtcaacacgggagaaggaacctgttcaaaaacacaaaagcaaagaggccactcccgcaaaggagaagcacagcgatcaccgggctgacagccgccgggagcaggcttcagctaaccaccccgcagcggccccctccacgggttcctcggccaaggggcttgctgccacccatcaccacccccctctgcatcggtcggctcaggacttacggaaacaggtttctaaggtaaacggagtcactcgaatgtcatctctgggtgcaggtgtaaccagtgccaaaaagatgcgcgaggtcagaccttcaccatccaaaactgtgaagtacactgccacggtgacgaagggggctgtcacatacaccaaagccaagagagaactggtcaaggacaccaaacccaatcaccacaagcccagttccgctgtcaaccacacaatctcagggaaaactgaaagtagcaatgcaaaaacccgcaaacaggtgctatccctcgggggggcgtccaagtccactgggcccgccgtcaatggcctcaaggtcagtggcaggttgaacccaaagtcatgcactaaggaggtgggggggcggcagctgcgggagggcctgcagctgcgggaggggctgcggaactccaagaggagactggaagaggcacaccaggcggagaagccgcagtcgccccccaagaagatgaaaggggcggctggccccgccgaaggccctggcaagaaggccccggccgagagaggtctgctgaacggacacgtgaagaaggaagtgccggagcgcagtctggagaggaatcggccgaagcgggccacggccgggaagagcacgccaggcagacaagcacatggcaaggcggacagcgcctcctgtgaaaatcgttctacctcgcaaccggagtccgtgcacaagccgcaggactcgggcaaggccgagaagggcggcggcaaggccgggtgggcggccatggacgagatccccgtcctcaggccctccgccaaggagttccacgatccgctcatctacatcgagtcggtccgcgctcaggtggagaagttcgggatgtgcagggtgatcccccctccggactggcggcccgagtgcaagctcaacgatgagatgcggtttgtcacgcagattcagcacatccacaagctgggccggcgctggggccccaacgtgcagcggctggcctgcatcaagaagcacctcaaatctcagggcatcaccatggacgagctcccgctcatagggggctgtgagctcgacctggcctgctttttccggctgattaatgagatgggcggcatgcagcaagtgactgacctcaaaaaatggaacaaactagcagacatgctgcgcatccccagaactgcccaggaccggctggccaagctgcaggaggcctactgccagtacctactctcctacgactccctgtccccagaggagcaccggcggctggagaaggaggtgctgatggagaaggagatcctggagaagcgcaaggggccgctggaaggccacacagagaacgaccaccacaagttccaccctctgccccgcttcgagcccaagaatgggctcatccacggcgtggcccccaggaacggcttccgcagcaagctcaaggaggtgggccaggcccagttgaagactggccggcggcgactcttcgctcaggaaaaagaagtggtcaaggaagaggaggaggacaaaggcgtcctcaatgacttccacaagtgcatctataagggaaggtctgtttctctaacaactttttatcgaacagcgaggaatatcatgagcatgtgtttcagcaaggagcctgccccagccgaaatcgagcaagagtactggaggctagtggaagagaaggactgccacgtggcagtgcactgcggcaaggtggacaccaacactcacggcagtggattcccagtaggaaaatcagaacccttttcgaggcatggatggaacctcaccgtcctccccaataacacagggtccatcctgcgtcacctcggtgctgtgcctggagtgactattccctggctaaatattggcatggtcttttctacctcatgctggtctcgagaccaaaatcaccttccatacattgactacttacacactggtgctgactgcatttggtattgcattcctgctgaggaggagaacaagctggaagatgtggtccacaccctgctgcaagccaatggcaccccagggctgcagatgctggaaagcaacgtcatgatctccccggaggtgctgtgcaaagaggggatcaaggtgcacaggaccgtgcagcagagtggccagtttgtcgtctgcttcccgggatcctttgtgtccaaagtgtgctgtgggtacagcgtgtctgaaaccgtgcactttgctaccacccagtggacaagtatgggctttgagaccgccaaggaaatgaagcgtcgccatatagctaagccattctccatggagaagttactctaccagattgcacaagcagaagcaaaaaaagaaaacggtcccactctcagtaccatctcagccctcctggatgagctcagggatacagagctacggcagcgcaggcagctgttcgaggctggcctccactcctccgcacgctatggcagccacgatggcagcagcacggtggcggacgggaagaaaaagcctcgaaagtggctgcagttggagacgtcagagaggaggtgtcagatctgccagcacctgtgctacctgtccatggtggtacaagagaacgaaaacgtcgtgttctgtctggagtgtgctctgcgccacgtggagaaacagaagtcctgccgagggctgaagttgatgtaccgctacgatgaggaacagattatcagtctggtcaatcagatctgcggcaaagtgtctggtaaaaacggcagcattgagaactgtctcagtaaacccacaccaaaaagaggtccccgcaagagagcgacagtggacgtgcccccctcccgtctgtcagcctccagttcatccaaaagtgcttcgagctcatcatgaagatgccaacgcccgtggtcgatttatatatatttttttgtaattattatattctagtttggagtacttgctgtaggattcaagctgtctttgcactagctctaaagaagattttcttctggttttagagaactaattttgttttagcattaaactgttgaacttttttttgtacttagaaaacctagatactgcagtcagattttggaaactgccgtatagtcactgttttaaaaaccccggaggggctgtattaatttgtattgccccatggctgacaaaagcctttttttttggttttgatttttttttttttgtaactgttggggggaaaaaggctttttaacccatttttgaagagggtgaagtttggagaacaaatttaaaaaccatcagtcatgtgagcagattttttagaagggataggagacacacgcgcacacacacacacacacgaaacttgaaatggctttgctttggctgtcgtcttctgccgtgtgccagatgagcttgtgatctgggaagccggggcacccccgttttgtttctctgggcggttgtggcagctgaaggcggacgttgtttcctaaccataggtggaacgaggagacgggagcgagtgggctctccaccagcacatcactatgcatctgttccaggaaagaagaaaagcgagcgaggaagacggaaaagactgcctgccttggaggggtcacatgagggagacctgtgcctgatttcattaggaaatccattctgttattttttggtgctgttggctactttatcaaaaaacccttcaatagcatccttaagatttaaaaaaaaaaaaaaaaaaaaaaggaaaaaaaagtgatggaagccgtaagtgcttctttgtcatcgacgtgcaatctttctaacattccatctccatctcaccgcttcttgtttgacaccttcacaagtcagcattaatctttcttttaaaacttgtttcatttatgatcatgtagagagccactaggaggcctgcagttatttttgaatgtgaaaatgcatttgcgttcatcttgtctattttttctcttcatgttgtaacaaaaaggaaaaaagaaaaaaaaatcccatcccttttgtacatatgcctgtaaattgttttaaatacttgagcctttttctcggtggggggtggggaggggggtgagaagacaagatgaagaaaagccttacatttcagtttcttcatcggttggattggatgcttacagggtttttcttgtaacatttataagtgctgcttacatcactgaacaacaacaaaaaaataataatggagtagctgttgcccttctccggttgtgtgtacagtatgtgtggaataaaaaagggaaactgttttcacaagctgttctttgtttcataattggattcatcaatcccgtagctacccatattgcactgagcttgccagtggtgactgccaggaacgtcctatgatccactttgttggttgttgttgcagaagactgaactgttttggaatatttaacaattacagaaacagtcaagtgttttccaatgtggttgtccggtttctatggccttgctgtgtactttccctctttttgacagtaaacttctgcctatggcttacagtttgacatttaatttattagcgctgctctgcacccctcccttgggagggagacttcatgtggtttattgcgagttttttgtttacttttcaggtttgtactacaaggtttaataataaaaacaaagttttttggacatttgtctgtcnnnnnnn

SEQ ID NO: 22663 - DNA, 1409 bp, Homo sapiens; identical to SEQ ID NO: 20290
  misc_feature 1, 2, 3, 4, 5, 6, 7, 1409: n = A,T,C or G

SEQ ID NO: 22664 - DNA, 3118 bp, Homo sapiens
agggagtcgacccacgcgtccgactgcggagtcagacggcgctatgtacgccctcttcctcctggccagcctcctgggcgcggctctagccggcccggtccttggactgaaagaatgcaccaggggctcggcagtgtggtgccagaatgtgaagacggcgtccgactgcggggcagtgaagcactgcctgcagaccgtttggaacaagccaacagtgaaatcccttccctgcgacatatgcaaagacgttgtcaccgcagctggtgatatgctgaaggacaatgccactgaggaggagatccttgtttacttggagaagacctgtgactggcttccgaaaccgaacatgtctgcttcatgcaaggagatagtggactcctacctccctgtcatcctggacatcattaaaggagaaatgagccgtcctggggaggtgtgctctgctctcaacctctgcgagtctctccagaagcacctagcagagctgaatcaccagaagcagctggagtccaataagatcccagagctggacatgactgaggtggtggcccccttcatggccaacatccctctcctcctctaccctcaggacggcccccgcagcaagccccagccaaaggataatggggacgtttgccaggactgcattcagatggtgactgacatccagactgctgtacggaccaactccacctttgtccaggccttggtggaacatgtcaaggaggagtgtgaccgcctgggccctggcatggccgacatatgcaagaactatatcagccagtattctgaaattgctatccagatgatgatgcacatgcaggatcagcaacccaaggagatctgtgcgctggttgggttctgtgatgaggtgaaagagatgcccatgcagactctggtccccgccaaagtggcctccaagaatgtcatccctgccctggaactggtggagcccattaagaagcacgaggtcccagcaaagtctgatgtttactgtgaggtgtgtgaattcctggtgaaggaggtgaccaagctgattgacaacaacaagactgagaaagaaatactcgacgcttttgacaaaatgtgctcgaagctgccgaagtccctgtcggaagagtgccaggaggtggtggacacgtacggcagctccatcctgtccatcctgctggaggaggtcagccctgagctggtgtgcagcatgctgcacctctgctctggcacgcggctgcctgcactgaccgttcacgtgactcagccaaaggacggtggcttctgcgaagtgtgcaagaagctggtgggttatttggatcgcaacctggagaaaaacagcaccaagcaggagatcctggctgctcttgagaaaggctgcagcttcctgccagacccttaccagaagcagtgtgatcagtttgtggcagagtacgagcccgtgctgatcgagatcctggtggaggtgatggatccttccttcgtgtgcttgaaaattggagcctgcccctcggcccataagcccttgttgggaactgagaagtgtatatggggcccaagctactggtgccagaacacagagacagcagcccagtgcaatgctgtcgagcattgcaaacgccatgtgtggaactaggaggaggaatattccatcttggcagaaaccacagcattggtttttttctacttgtgtgtctgggggaatgaacgcacagatctgtttgactttgttataaaaatagggctcccccacctcccccatttctgtgtcctttattgtagcattgctgtctgcaagggagccctagccctagcccctagcccctggcagacatagctgcttcagtgccccttttctctctgctagatggatgttgatgcactggaggtcttttagcctgcccttgcatggcgcctgctggaggaggagagagctctgctggcatgagccacagtttcttgactggaggccatcaaccctcttggttgaggccttgttctgagccctgacatgtgcttgggcactggtgggcctgggcttctgaggtggcctcctgccctgatcagggaccctccccgctttcctgggcctctcagttgaacaaagcagcaaaacaaaggcagttttatatgaaagattagaagcctggaataatcaggctttttaaatgatgtaattcccactgtaatagcatagggattttggaagcagctgctggtggcttgggacatcagtggggccaagggttctctgtccctggttcaactgtgatttggctttcccgtgtctttcctggtgatgccttgtttggggttctgtgggtttgggtgggaagagggccatctgcctgaatgtaacctgctagctctccgaaggccctgcgggcctggcttgtgtgagcgtgtggacagtggtggccgcgctgtgcctgctcgtgttgcctacatgtccctggctgttgaggcgctgcttcagcctgcacccctcccttgtctcatagatgctccttttgaccttttcaaataaatatggatggcgagctcctaggcctctggcttcctggtagagggcggcatgccgaagggtctgctgggtgtggattggatgctggggtgtgggggttggaagctgtctgtggcccacttgggcacccacgcttctgtccacttctggttgccaggagacagcaagcaaagccagcaggacatgaagttgctattaaatggacttcgtgatttttgttttgcactaaagtttctgtgatttaacaataaaattctgttagccagaaaaaaaaaaattcactggccgtcgttttacaacgtcgtgactgggaaaaccctggcgttacccaacttaatcgccttgcagcacatccccctttcgccagctggcgtaatagcgaagaggcccgcaccgatcgcccttcccaacagttgcgcagcctgaatggcgaatggcaaattgtaagcgttaatattttgttaaaattcgcgtttaatttttgttaaatcagctcattttttaaccaataggcccgaaatcgcaaaatcccttataaatcagaatagaccgagatagggtttgagtgttgtccagtttggaacgagtccactattgaccgtg

SEQ ID NO: 22665 - DNA, 1559 bp, Homo sapiens
  misc_feature 1, 2, 1452, 1453, 1454, 1455, 1456, 1457, 1551, 1552, 1553,1554, 1555, 1556, 1557, 1558, 1559: n = A,T,C or G
nncgaccacgcgtccgaggcaccgcccaacacggtctccgctcagggtgacccggaagcagttgcgccagcagcgtcgcgcggcccagttcccttttccggtcggcgtggtcttgcgagtggagtgtccgctgtgcccgggcctgcaccatgagcgtcccggccttcatcgacatcagtgaagaagatcaggctgctgagcttcgtgcttatctgaaatctaaaggagctgagatttcagaagagaactcggaaggtggacttcatgttgatttagctcaaattattgaagcctgtgatgtgtgtctgaaggaggatgataaagatgttgaaagtgtgatgaacagtgtggtatccctactcttgatcctggaaccagacaagcaagaagctttgattgaaagcctatgtgaaaagctggtcaaatttcgcgaaggtgaacgcccgtctctgagactgcagttgttaagcaaccttttccacgggatggataagaatactcctgtaagatacacagtgtattgcagccttattaaagtggcagcatcttgtggggccatccagtacatcccaactgagctggatcaagttagaaaatggatttctgactggaatctcaccactgaaaaaaagcacacccttttaagactactttatgaggcacttgtggattgtaagaagagtgatgctgcttcaaaagtcatggtggaattgctcggaagttacacagaggacaatgcttcccaggctcgagttgatgcccacaggtgtattgtacgagcattgaaagatccaaatgcatttctttttgaccaccttcttactttaaaaccagtcaagtttttggaaggcgagcttattcatgatcttttaaccatttttgtgagtgctaaattggcatcatatgtcaagttttatcagaataataaagacttcattgattcacttggcctgttacatgaacagaatatggcaaaaatgagactacttacttttatgggaatggcagtagaaaataaggaaatttcttttgacacaatgcagcaagaacttcagattggagctgatgatgttgaagcatttgttattgacgccgtaagaactaaaatggtctactgcaaaattgatcagacccagagaaaagtagttgtcagtcatagcacacatcggacatttggaaaacagcagtggcaacaactgtatgacacacttaatgcctggaaacaaaatctgaacaaagtgaaaaacagccttttgagtctttctgatacctgagtttttatgcttataatttttgttctttgaaaaaaaagccctaaatcatagtaaaacattataaactaaaaaaaacccccaaaaattgtggggggcccgggcccggagaggttttaaacccttctttggggggggccgggttggacacggggctctgtcccgggaaccggcgcgaccnnnnnncggggggggccccctcaaattgactaaaaaaaaaaatgtccaccctttcattggggcctttaatgttaaaaaattcccccttttggtgaaaaannnnnnnnn

SEQ ID NO: 22666 - DNA, 398 bp, Homo sapiens
  misc_feature 1, 2, 3, 4, 398: n = A,T,C or G
nnnnccgcccgggcaggttcgcggggaggactgtcgacttcggtgtggcccaggtgagaaaggcccacctgtgtcctggttgagggtctccagggttctttggggcccgaggaatttcagacctgaacaatcaggtggacaacttcttgtgactttgggtattctgaaattactcatcttgactctactgtgcctggatgtagctgtgtgttttgtgtgtatcctgttcatggtttgtagaatttcttgagtttgccgatggtggcagagtctacatagaactatgcttcgtggtgttctggggaaaacctttcgacttgttggctatactatccaatatggctgtatagctcattgtgcttttgaataccttggtggtgttgtcatgtgttctggan

SEQ ID NO: 22667 - DNA, 1818 bp, Homo sapiens
  misc_feature 1, 2, 3, 7, 15, 17, 21, 24, 37, 42, 46, 75, 77, 79, 1818: n = A,T,C or G
nnnaccngcggtggngnctgntanggacattgtggtnccccngggntgcagggaattgggacgtgcagaaaacgntntnagcccactcacccagtgtacaacacttggaccagacaaggtgatccaggccactacatactttctacagaagccagtcccaggttttgaggagcttaaggatgagacatcggcagagcctgcaaccgactagaggacctgggtcccggcagctctttgctcacccatctccccagtcagacaaggtttatacgtttcaatacatactgcattctgtgctacacaagccttagcctcagtggagctgtggttctcttggtactttcttgtcaaacaaaaccaatggctctgggtttggagaacacagtggctggttttaaaaattctttccacacctgtcaaaccaaaaatctatcagcccacgtggtgtggttggtgaacagtgcatgccaggaggaagcagtccctcctcaccagctctccagccaggacgatcacacagagatgaatggcatctgagtattacggcatccagagccactgctgactcccacttgcacgccaccattcagtcaccagactgggtgccctccgatgggtggaataagtctgcttcatgccaaggctgggctttgggtcccaccaagatgagttctctgtaagactgtggtggagttgcaccaggaggtgcctctgcctctcgacttgcaccctggtcatttgtaagggaaaagagctggaggtggggagagaaagatctccttcagttgggagtccttccacttcaacactggagaactgagccttgcatctctccagggtccaaggccacgcttggtgcacaggcaagacttgcttcagccccaggtgtggtgacttagacctaggaaaccaattatgagtggaaagtgaccctctagttcaactgtgccagaggaaacagccctccagtgcccacctgcctcactcctccctatcatgtaccgtgaaaaccccctctgatggcctcaaggcagtgcctgcaggccgaggcccttctgggggtttctatctttcttccaccagactccaagcccactctcctccaagactgtgttgtcttttctcaccaagagtattaacactactaagtctttcaccttaacttatgactcaggatttattcacgtcctgcccactctaggctcacaggaataaaatcaagtgctagacacactggctgctactaaggcactagcctctgtagctggtggtggcagcgtggggtgccgcccagcgtgctgggtcctggcagtgcctctgctgtgctgcacattgagccctttctcagtcagtggagtatcaagttgggccatctgtctactgacctggccttcatgtaagcagctgtgggctgcgggcagacaggagctcagagatgcagcatgaggcgcttagaaaaacctggccatttgctgcctctaattcccttttgctttgccatattgggctatgtattacctccttgaaataataaaagaataacattgtctaaaaaacaacaaacacgtgtcacggcagagaatagaacttggttcgggcgccttcgggcctagaaaaagcttttctaaaccctgtcgtgtgggggcgcgggccgcgcggtatgttggaacgtgggccaatgccggttccaagaaaaccgggcaagagcatagggctgggttcccccccattaaaaaagccggcggccccgccgcgtggaaacaacccgagggcgtcggacgcctgcgcgctctccccggcgcagcgagccgataatcn

SEQ ID NO: 22668 - DNA, 1013 bp, Homo sapiens; identical to SEQ ID NO: 22649
  misc_feature 174: n = A,T,C or G

SEQ ID NO: 22669 - DNA, 1335 bp, Homo sapiens
tatagggagtcgacccacgcgtccggtctgcaggcactcagaatggtccagcgtttgacataccgacgtaggctttcctacaatacagcctctaacaaaactaggctgtcccgaacccctggtaatagaattgtttacctttataccaagaaggttgggaaagcaccaaaatctgcatgtggtgtgtgcccaggcagacttcgaggggttcgtgctgtaagacctaaagttcttatgagattgtccaaaacaaagaaacatgtcagcagggcctatggtggttccatgtgtgctaaatgtgttcgtgacaggatcaagcgtgctttccttatcgaggagcagaaaatcgttgtgaaagtgttgaaggcacgcgggcctcttccggggacgttgtctgcaggcactcagaatggtccagcgtttgacataccgacgtaggctttcctacaatacagcctctaacaaaactaggctgtcccgaacccctggtaatagaattgtttacctttataccaagaaggttgggaaggcaccaaaatctgcatgtggtgtgtgcccaggcagacttcgaggggttcgtgctgtaagacctaaagtctgcatgtggtgtgtgcccaggcagacttcgaggggttcgtgctgtaagacctaaagttcttatgagattgtccaaaacaaagaaacatgtcagcagggcctatggtggttccatgagtgctaaatgtgttcgtgacaggatcaagcgtgctttccttatcgaggagcagaaaatcgttgtgaaagtgttgaaggcacaagcacagcgtcttttcatttttattactcaaaaaagtttcatttttttatttagctttctgactctgtgcttgtgccttcaacactttcacaacgattttctgctcctcgataaggaaagcacgcttgatcctgtcacgaacacatttagcacacatggaaccaccataggccctgctgacatgtttctttgttttggacaatctcataagaactttaggtcttacagcacgaacccctcgaagtctgcctgggcacacaccacatgcagattttggtgctttcccaaccttcttggtataaaggtaaacaattctattaccaggggttcgggacagcctagttttgttagaggctgtattgtaggaaagcctacgtcggtatgtcaaacgctggaccattctgagtgcccctacaccagctcaaaggactgcttctgagagctctaggcttcctcagctcctcggatggcagccgattggtaaggaaataaagacagggaaaagagaacaacatccatacctccccgccttaattaat

SEQ ID NO: 22670 - DNA, 2150 bp, Homo sapiens
  misc_feature 2148, 2149, 2150: n = A,T,C or G
cccacgcgtccgggatgtcttgcttcatcgtaaacctaaactgggacaggaactgggccggggccagtatggtgtggtatacctgtgtgacaactggggaggacactttccttgtgccctcaaatcagttgtccctccagatgagaagcactggaatgatctggctttggaatttcactatatgaggtctctgccgaagcatgagcgattggtggatctccatggttcagtcattgactacaactatggtggtggctccagcattgctgtgctcctcattatggagcggctacaccgggatctctacacagggctgaaggctgggctgaccctggagacacgtttgcagatagcactagatgtggtggagggaatccgcttcctgcacagccagggacttgtccatcgtgatatcaaactgaaaaatgtgctgctggataagcagaaccgtgccaagatcactgacttaggattctgcaagccagaggccatgatgtcaggcagcattgtggggacaccaatccatatggcccctgaacttttcacagggaagtacgataattccgtggatgtctacgcttttggaattcttttctggtatatctgctcaggctctgtcaagctccctgaggcatttgagaggtgtgctagcaaagaccatctctggaacaatgtgcggaggggggctcgcccagaacgtcttcctgtgtttgatgaggagtgctggcagttgatggaagcctgttgggatggcgaccccttgaagaggcctctcttgggcattgtccagcccatgctccagggcatcatgaatcggctctgcaagtccaattctgagcagccaaacagaggactagatgattctacttgaaagcaaagacctttctctttcactctctagttatttccttccccctcaccttttggccatggggagaatttgacatttattcactataggacacactcccaagggaactggtgcttgctgggaaacttggaaccttcccaggcagggatgactcctggacagtgaagagttgaatgactgagcatattcagcagctcactgaagcgccaagctatccctttagcaaaaaagtgtctcagatgtgtaaaagctgaggaatgtggtgttctggcttcacaaatgaaaaggaggcagatgttaccattgtcttttcactgtatatacttctaagacagcaagcgggacactgcagtggcaatagtgttaaaaaatctcattctcatgatttttggctctagctaggaatagtttagtcaggactcagaaaatttgagcttagttctgggattatgaaaacatggggacaaaaacaataacttgtggatgtctggttcctgctgtctgcagccaggtatctcaggttgcaatggtcagaagtcccagtgagggagctagaaacagagctatctgttcctcatagtgccagtgtgtttacatttataggaccacatatccctggtttctgggggagggtttcactgttacatcaccaagaggccctgaaaagaggaaaaaaaaaaaaaaagaggccaggcatggtggctcacgcctgtaatctcagcacttgggaaggctgaggcgggcggatcacaaggtccagagttcaagagcagctggccaacctatgggggaaaccccgtctctactaaagattacaaaaaatagccgggcgtggggtgcatgcctgtaatccaagatactcaggaggctgaggcaaggagaatcgttgaacctggggaggcggaggttgcagtgagccgagataatgccaatggaccccaagactgggccgaccagagtgagactcggtctcaacaaaaaaacaacatagacgtgtcaatgcaaaacaaacgagggaaacggacaacagtggggcgcgaccacacccaacacgtatatcgacatacccacacgggcgtcatgggacgcgacgttaacggcccacccccgaaccaaactcggtcattaaccctggagcaccgccttggatacgcatttcacacacacaggtgcgaagccacaaaacgagactagaagacgtcctaaccaccacccagacactcggcgacccgcacgcaccagcgcaaacaacacaactgcaagccgatgacagcgcnnn

SEQ ID NO: 22671 - DNA, 933 bp, Homo sapiens
  misc_feature 1, 2, 932, 933: n = A,T,C or G
nncagttgatgtgacaagagataaagaaagcacagtattttaaaatctaaagcagattcctgtcttagaaaacaataggaaacaattatagatggatgtctttgctgaaatctaacaattagctcatattccatgagaaagagtggcctaagaattatttcatgttacctagccttctgaagctactcacttgatgtgcctagcactttgaaactaaccttttctttctttgttcatgacagtttaattccaaatatttactattttctcttgtaactgttagaacagttccttttgacattaatttttgcctacatatatatttttaagttgagaccaaatcggtgaagtgttgagcaagtaacatttatgatgtgtgtatattggaacaaatgtaaaagggttacaaagattagaaacagagtcataaaaaatggcttgatttataaaggcattacttttggtgctttatataatggcatatattgaactaaaaatttgtatatacagtatgtcagcatttcttagtaacttctcttgaatccatttttaatatctaatattgtacaggttggggagttacattcttcaggccaatactatccagactatataatttataaaataaattgaaaattcattcccctgtattcaagaccaaagcacataaatgctaatgtagggccagaggggaaatacagttctcctgcatatttgagagaaatgtgaagtcctttcagaaaataataactatatctaggctgtggctagggaaaggccttcccttttatccagggtgggcgccggttcatggcccaggaataacgcggcggagaaccgggaatgtgggtaccaaagaatatggggggaaaggtcggaggaaacaatagagaggtttaaattcttgtactccacgaccccccgtcctgtcnn

SEQ ID NO: 22672 - DNA, 1189 bp, Homo sapiens; identical to SEQ ID NO: 20185
  misc_feature 1179, 1180, 1181, 1182, 1183, 1184, 1185, 1186, 1187, 1188,1189: n = A,T,C or G

SEQ ID NO: 22673 - DNA, 1377 bp, Homo sapiens
ctcttttgtcaggaatagtcattgttactttaggaaaaccctgagtttatccaactcttgttagaattggataagtgtaaaaacctacaatagaatgcaagtgtgagagccaagtcctctggtaaaataaactcatattattctttatatatgtctggtcattgtattaataaaatcagtttgttttggctgaaacacatggttggcctttacaatagatgtgaaaatgggcttatagatcattgctctttattgtgaatattaggttgtatttattgccaaactctttcaacagcttctaagcagtgaatttcagtgtgttgttgttgttctccaagcacaagcagctacttcagttttaccacattcatctcccacacactgatgaaccatatggagacagcaggaactgcagtagaaccagagggagtagttaggacagacactctgattcattcattctgattctcactgttgtcagtgagtaaaggtcattgaatttttcttctgatgaataaaatggacaattttctcagtgcaatggcttacttttggaagagcagccctaaagactttactactgatcagtaaagtctaaactgctttctgtgtatttttttaattaaacttttattttagattgaataaaaatgtgcaggtttattgtgtgatactgagttttggggtatgattgaagccatcactaaggtagtgagcatctcaccttctccctctcttcactctgttacagagaacagaccctcccagtcttcagtgcactctaaatactggctaattctggccaatggaaggcatctgtggaagagaaaagcctcaggtcatgtgctatctgtctttattcactgtgacatattaggtaatggtcacagccactcaccatggccccagtttttaataacatgaccctgcttttgtgttccagtaacttgtgttgttttcccagtcctaagtatgatagaaacttcctgctgctgctaatctctgggttccatttaaaatccttccatcacgtgaatactatgctgtgttctaaatttttccataattaaaatacttacaattatttttgcctacttcttttgccccttagtgatatgttttaaaaaacacttataatgtgtcacaatatatttagcaaatgtagggaatgacatttttactttcgtcagcatttacactagcatttatggagcaatgctatataaagtatttttagtaatttaaacgttatataacagatatccgttgattcctttgtttctaagtaaataagtatacttgagatattcagtaaacagtattgaatacatgtttcaattgtataatataaaattatgattattctttttaaacagt

SEQ ID NO: 22674 - DNA, 1147 bp, Homo sapiens; identical to SEQ ID NO: 22487
  misc_feature 1, 2: n = A,T,C or G

SEQ ID NO: 22675 - DNA, 1811 bp, Homo sapiens; identical to SEQ ID NO: 22575
  misc_feature 1, 2, 1809, 1810, 1811: n = A,T,C or G

SEQ ID NO: 22676 - DNA, 371 bp, Homo sapiens
gccgcccgggcaggtacgcggggatgcgtgaaaggtgctgtgaccgccctccgggttgtggctggtggccttcggtgtttcgggtttggcagttcactcaccaaggtgatctgatggagtgcacttcgcacgattccaaagaagggagaagacagaggagaatgccagatgaagacagaaacagagattgaagttatgtggccataattcaaggattgctggcaacaccagaagccaagagaaagatgaggaagaattctcccctagacctttcagaaggagcgtggcccagccaacaccctgacttcagacttctggcctccagaactgtgagaataaattcttactgttgtaatccaaaaaaaaaaaaa

SEQ ID NO: 22677 - DNA, 1000 bp, Homo sapiens
  misc_feature 993, 994, 995, 996, 997, 998, 999, 1000: n = A,T,C or G
acgcgggatgtctcttgtcagctgtctttcagaagacctggtggggcaagtccgtgggcatcatgttgaccgagctggagaaagccttgaactctatcatcgacgtctaccacaagtatgcggcacgtccgagaggctgaacagctcgaccttctctgcacagcaggtccagcatcctttgaaacatgagttcttaccagcagaagcagacctttaccccaccacctcagcttcaacagcagcaggtgaaacaacccagccagcctccacctcaggaaatatttgttcccacaaccaaggagccatgccactcaaaggttccacaacctggaaacacaaagattccagagccaggctgtaccaaggtccctgagccaggctgtaccaaggtccctgagccaggttgtaccaaggtccctgagccaggatgtaccaaggtccctgagccaggttgtaccaaggtccctgagccaggctacaccaaggtccctgagccaggcagcatcaaggtccctgaccaaggcttcatcaagtttcctgagccaggtgccatcaaagttcctgagcaaggatacaccaaagttcctgtgccaggctacacaaaggtaccagagccatgtccttcaacggtcactccaggcccagctcagcagaagaccaagcagaagtaatttggtgcacagacaagcccttgagaagccaaccaccagatgctggacaccctcttcccatctgtttctgtgtcttaatgtctgtagacttgtatcagtacatttcaacccaagcatagtctctctcttattgtctaagatagtatataaagtttggtacacacactttgagatctggagacctggattagagaagttagtacgggtcgggcagggactgaaatcgagaaaggtgtctgggcgctatggtttaaaaaaaaaaaattgggggcgataaaaggggcggaaaaggtaaggagggaaacggggataaatagagccnnnnnnnn

SEQ ID NO: 22678 - DNA, 1529 bp, Homo sapiens; identical to SEQ ID NO: 20365
  misc_feature 1, 1485, 1495, 1500, 1527, 1528, 1529: n = A,T,C or G

SEQ ID NO: 22679 - DNA, 1041 bp, Homo sapiens
  misc_feature 1, 2, 3, 1029, 1030, 1031, 1032, 1033, 1034, 1035, 1036,1037, 1038, 1039, 1040, 1041: n = A,T,C or G
nnnccgaggtacatcacatttctcagcttcagtttatttactgtgggtcgtgcaatagaacaatcagaatgcacatgcctatgctttatcctagatgtgttactttagaattttggaggtggtagctggataagtgcatcgtggaaaagcttcttcagtgtattctgacacactcctttcatgaagaggcattgactataccataaaccctagaaatacgtcattggcaatgctactgttttaaaggagagaaaggcatctttttgtttttgacccagaatggcattgcctataacaggtgaaagggaatcatgctatgttaacaggaatcaacattatccatttttgaagagttcattaaacaggcaatatttatttggttgtctgttctatgttaggagctttcagttcagcactcaggcagcaaataaggtaatgcctgtgcatatgctcggtcctttctgtctgtccaaagctcccctcttctccattccccttttgcctcagtaactcgtctattaagatgtaaatcaagaaatgccttctgtctcagggaagcccttaccagaacctctaggtagagttagaggctaactccacggcaccctagagtccatagcatgttgttatcatgtgtgtatcgttgcatgtaaaaatattcctatttgttacggtttgcttgtatgtgtttgtcattaatctattaattcattcagtgaagagatgccaacttgtatactagcctgggaaacctctgtgtcctcagtgcctaatttaatactcctttttctatctagtagtaaaatgaatatgaatgtacatgtctgaggtctctataaattaaaaggtaaaaagtcttaagccaggtgtggtggcatgcacctgtattcgcagatatttgggaggttgaggtgggagcattgcttgaggccagaagtttgaggctgtagtgtgcaatgctcttacctgtgaatagccatggccctccaacatgggcaatgcagtgagaccctgtcttttaaaaaaaannnnnnnnnnnnn

SEQ ID NO: 22680 - DNA, 1201 bp, Homo sapiens
  misc_feature 1, 2, 1198, 1199, 1200, 1201: n = A,T,C or G
nngcagacagtgacttcgatgctaagagcagtgcggatgatgtaatagaagaaactagagtgaactgcagaagggaaaaggtcatagagacccctgagaatgacttcaagcaccacaggagtcgtaaccactctcgttcacctagtgtagaaagagggcaacagtacggcatgaagaaagagaaaagagggctgccgcgctggaagcatgtttggatgtaaccaagcagaaagatctcagtggattttataggcacctattaaatcaagcaggtggtgaagaggaagtacctaaatgcagctttcgtgaagccagatctggtataaaggaagaaaaatcaaggggcttctccaatgaagtaagttcaaaaaacagaataccacaagagaaatgcattcttcaaactgatgtgaaagtagaggaaaacccagatgcagacagtgacttcgatgctaagagcagtgcggatgatgaaatagaagaaactagagtgaactgcagaagggaaaaggtcatagagacccctgagaatgacttcaagcaccacaggagtcaaaaccactctcggtcacctagtgaagaaagagggcacagtaccaggcaccacacgaaaggatcacgaacgtcgagaggacatgagaaaagggaagatcagcaccagcagaagcaatccagagaccaagagaaccattacactgaccgtgattaccggaaagaaagggattctcataggcacagagaggccagtcatagagattcccattggaagaggcatgaacaggaagataaaccaagggcgagggaccaaagagaaagaagtgacagagtatggaaaagggagaaagatagggagaaatattcccaaagagaacaagaaagagatagacaacaaaatgatcagaaccgacccagtgagaaaggagagaaggaagagaaaagcaagcaaaggaagagcatatgaaagtaaggaggaagatttgaaaataatgatgaatacagagatagagaaaaacgaggggtggtgttcaggcttcaggaaagaatcaggaagaaggggagcgggccaatctagggaagataattttgggcagaagatcccaatgtgaaatggggccagagaaacagggaactttttttgtttctggggcacaaatcccgggggggcagggggaacaaacccggggggtgtggcaaaacnnnn

SEQ ID NO: 22681 - DNA, 419 bp, Homo sapiens
  misc_feature 414, 415, 416, 417, 418, 419: n = A,T,C or G
acaaaggccgcagacaagttgtcagcaacattagataactcagggaatatcattcccataaatcttaaggcaatctacttatcagacgaatgagtaacatacaatcaaaatgactggatgatgactggggggacatcaacataaagactatgatgtgcattcaatatttacacgaagaactaggataaatgaaagatgagagagagaaagagagagagcaaacagtatataatggctctgtgctccaacaatgtgggaacaaccttataaagaatgtgtaaggacaggaagaacatatgcaaaaatgtcagtggtaacagtgttgggtggtgttattctaagaatgctttgcgtgtgaatagtaatgttgtctagcttaattctatcacccttggtatttctgaaaaccaggannnnnn

SEQ ID NO: 22682 - DNA, 2341 bp, Homo sapiens
  misc_feature 1, 2, 3, 10: n = A,T,C or G
nnnccgctgnaaacgtgccactgcactccagcctgggagatagaacgagactccatctcaaaaaagacaaaaacattagccgagcgaggtggggcacgcctgtaatcccagctactcatgaggctgaggcaggagaatcacttgaacccaggaggaggaggttgtagtgagtcaaggttgcaccactgcactccagcctgggtgacagagtgagactgtctcaaaaaataagtacataaataataagtaaaagctactaacaattaaaaaataaataaataaagacaagactgtctggaaaatggctctcctaaaaggaccagttgccatcatccacagtggaagattcaaagcagttggtccttggtacgtatgagaagcggatttcattcccttgaattctacagagcagtttattagagtgaatgcattttaaggccttgcatttgatatgtcatccagttcataatcaagttgcctttttctggctaaaacataatgattatgtatttttctcatttggtcctacaagctgctggccctttgtccctccactgtgggaatcagatctagagcaggctgagcctgcagacacagcagtggccaaaaggtcactctaagtgttttgtcttgactccttacttgaagtccacccagctagcacacatctggtttatactgaagccccctgcctagaaatactcatttcaggaaccaccagtaagcatctgtgaccacacaggctttttgactgatggcttcccggatctggtttcaagggataaccccgtctgtgtgcatctatggtcttctctctacagcgaggactttgcagtgctgcttgtggtccacacaaggggctcagagctgagtctgaactgcttcatggtcaccagctcctgtcccttccagtcttgagaggcttttttctccagatggaacctttccttcccgccgttttctcggtctctggctgtttttctcttgtgcccgtctaattggacacctcctggcttccatctctgtggttctcctgcctcacttcctgttctgttgtttttccgttttgtcaaaatatctcctatgttcttggcttccttttcgtcgccaggttttcagctttcctttagctcttcttctaatatggcttctgcccacaaaagcctgctctgtcaggatctcatggttctccacttgccagaaccttcttcagcctcagttcctcggcctcaacttgtacgtttaacccattgaccaccaccccccaaattcaccttcatttctttgaccctgctcctcactccttttctgttgaggaatctgttgactaactccaggctcactcaggctcaccgtcctgctctctgcaccagcctttccagagcgtgccagttctcatggcttcatctgttaactgtgatcacttcagtcctgatttttagactaaaggttcttaagcattctaacggcgggaccattactcagggtttggagcaacacatcggggtgggttccaaatccagcacttggcaccagtcgttccccgaggctaccctggggcgacaaagacacgcgcgcaacaaaccccttatcaagatggccaacctcgcgcctgtgctgcgtgcgagcatacatatcgacccaaccaccacgacaccaacaccacgccacaaaccccacagcagagcgtacaccccacagccgccaaccacgacaaccaacacgaccacaccaccacgatccacacccacacacaacgagcaccacagcaaccacaggggagaagcaaccaagcggagcgagaaggcgagacgagcaagcaacgcaccacaccgaaagcgagcagcgacggccagcgacaacaccgagccgaccgcacaacaacacacacaccgagacacgaacagcaccacacgcacaacgccgagacccagcctcgggcaacacagcgaagaccacacgacacaacccacagcagcagcgcggaggcacgcggccgaaccacgacacccgacagagaacacgcaaaaagacacagagcgagcgacgcgcgcgaggagtccaaaggacaagcaacaaggcaccagagccaagccgacacaagcggacgcacacgaaccagcaaggcacgcaagcaggaaaaggagggagcgaacaccgcagcagcgcgccgacaaacccgcacgaaacgagagaacagagagagaaggcaaggaggggcatggcaggcagcaaagaggaggagacaagcaagaggaagagcggacgagcagcaaaagaaggaggcaaaacgaaggaaacacagaagaccgagcagagcgagcagagatgccgaccgcac

SEQ ID NO: 22683 - DNA, 953 bp, Homo sapiens
  misc_feature 1, 2, 3, 4, 5, 6, 7, 8, 9, 10, 11, 12: n = A,T,C or G
nnnnnnnnnnnnctcaaataccccaggcaaagttactaaccagcagtcttagaatgagaatgctttccagtgggacacatcatttatttaattcagttttatcaatctgaaagcctcatagctgaatactaaagaagagttgagctttgaggagaagcagagtatttcatcatggttcaaaccagtatctgaaacaagtaggtttctagggagaaaagataatctcttaccaagcatgtcagttcacctgccttcatcaaaggactgactgcataggtgttaacaatcataattctgaaagttgctctttgatatcagtatattctataatgtattattggcttttaaatacctcaccctcctcacagtctgtaggacatttttatttaacttcttgatttgaatcaaagcagctattacttcattagctcttttgaagtgttcttggttgagaaggaacagcaaggcttatagaagaaagccaacttttcaaatcagtctttcttttgatcagcgctgaatctgatactacactgtactttaatcagaggaaaaaatggagatttgccttttttctatgaaaatttatccataatgaggaaaggaataaaagatatagctttatctcttgtaattgtctaattgcactaaaacatcgtgggccctgaattttaccgcagtcattcaccacataacgacattttggtcagtgatgaactacatctacgacagtggtcccataagaatataattgagctgaaaaacttgctaccttatgacatcatagcgcaacatatgattcatgtttgtagtgatactaatgtaaacacacctgtgctgccagtcatagaagtatagcacatacagttatttacagcgtataataccgtcgtgcattgcttaatgatgggatgcattctgagaaatgccctgttaggtgatgtcattgttgt

SEQ ID NO: 22684 - DNA, 1101 bp, Homo sapiens
  misc_feature 1, 2, 1097, 1098, 1099, 1100, 1101: n = A,T,C or G
nnaagagtgagtacagactgtgttgggaacaaatgcaagtcagaatctcctttcagattagaacaaaatatcatgcaaggaggggattaaaatgaacataattgaagaagcagacatctaatacagaagatgtagtaaaaaagcaatgaaattcttaaccatattatcctaaaataattcaccctcttaaagattttagtataattttcttttttcctatacgtgggtaagtgcattttatctttataaaattttgtaattaccctccaacataagcatacttaaatttttcgtgcatcattaaatcactttgtatgcttgcaaaatgtactgtgcgctgaagtgattaatttacatattcattcttgctctgtgatatttaggtgtttgtttttggttagtgcatttattctgttaaaatttaaaatacatttgtgttttttatcctgttttaagtatatatatgtggaatgtatatataggatgtatacacagacacactcagacacatattttaatttagatttctagaagggaaattttaattaaaaataggtgaacattttaaatgacctaatacatatttagtccacattgaaactttggcattttgtcattgccattaaaattttgatggcattaaaatttgatgccattaaaattttgatcagtaggtagcatttttttcttagctacaattgttttttttaattataagtattaaaaattcatgaagatgattctttttgtaaaacagttttgcataaaaagtaagtctcattttaaagcaactaccaacttactggccttttcctccccagagataatcattaagtaaatagccatcagaccttgtcctatgcattgtgtgtgtagtggggagagaggaagggaggacatgggacacatttgaagtttgtgtgcatacgacaccgtgctgtctgtattttgacaatatgtcttggtgatcttttcatatcagtacacataaatctaccttattttacaaagtgtgcgtggtgtgataacattattattgtaatcgttagcttgctgctggatatttagtctgtttgcattgtttggctattaacaannnnn

SEQ ID NO: 22685 - DNA, 3645 bp, Homo sapiens
gcgatggtacagtaagaaaagctccagaggggaaaagcgaatatgtgaattatctaatctcagccactgatccaactccatagtctgtgacttttggagtcctccaatacttcgcaagctgcatgttcacatttaaagtttctgggggaaaacgaacagggtagagttttaggaaataccagatgttgctgcgattttctacagtgaaggggcgtggaaggggacaatgggagtagaagcgggtttctgaagttgtgtttgtacttgattttaagcgagctgtgaacaactcgtgtccaaataagtggctgagaggtggtcctaagtaagcacaagtttagtagtagagtactcgtaacacagaactggctgaaaccccgccctcttgtctacgggcgttctttcagggcgactttgtcagtaccccaaactgtccccgcatgaggtcactctgcacggtcacgtgctcgagcccgcgggagcgccacatcgccagccgcacccctccacccccaccctgcccacgtgacccggcctagtttctccaggcccgtccctacgtctcactcgggaagccccgcccacgctgagcgctccgcctgcgagcctccgccaattacaccaccccggctcaagcaccgaaccgggatccacgtgcttaactgtccaatgggagccggctcccgggcgcggaaggggcggggcaggacaaggaacgactgtgctacgttggcccgaaaggggcgggacctgcaacgtccgacagaacgaggggacgtaacggaggcaggttggagccgctgccgtcgccatgacccgcggtaaccagcgtgagctcgcccgccagaagaatatgaaaaagcagagcgactcggttaagggaaagcgccgagatgacgggctttctgctgccgcccgcaagcagagggactcggagatcatgcagcagaagaagcagaaaaaggcaaacgagaagaaggaggaacccaagtagctttgtggcttcgtgtccaaccctcttgcccttcgcctgtgtgcctggagccagtcccaccacgctcgcgtttcctcctgtagtgctcacaggtcccagcaccgatggcattccctttgccctgagtctgcagcgggtcccttttgtgcttccttcccctcaggtagcctctctccccctgggccactcccggggggttgaggggctgggccactcccgggggtgaggggttaccccttcccctgggccactcccgggggtgagggggttaccccttcccagtgttttttattcctgtggggctcaccccaaagtattaaaagtagctttgtaattccttgagcgcctggtttgactggggacttggggggatggggttggaagaatgactgccctttcccaccaaaaaagggagaactctttagattcagattgtgggtatgtagacttaataagtgaaacatcacagaagaagcctttattatacaatgacaaccaaacaagtactccggatatgcagtagaggaatcctctaagaaccatagagacttcttttctgtgatttttgttccccacccttgaacaccatctctaggatggagttggcctaagagtgaatgctgcaagatctgtgtttatgcctcttttcctcattcttcctcagtttgttcgtctgcttgaaagttggccaaaaaatcctgctgctcaccgacttcccgtggtcagctgctgtcaagcgttcactttctcttctgtcattcctcatggaatgagggtggttttgtcttcccgcttcccttgacctcaaaatcaggattaaaacctggggtagcctctgtgctcctttcttctatgccctggtttgttctgtggttctgggcttcttatatccgtgtgcccagggctgaactccttattttcctttctccaagggcagagccgagtcttcagtccctgttggtctttccccacccccacttccagcccaagagccaggaaagggctggtgccacactgtctgctgggatcagcggtggttctttgagctgctgatttgggtgttaggctcttgagctgggatgcagatgtaacagtagctccagtgagtcagacactctgcccagcacattagactgtgtttgaccacttcttccagttcatagtattgacttcagcccaaacggagataactccctgtgtgtccttgaggtattgagctgggctggacagctccccttgagccaactctaggagtacaatgtcaggggaaccccagtttgtgaaaaggacttagactggaggatatttgttatctggggatatgatgcggtggcggcggcgcctcaagataaggggctggggtttctgggtggggggccaacagagtggtgccagtaacagccccagatagaggagtacgcaggcccagcatgaggcaaccttgacccagaaggtggcccagctacccttgatgaaggtcttttccagttctgctccctcatagctgtgtaaccaaaggctctggttagagaatatgaagggccttagcttttagacctgttctacctcctcaccaaatataatggcagacccatgtgtgtctggaatggccttgaattgctctttccttaaaatagctagctcttcaggagagtatctaaggcccactccatcttacctgaaccagttggtaagggtaaccatgacatagagtgaggcaaggaagaagacgaagtggaaggcagaatagttgtaggaaagatgctggacttggactggaggagctggaggggtttcttggtcagctggcctcgcagccccacccctttgccctggagagaggaaatggctgctgggagcagagctgctgaaacacctcttcccctctcccccaactacctttgttaaggctcttgagggttcttatggcactccacagagatctaccacttcttatggttcctcacttggcactcacctttgtctgcctccactgtttcagggcagcagaaacacagtgagggcttctgcaaaacagaacgcaggttttggaatggtcttaaaagatgtgagggtgttaatctaggaaacttcccccgtgaaaagattggtctagtattaaaaagtggaggcacacctgggttcaaattctagctccagcatataagtggctgtgcagactttggtaagatgtttaatcttttgtgcctcgatttctccatttgtaaaatggagcaaatacctacctcacagggttgttgtgagggtacacattcacatggagaattctgtcaagacacacaaccacgcacgcacgaaacgcaaaacaacacaaacacccaccacgccggaggagacggaagcacacaacaccaagcacgcagcaccaaggcgcgaagcacgaaccacgacaagggagacacggacccagacacacgcgagcgcggcgcacagcacacaggcgcacgacgggacaaacaccgagcaggcagagggagcaccgagagaaagacagagagagcggaccaacaaagggagcagaaggcgtagggaacagggcgaacggacgacccaaccagccggagccggagtggagcacgcgtcggaagaagtataacacaccgcagagccagacacccgcacaccacgac

SEQ ID NO: 22686 - DNA, 376 bp, Homo sapiens
gtatactatttgtatactattgccatctgctgatgtcgatatagaactacaaatatgtaatccaaatgggaagatttcacctcacagggttaagagcagcacactcataacttggaaaatagttgagattttattttcaaaagtaattattataaaaaaatccttagtggatgaagtttaaaaaaacctctacaatgtttgcaagaatttgtgtgctccatccatcctacataacatagaagttggattactcatcttgattcaatgtaccattggtggccaattgatttgatggtaagggagggattcgttgacctcgtctgttatgtaaaggatgcctagggatgggagggcgatgaggactaggatgatggcg

SEQ ID NO: 22687 - DNA, 437 bp, Homo sapiens
  misc_feature 1, 2, 3, 4, 424, 434, 437: n = A,T,C or G
nnnnagaacaagaaggtaccactttgtataatattcaaaatctatacagcacattgctaagcagagtatacactcaagaaatgtagaattggtaatattatactagaaaatgaacttccagtattgctattattttactaatttgcataggcactgacctctgaagagggaacacgtatgtagaagtgcctttgagataggaaattgtgagagtccctaacttttacatacatattagattaatttgagcctacataaaaagaaaacaaatttgtgaggatttgaggggggaaaatcaggggacttcctgtttgcagctcttatcattgggagaacagtaaattagatctagactaatatatttggtctctctaatttatggcaattttgttaactttgtcattgagtggaatgctgaacaaantttctatggncan

SEQ ID NO: 22688 - DNA, 354 bp, Homo sapiens; identical to SEQ ID NO: 21786

SEQ ID NO: 22689 - DNA, 349 bp, Homo sapiens
acgcggggctgcagcgggagctccaggtttatcctcagtgttctgtgtcctgtgcttatagaggcccgtcctctgtggccgtgtgacctgcaagtattgggagagccacagctaaaccccgggacccctggaagcctagaaatgttatgagttctcattttgtccaagacctttggccagagaacatacaaaattctttccaaatagggatgctgagaagatatgaagaatgcagacatgacaatttacagttaaaaaaaggctgtaaaagcgtgggtgagcataaggtgcacaaaggaggttataatggacttaaccaatgtttggcaactacccagaaagaaatatt

SEQ ID NO: 22690 - DNA, 369 bp, Homo sapiens; identical to SEQ ID NO: 20630
  misc_feature 364, 365, 366, 367, 368, 369: n = A,T,C or G

SEQ ID NO: 22691 - DNA, 287 bp, Homo sapiens
  misc_feature 1, 2, 3, 4, 287: n = A,T,C or G
nnnnacccaaacagagtgggggagttttccaagagaagagaacagcatgtaccaaggtcctaaagccttcaattcttcgaaaggaattagaaagaaggccagtttggcttcaatgtgtaaccatgagggaaagaggcaggaggaagagatcaggcaggccctggtaggccatgttagatgagtgtagtttttattttaagtgcagtggaaagccagataagggtttttttgtttttgtttttgtttttattttgagacggagtatttctctttcgcccaacctgtan

SEQ ID NO: 22692 - DNA, 988 bp, Homo sapiens
  misc_feature 960, 961, 962, 963, 964, 965, 966, 967, 968, 969, 970, 971,972, 973, 974, 975, 976, 977, 978, 979, 980, 981, 982, 983,984, 985, 986, 987, 988: n = A,T,C or G
cgcggtggcggccgcccggcaggtacatggttcttcctcagaaagtggttcttccttaatgtgtttctttttaccccttttcttcttcttcttcacagatgtttcttcttcttctgccactttttcttcttcctcttcttcaactgaatagggtaagtgtaaaggcacaacaaattaacactgtatcagatctcattccttccaaaaacgtttgagtcctagtttttttctgtcattctcatcaactacccaatgtttgttttgtttattttataattgggaaggttctccaaggcctaccactaactttaacgaatgatatagatagagctcagagcaatcttctcacgatcatgaagtcatgtataaaaatcaggattaaaacaaaggtcatctgatctccaatcattattgggaagaaagtcaattatattagaaatggttaagagcttgcactctgaagtcagacggcctgggtttaatctacctgctgcaaccctgaaaaattgtatttacccttggtgaagctccctatctataaaacttaagaatgtcttatcttactggactgttactgatttaaaaagatgatgcatagaaagcactaagtataatgcttagcacacattacaataaggactcaacacatagctatcattagacattcagtgaccagctgggtgcagtggctcacgcctgtaatctcagcactttgggaggctgaggcgggaggatcacttgaggtcaggatatcaagaccagcctggccaacatggtgaaatcctgtatctaataaaaatacaaaaaagttagctaggcatggtggtgcatgcctgtaatcccagttattcaggaggctgaagcacgagaattgcttgaacccaggaggcggaggctgcagtcagccaagatcacgccactgcacttcagcctgggcgacagagggagactctgtctcannnnnnnnnnnnnnnnnnnnnnnnnnnnn

SEQ ID NO: 22693 - DNA, 390 bp, Homo sapiens; identical to SEQ ID NO: 20737
  misc_feature 387, 388, 389, 390: n = A,T,C or G

SEQ ID NO: 22694 - DNA, 596 bp, Homo sapiens
  misc_feature 595, 596: n = A,T,C or G
ctgtcgttgttgctgtttgttgggtttgcttgtgtgcttttgtcctgtaactactcaataaataacacaaaagataaaaggctttgagaaccttaacttttttttctattggcttggggtgtaaatccactgcaacaactattactacttgaaaagatatgctagagtaaatagaacaatacagttaaattcacctgaagtctttaaaatcttttttttttccgggtatttttaacccatgtggcaaaaaggcattaccatacaattttagctgttggtaacaaattatctcttttacattgctttcccaactaattctgcatagcactttcatattttactagaatagtattatgactagaagtgaatgattagcataaaaattctctaaactattaatgaataatttacatagcaatttttaaaaggtaattcataattgtccaaacatcactctcagtttcctaaaggagattacttgtgaaaacactcatttgtcagttttaaagtggaactcatcctatatttctctttgcaatttactcttcaaattaaactacatcttagtgtatatccatgctaagtttcttgagcnn

SEQ ID NO: 22695 - DNA, 622 bp, Homo sapiens
  misc_feature 611, 612, 613, 614, 615, 616, 617, 618, 619, 620, 621, 622: n = A,T,C or G
ttacttgtttcactaacatacatagggtgtcatttctcatcgctttcaacctttttctggttttagttttcaaaaatttgactatgaatgtgtcttgctgtagttttctttggattcagccagcttattgaatctgtaggtttatttcttttgccaaattcagaaaattttcaaccattagttcttcaagtacttttcttttcagtcctacccactttctattcccctgggactccaatgaaataaatgttagatcttttgttactgttccaaatgcccctgaagctctgtttgttggttggttggttttcttcccccagttgattttctctctattgttcttattgggtaatttctattttcaggtccactgattctctcctctccccactcccttctgctgttgaatccatctactaagctttttgttttggctactgtatttttcagttgaaaattttctactttttttaaatcatctatggcgttgctgagacttttctatttttggctgaaacattctaattttctacttggcttaagcatggtataactgcttgctgaagtaattttatgatacccgcgttaattaattctagaagtaccccgannnnnnnnnnnn

SEQ ID NO: 22696 - DNA, 2062 bp, Homo sapiens
aaattttggaagtttttttttttaaaaagtttaacgggcgcccttttttttttttttttttttgaggttttattatttttatttatttttgagactgagtcttgctctgtcatcaggctggagtgcagtggctcactgcaacctccgcctcccaggttcaagcaattctcctgcctcagcctccctagtagctgggattacaggtgtccaccaccatgcccaattaatttttgtatttttggtacagacagggtttcaccatgttggccaggatggtctcgatctcgttgaccttgtgatccgcctgcctcggcctcccaaagtgctgggattacaggcgtgagccaccgcccctggactacttatggaggttttaaaaaatcttttaagtccaggcctgacgtttagagaaggttacaaaggcggccaggatctgagtatttccaaaaagctctggaggcagcattgaggtttccttccagttgaatcactgactttaggtcgactggggtactttgggttttttgggccattttttgggggtgtgggaagcttttctcacagatttactaggagtggtgaaaaacttggcctctggcttttttggagtctgtctcgcatcttttttccccagcgaaggacttttttccttcactgcctcttctttgatttttggcttcttctctgggcttttccctggggtctcagactctgcagcttttggggtctcagatgctggcaaagcctttcttttcttcccacgaggtgtgctgggattaggactctttgctggagacttctttcctgtggcatgtttttgaatctctactttttcattagctggagtcttctttcctattggtaccagctgtgggatttcgtcttcggattcatttgttgctttaacttgggcttttcctctgccacgttttttcttcccatgctctggggtctgttccttctttgattcaggtttcttcactgtagtatcaccactttcaggtgccacatcatctttactaagaactgatgcagtcttcctagcctgctgcctcttcttcttcctctccttttgtttttcaaaatttctttctcttcgttttctccttgcctcttttttcttcttattaagcaaagatcttttggtggcttcatcccaattgctgacaaacgaggaaaagatgggaagtgcagccgatttctcagttttcacaaacaggagtttcacgctctcccacttctctggcaatttttctgaaagtcctttggtgacagcaacaatgttttcaatgatgtgctcaatttgcattccaacgtgaccaatacgtatagcactgcaagaaccacttttagaaatgtttaagactgttccacctatacagtcattgatctctcttgataaattcttggacagaaggtttacagatactggaactttctttctttgatagaaatgtctcccaatgagtgagggtaagagccgcctaattctggcatcagtaaggaagaaatcaaaactgctcagaaggcggagcttggcttcataggatttatattccttctttagagtttggagggagataatctgagaaacggttttaattccatgcttgtttaaaagctttctataaaactgttctgtcttttcaggagttgaattgggttcatccttcgtaaataaacagatatcttctgaatctgatcgaatactatgaggcaaggtcaatctgaccctcagttctttacttggaattttccataataccaccattaaaaataaactttcattctcattcaaaagcaacccataattgtttttcctggacttgcaatgcgtcaagagagcgtccactgcctttctaacctgttctttatccagctgcttccgtgctgtcggggccgctggagtcgaggtggaggttccagtagcggctgcagaagacagcgaggccgaggccgaatcctccatcttgtttccacctcgtgaagaggcgcgtgtgcaaccccactgctggcttctggtgcgcacccacgcgtccgcggacgcgtgggtcgactccct

SEQ ID NO: 22697 - DNA, 1077 bp, Homo sapiens
  misc_feature 1, 2, 3, 4, 5, 6, 1067, 1068, 1069, 1070, 1071, 1072, 1073,1074, 1075, 1076, 1077: n = A,T,C or G
nnnnnngatgctctatatgttaagtagtaggagaaagatattaaaaagatgtctgtccccagtaaatttctaatctagcaatcgaggcaagtgaaagaaatactaggaaaccaccaggtaatgcatctgcaaaagctaaaatgacattgcacctactgtggcagctaagagggattaggagaggaaagacacacgctttgatataggattatcaaattttctttcttgggaattttcttgacaggcttcatggaaaggcagggcataaggtgggctttggtagagagcaaatttgtgagtttcaggaaacagtatttcagctgggtaacaagagcccagactcatggaaatggctgaaagtgttgctctgaaagggaagagaagggaagcagggatccttctgcccatgcctagagacctggcttatccttgcatgagtgcaggcacatggtgaaccactcagtgtgacttcacggtcaagcaagagagtgccttcaggtgggatttgcttcactctgacattaccagcagtacaggctgatgtcagtgtccctgtgcataaggttccttgtgacaccattacagagtcctaagcctccattagtcacttgaggcacttctaagtacaacagttttttaaaagatttcactgacatttgcaacaatttttttctaatttcttttggtgccattttagtaacttaacaattgctttaatagacaaaactcaatcatgcatgatcaatcacaggtgagaaaatagaggcgtgcttactaatggcagcaaaaggcttctgtgggggtgtgcgggatggaacagctagctagctagaaaggggcttctttatagagggactccagtgtcaggcaggggcactgaaatctaggggtcaccaagggccacagcacaggggactgagggagaatccagtggctggaactctcctcaccagtcacctgccttcattgttaaacctcacagtattttcaggccaccatgccacaaaggaaaatgtactgggtagaggcaggaggcccgcgttaattaattctagaagacttccgannnnnnnnnnn

SEQ ID NO: 22698 - DNA, 400 bp, Homo sapiens
  misc_feature 400: n = A,T,C or G
ggcggccgaggtactaaaattgtgttgggagcagggatttggaaatttctgagagatgtgtagttaatttagtaattctgtttcatgagatatgatctgttatgctagtggtttaataggcttgctatgtaagtagaacgtggctcaactagatatctttatatgtatgggcattactcttagtgatatttgtttcctgtcctttgttgctcatgctgtttaagtgcaggccgagacccagcctctttgtaagtaccaaaatgatgcaagaatgataagtaaatgtgtaaataatttgcagaggagcgttttagggtaggaatggcgattgctaaaaggtaaatttaataaaaaggtgcttcctttcctcaaatagtttcgcacccctcatcggatcatn

SEQ ID NO: 22699 - DNA, 619 bp, Homo sapiens; identical to SEQ ID NO: 20381

SEQ ID NO: 22700 - DNA, 573 bp, Homo sapiens; identical to SEQ ID NO: 20133

SEQ ID NO: 22701 - DNA, 396 bp, Homo sapiens; identical to SEQ ID NO: 20826

SEQ ID NO: 22702 - DNA, 1038 bp, Homo sapiens
gccgctttttttttttttttttaggtattataaggcaaatttgactggtatgtgatatgtcatagtgtatatgctccatacttttagtctttttcatgtttctatacttttttgtctatgagtcagatatttatttcaatgacaaatattttctctaaaataagatatactcaaataattctttccaaagatatcactatcatgctaacagaatatctgattcatttattgtttctttcaaattttatccagcagtttagtatcatgttgtcatttataagatatgtgtaaatatattatgtttaagattttatagaaattctagttgactgaaatgttttgaaaatcgccttttatctaagaaattcaaatgcatcacagtcattcacattagggctctggaagataataaagcgggcctaaaatagaaggcttttatgtattttgctctcgtctttatattttatatctcatagaggacaagagggaacaacaaagccatagaatttttttaaacttttgttttttttcttttcgttttggttcaacatttcttatctgctttctgtcataggaagaacacattgagtgtagtattggtaggatccttcagcaccctgcttctgttatgcaagctcaatgggaaaattcctctctccccgccccttggcagacagagctcatgatggtagagttttgaatgaagatgtggtatgctctggtaatgagcatccaactgctgtgtggaatgttagtgtcttggcgagaatgttcataatacctaacttccagaatccctttgggcctcacacattttccagaactacctcccaccaatgtgcggactttttattctaccggtaatttcctttcttgcttgtgacagccagttgtttctgccgcttgccccaagggccctatgatcatcaacctgcacctgtgagaagcctgctaatgcagcattttggaaatttgaatgacttgctttgggtaggtcatatatctagctcattcttgatggaatgaagaatcccgcgt

SEQ ID NO: 22703 - DNA, 386 bp, Homo sapiens; identical to SEQ ID NO: 21664

SEQ ID NO: 22704 - DNA, 531 bp, Homo sapiens
acaccaaagtctttatctgacaggagctgagccagcgatttttcaaggcaagacagtgaccagctgaactcctgagataatgagtatatcatttctccttggcaaaggttatggaattaaagagaataaataacttagttcatacttcctccctcaaagttaaaagatattccctttgcagcgaaaaatggagctttgaggctccttcgagaaacgctccttggggttgtagaaaggaggaagaggttagcatgattttaaagcaactggcatctctgcagctaaccaagttggagacattagggcttcttgtggccattaacttttgtgtatctcacatctccttcagaacttacgctggaaaaactccaacagcttcatatggacagatggacttcaaatgctgtttgtattccagagactaggtaaggaccagagcaaggtcaggcctctctcaggtcccacatgtgtctctgtcagtgagggccttgatgctggcttcccagacctgtcccagctggcttgggatgg

SEQ ID NO: 22705 - DNA, 1211 bp, Homo sapiens; identical to SEQ ID NO: 20419
  misc_feature 1207, 1208, 1209, 1210, 1211: n = A,T,C or G

SEQ ID NO: 22706 - DNA, 930 bp, Homo sapiens
  misc_feature 1, 2, 3, 4, 5, 6: n = A,T,C or G
nnnnnncaatctggaaagaactttattatttctcataaaagcttaggggcaacattaagtacattttcaaaaaaatcttgagagcacagactcataattttgaagctcaaataagacttcagaggtatataaagagcactggactaagagtcaagataccttggctcaaggtacaactttgctatttattagctggtccttgacatgaccaggttagcaaggtagaaagattacaaaggttggcatgaagaaggtaggcttgtatgagtgatggtggatgataacaaatctggggaaatgaaatgaactacagacaggacacatgcgatgtgcttcagagtatgcagcttttccaatcaaggaaagcttcgtgcaggaggccaaacagaacctgaacgctgcagtatgacctcagggactcacatcactttctgaaatatctaacaaaaatcgcatttctgctgttgcactctgaattcctagaacttgtgcgtgaaccatttcactgcattcattttccccatgttattctttaaccagccttctttcttgatcacattcctagatctgagatgttttcctttcagtcttttcggcataagacctaattacatagctagttgtccagtaatgtctgggaagagaaaaaccttaagtttgtcatctctcagtaggacaccccggctaaagccttctggacacagcaaggatattgtcttctctctcttataatcctgttgtatcttccacacatagcataatcagctataaagttttccaattcttcaaaataattactaccacatttctctgagattttccaagatttcctcaaaattgggaaagtattgattcagctcagtattgattcagtctagtattgattcagcttcacttatcactttcagtggatgggtggtcttcacatgt

SEQ ID NO: 22707 - DNA, 1380 bp, Homo sapiens; identical to SEQ ID NO: 20118
  misc_feature 1380: n = A,T,C or G

SEQ ID NO: 22708 - DNA, 1811 bp, Homo sapiens; identical to SEQ ID NO: 22429
  misc_feature 1, 2, 3, 4, 5, 55, 56, 57, 58, 59, 60, 61, 62, 63, 64, 65,66, 67, 68, 69, 70, 71, 72, 73, 74, 75, 76, 77, 78, 79,80, 81, 90, 1811: n = A,T,C or G

SEQ ID NO: 22709 - DNA, 1052 bp, Homo sapiens
  misc_feature 1, 2, 3, 4, 1050, 1051, 1052: n = A,T,C or G
nnnnagttggaaaaagcacatttttttcctccacatttaaaaatgactagaaggtgagagagaaagagagaaagctcacctgcagccggtgaagtcacgcttttgcattccgtttgtaggacaagttgtcagtgtgcgatgatttccataggctttgaaatggggtagcagtttaaacatatcaaatgcttaatgaagtgaggccccatctcatcggtattcagtgtggcactaacattacatacgctaatcctgaaacaataagctataaggagagcctcgctttctgggtttgaaatgaatggagcagtctgaattcttccagttttatctcctgctttaacctggaatgatgccagcatgttgggttttaccctggagaattcatatcatgtgaaaaacttaaatcaggtctgtctgctggtacacgcagtcctaatccgttaaatatttctagctaacaatgcacgtggggctcttcagctctgcatacagtcatgttctgctaagtccatgcaaatataaccacttctgcctgcttttttgagggagggatcagtaatgcctacatggttttacccaaatccctcatgcgacatacaaggctcttggcatatcttaagcctgggtggtagctcctatccattctctaggacctggtctcttacttgtgagcttgggaaggtttcacatgagagaatggctcttccttcattggtcctttccacaggagaccaatcttgagcttactcacgtttatgaaaattgtaggcccaaagatccgggtgtggaagtgtaagggaatgcctggaacccatattccaggcttgtgtcgccaaattcacctctgcctggggcaccagactgcggggcccccaccagcaacacgcctgcgcaaaaacacttccccaaaacgctgtgtagaaaccgcttggcggcacacgagggaggtagcccaccggaagcgcgacaaggccagtcccacagcagagaacacagccagaccagagcgcaacacgacaaagtggcggccgcaacgacccgcaccannn

SEQ ID NO: 22710 - DNA, 418 bp, Homo sapiens
  misc_feature 1, 2, 413, 414, 415, 416, 417, 418: n = A,T,C or G
nnggccaggctggtctcaaactcttgacctcaagtgatccacccgcctcaacctcccaaagtgttgggattacaggcgtgcacgcacgcccagcctaaaaaaacacatttcaaatactcaataattatcacatgtggctagtggctatcataccggcacagatctcaacattattttaaagtcttaaataaactgatggagaaagatacctcatatgagagaaacacttaaaagacaactactgaaatgtaaatgaaatggtaacgacaggagtaaagaatctaagatggtaaggaaaaggacagcaaaccatttaattgaaatcgtcactgagaaatgaaagctctcctcgggtaagcaataggtttctggaaaatcaaagttattttccattataactgggccctcaaaannnnnn

SEQ ID NO: 22711 - DNA, 4339 bp, Homo sapiens
  misc_feature 1, 2, 3, 4, 4325, 4326, 4327, 4328, 4329, 4330, 4331, 4332,4333, 4334, 4335, 4336, 4337, 4338, 4339: n = A,T,C or G
nnnncgcggccgcgtcgacacggctgcgagaagacgacagaggggggaaggcggggtcggcgctgccgggtgaaatcgtaggacagtgaagatgctgctggaattgtccgaggagcataaggaacacctggccttcctgcctcaagtggacagcgcggtggtcgccgagtttgggcggattgctgtggaattcctgagacgcggcgcaaacccaaaaatctacgaaggcgccgccagaaaactcaatgtgagtagtgacactgtccagcatggtgtggaaggattaacgtatctcctcactgagagctcaaagctcatgatttctgaactggatttccaagactctgtttttgttctgggattctctgaagaattaaacaaattgttgcttcagctttatctggacaacagaaaagagatcagaacgattctgagtgaattggcaccaagccttcccagttatcataaccttgaatggcgactagatgtacagcttgcaagtagaagtctcaggcaacagattaaaccagcagtgactataaagctacaccttaatcaaaatggagatcacaacaccaaagttctgcagacagacccagccaccctgctccatttggttcaacaactggaacaagcattggaagagatgaagacaaaccactgtaggagagttgttcgcaacatcaagtagtaccagttttaaggttttaattcatttgaatcacttatgaattgatgatatacagcaattacttttcaaaattaattttttattaattcatgatgataaatacatagtattcctcagtatctattccaagatactgaggtcataatcagaagctaagctgggtgcagtggctcatgccagttatcccagcactttgggaggccgaggtgggcaaatcatgaggtcaggagattgagaccttcctggctaacatggtgaaaccccatctctactaaaaatataaaaaattagccaggtgtggtggcacgcatctatcagagtcccagctactcaggaggctgaggcaggagaatcgcttgaacctgggaggtggaggttgcagtgagctgagattgtgccactgcactccagcctgggtgacagagtgagactccatctcaaaaataataataataataataaagtaaaaataaaaataaaaaagtaatcagaagctaaagtaaagttcctttcctggtgctaactgtggtcttcttgacacattaagatgtattttgtattttaagagtctcatgctctaccgttggaactagccagatggccattattttgtattttaaatacataaataggattgaatcaactagaaatgaatctatatgttctgtatatatgaatgactatcttgtttttgctacttcttttgactgcttaattttattattttcatctttattgatcaaatttgaaaataaaattcacaatgtaatactactactatgcagaattttctaaacagttcagtatttttgacttttaaaaacaccccacagtgttaatagccacagaatattgaacatcaataggatttttaatgctatattgttataggcagtttattcatttttctttgtatatgaagatgataagtatcatattgcctaagtttgagtgatcatggttaattaattggcttaaatagtactcaaatttgtgtggtcgtatattgtattttatcaaggactaattcttccaccatacccaaagcatctaggagacactctgtcatttacatttacaaataatggatgcagagaaatataatcaattcttgattgtcctggatacaaattatagtcactttttataatttgaataaactatgatgagggaaggaaggccatgtttattacattataggcaactatcccttctcaaaacataacttgatttatgttttgttttattttttagtagggaaccaaaagcttttggtctgaaaaactcaggtgctgatttgtcaggtcagcctgagagagtgcagagatactgaggtcagcttagggagaagaattgtatggaagggtggaaatgagggttcagtcttaactatgtgtccaagaccttatcctgagagtcttcatggaataatctagaaagggctgtagaagcaatcaaactctaaactgcgctctagactttgtcaatactttgcttcgtaagaattagggattttcatatcagagtgataccatgttgcaatctctttagagaagagagagcctagcagggaataggctagtggaagaaaaacatacttgagatggttacccattggtccctgcaggcatctgggccacccttttcctgtaggtatatattctgccgttgtgaaacaactatattattagatgtcagcaaactataatcagaaataatttttaattatagtggcaacttgattaatgaagctctcatatacaacctcacaaacaaaaagaaactttattacgtgaaatagtagcatatgtcattgggtttaaaagcaacatgcctgcaaaacatatgataaaaaatacctctgtaagggtttttatttgtccaccttcgatggaaggtaaacatggctgatcccagccaagatgaaacaatagccctttgtctcctcagaacaacctatctccaactctttgtccactgttcttaccccaattaaaacaagaaagcatgtgctaatccttttttaatttttatcaacctgccttggcctcctttcactgtactccattattccttctgtgatgttctaccttcttcaccttttgagaccagggtgagttgggagcagtttgcctaccttcttttagaatctggggcttatcttttagtacaagccattgaataagcctcttccttttttttgctcaaacattccacatccttgtggattcccctgcattgtttgttttatataacatttgatatttgttgtagcttgtatatgaacataattttctttagaggtagtcactgttctctccagtatgacccaggtttcttgactctgagtaatgcaccttctataactatctaaatttctattgaagctttttggattatgagtatgctgacttttcacgattggctggtgcatgtttagacttaaatgtcatatccttcatgtctcaaagccaaaatagtaacatctcatctcagaacagagctgtgaccacatgccaatatatgtgtcacaaagtctacatatgttacattccttggaagtctccttaaatgtttcacaaaatgtcaacaagcttgttttgttattgatatttccgagattgggcacatttaagacagtaaacgggaaaggtggtgaagatgctataagaagatgctgtatcttgagaattgaaaaatgagaatctgacatggtttgaaaaatcatgaagggtatatataaaggatgcatgtgtaggagccattaaaattcataacagtatgtgccccttcagcgttttaatcttatgaagtggttaagagataagtcttcggagttggacaaaaggatttgaatttaggttctgtggattattatgggtccttgataaattctcaaagcctttttttttgttcatctctaaaataggaatataggattacctaccacattgactcgtaaggactatatgagaccatgtatatagaatgtttaacatagtaccaggctttacaaagaactcaataaatgtttaccattattgaaatagttttgccgactggggatctccttattttacagcctggaattagggccggtaccctctgttaaagaaactgggaaaaaaatgccaactggttgtttctgggtggcggaattatggctgtttcttttcttttttaatttctatagtaagtttgaataactttcataacatttaggaaaaaatattaaaggaaagaaaaaagatcagggaatttaaatatatttttagtagatatttttatccaaacttaattcttagaatgataaacacatagtttaccagaaaactcagctgttcaaaactactcagtccccaaaggactcaggtaaacaggctgagggttttatatatagagcgctctagagtttcctttttctgtcatttttttctccatgttagtgaaaaaaacatgggaatcttaagacattaagccgtttctccttttctaggtaatattacttctaaatggagaattgtttgtgttgtttttcatctcaaatggaaacagtatttctttgaagtttttcacatcccttatgatcaggaagttctgtcagctgctatattaaagtcctcctgctataacnnnnnnnnnnnnnnn

SEQ ID NO: 22712 - DNA, 388 bp, Homo sapiens
acgcgggggggcatcacggacctaccaatatgtgatgtcacccctggtggcccagctgtgtcatggagaaactccagctgggcccagagattctgcagcgggaaaatccaaggcttatttatgccaggctgagtggatttggccagtcaggaagcttctgccggttagctggccacgatatcaactatttggctttgtcagaagtggtgagaatccgtatgccccgctgaatctcctggctgactttgctggtggtggccttatgtgtgcactgggcattataatggctctttttgaccgcacacgcactggcaagggtcaggtcattgatgcaaatatggtggaaggaacagcatatttaagttcttttctgtggaaaactcagaaa

SEQ ID NO: 22713 - DNA, 1211 bp, Homo sapiens; identical to SEQ ID NO: 20419
  misc_feature 1207, 1208, 1209, 1210, 1211: n = A,T,C or G

SEQ ID NO: 22714 - DNA, 817 bp, Homo sapiens
  misc_feature 1, 2, 3, 814, 815, 816, 817: n = A,T,C or G
nnnctctcttgttcgttgtcttcactgtcgttgtcgtctgctgtgttctgtcgctgctgctgctgtcctgccacgccggccggcgggcgtaagttggtattttcgtcgctcgccttgggcgtccccgtgtggtatggtcgccccggtttgtgtgtccttccctggtactcccttcttggtggtttgttccgaaacgctccgcgttgtcccgccccggccggttttttttttgtggtgagaaccccagccccctgtgtctcctagtacaccagagcttctcctgtgggagccacgcctgtatggacaagtggtcgacgcgtttaacttcttggggcccgccgcgacccccaccaaagggtgttagaaaaaccttttctctggcccaggcgcccccccaatttttgtgtgtttttgtcctgttttttttagtaaagacatgggtactttatgtttccaaacacgcatatgttgcacaagacacatagagaaaatataagtttggtgggggtgctgactaaacttcccaagtcacagacgttttatgtgacagattggagcacggctttgttatgcatgtagagaaccccaactgatttattaaacaggatagaaacaggctgtctgggtgaaatggttctgagaaccatccaattcacctgtcagatgctgatagactagctcttcagatgtttttctaccagttcagagatgggttaatgactagttccaatcccgcgtacccagaaaataagatagggggttccaaaatgaagaatcgctccttttgcaaaccttatggtaacaaatataatannnn

SEQ ID NO: 22715 - DNA, 963 bp, Homo sapiens
  misc_feature 1, 2: n = A,T,C or G
nnacattaatctacttatctggaatcactttgcctctaaaggccagagaaaaatcacagcttccttgtcggaggggaaaaggacaggtgatctggggaaaacgcagctacacctggagcaaggtctcttcccggcttggcaatctcagctgtgccggcgctacgggacccgagccgtcccagaaaccaaagggcaggcacggcagcaaacgcctgaggtaattttcatctttctttttatttttagtagaataatgcagactgaaagtgataagcataaagtcgctgaggcaactagatatgcttcgattttattttacattttcctattctaatcgtgtgcaggatcatttgttatgaagtctgaggagggggagaattaatgtacctgaaataaacttgaaactaaaacgatcatttgtggaggaaaatacaggattttccaaaacagtttcagagctacctttgcagatgggtaggcttttcacccacccacagaaagaagagtcaacggggctgagacaggacagggatgggtttcaggagcacaattaaaagtttttcgtatcttaaagaaaatatctatgttcagagagaaaattgagaagataagttactgcccagttcctctggtctttgacacttagaccacataagaatgttccatggtagaagggttgggacagagaatcttaggaatcctaagagagaatcaatactgctcccctaccccaggtttttcttgttttctttacaatagtatccttatttcccattacattttagtgttagtcataccaattacttgttacaccatacttctacatttgcagttattaaaggatctgcagaaaacattttaaagtcaaaatgattatagaggcaactaaaataagaaagcaaaaaaatatgtgaaactgacatacacataaccagaacaccgcaccccttagatacttaatgt

SEQ ID NO: 22716 - DNA, 2685 bp, Homo sapiens
  misc_feature 2576, 2680, 2681, 2682, 2683, 2684, 2685: n = A,T,C or G
actgctctccagcctgggcaatagagtcggactcttgtctaaaaaaaaaaaagaaaagaaaagaaatgacctgctaataaagtaatagaatggaaaaaacaaaacaaaacgaaacaaaaaaaaaacaaaaaagcgaagcataaagtatctagacaaggtgttatctggatttctggtactgttgaacataattagatgtcacatgatcagttacaatcaaaatctctttttgggtgattgagttttgctttagaatgctaatatcatggcattttcatattctaggttatctgtataagcagtaagatgccaaatatgtcagatagacatgttttggataaatcatggctgcttgaaaaagaaatccaactccagtctcccaaaaagcaaacacacaacccaacccattaatttacatttggtttgtctgaagtgatttgaactgtaattctgtaagtggaaatagaggtttgtgcaaaagtaatcacagtttttaattggcattttaatggcaaaaactgcaattacgttcacaccaacctatacatacttaaattgttttcttttgatacaagtgattttataaaatacaccactggccctccatatttgttgattccacatcagtgaattcaacgaactttggactgaaagtatttgagaaaaaatattgcatctgtattgaaatgtacagacttttttccttgttatttcctaaacaatacagtataacaactatttacataatattcacattgtagagtattaggtattataaataatccagagatgagttaaagtgtatgggaggatgtgcatagtttatatgcaaacagccatttttatatcaagggcttgagcagcaagtgtggtcctggaaccaatctcccatggatattgagggagagaactgtatatgataccattataagctgagggatggagagatgacacttgtcatcttaatagtttaaacccttcctactatttttttagtgagaggtaagtaagcttgaatcattccaggccaatattcttttactctcaattccttctattaatataccaccttccatcccaccaatcccctcaaaattatacagtgatatccaaatgcctaatggttcaaggagaggagagaaacaacaaaatactctcgttgttgttcttggatccaaatcattatcttgctgcattttccctatcatagcacactcccaatttctttcatgagtcattggtaatgagagttctgagtacttgttaatcttgctgtacttgtcaatttaaggcagtatcgttttcaaaacaaagcttgattatcattgacctgaactgagagttttttatttagtgtttaataatttcatttaacgacttaagttcttaaaaatttaaagtttgattatactttggaggatcacagattgttccataaccttaagcctccaactatttccgactttcactagaggatcatatatgcttcatggaaatgagtttattaaagctgtctagagtcacatatggttttttctaaatgaattgcttgcttaggcttacttgctttttaggttacctgttgcactagattgaggcaaataaaaatatactaaagtgaaaacatggataatagttgatataattttgagattgggtaaataatgttttaaaaagttgcaatacaaatgctgcttcaaaaagtttttgttatggccaggcacggtggctcatgcctgtaatcccagcactttgggaggccgaggcaggtggatcaagaggtcaggagttcaacaccagcctgaccaacatggtgaaaccctgtctgtactaaaaatgcaaaaattagccaggcatggtggcacatgcttgtaatcccagctactcaggaggctgaggcaggagaatcacttgaacccgggaggcggaggttgcagtgagccaagatcgtgccactgcactccagcctgggcgacagagaccatctaaaaaaaaaaaaaaaagagtttctgttagcatctgtaattgtgtagatttaagtgtaaagtgatttgaaatctgaaatctttgtaagattattcagctcttgtgctggtctgttcgtgatatactttcaggtaagtatcagaaatccatttaataacctttcctgtgtgatttatttcacttggttatatttatttctgatggtttatttctgatggttatagattttgtaaatggcacctttatgatttcttttattaacagaattctgcttggtcagaatcgtgatggcattgtgttcagcactgatgactattttcaccatcaagatgggtacaggtataatgttaatcaacttggtgatgcccatgactggaaccagaacagaggtttgttttgggctaagtgtcccaggatagaatatttggctaggagtcaaaagacctagattttattttcagcttaggtttttaccagctgaatgactgtaggcaagccgtttaaatagctttgagacctaatttctccatctgttagaggtggtgataattatacttgccctacctgatcagggtttttgtgaaaagcanagaatttagataaaacgctttgtaaactgtaaatagttatcagtttagctggttattcccccttggaattttgagtcttatttatcactgagagttccaggacnnnnnn

SEQ ID NO: 22717 - DNA, 3807 bp, Homo sapiens; identical to SEQ ID NO: 21505
  misc_feature 1, 3805, 3806, 3807: n = A,T,C or G

SEQ ID NO: 22718 - DNA, 2367 bp, Homo sapiens
  misc_feature 1, 8, 9, 2339, 2340, 2341, 2342, 2343, 2344, 2345, 2346,2347, 2348, 2349, 2350, 2351, 2352, 2353, 2354, 2355, 2356,2357, 2358, 2359, 2360, 2361, 2362, 2363, 2364, 2365, 2366,2367: n = A,T,C or G
natagacnncccttggtcacgggccgcgcgccattgtgttggtacccgggaattcggccattatggccgggggtggcgccagggatttgaaccgcgctgacgaagtttggtgatccatcttccgagtatcgccgggatttcgaatcgcgatgatcatcccctctctagaggagctggactccctcaagtacagtgacctgcagaacttagccaagagtctgggtctccgggccaacctgagggcaaccaagttgttaaaagccttgaaaggctacattaaacatgaggcaagaaaaggaaatgagaatcaggatgaaagtcaaacttctgcatcctcttgtgatgagactgagatacagatcagcaaccaggaagaagctgagagacagccacttggccatgtcaccaaaacaaggagaaggtgcaagactgtccgtgtggaccctgactcacagcagaatcattcagagataaaaataagtaatcccactgaattccagaatcatgaaaagcaggaaagccaggatctcagagctactgcaaaagttccttctccaccagacgagcaccaagaagctgagaatgctgtttcctcaggtaacagagattcaaaggtaccttcagaaggaaagaaatctctctacacagatgagtcatccaaacctggaaaaaataaaagaactgcaatcactactccaaactttaagaagcttcatgaagctcattttaaggaaatggagtccattgatcaatatattgagagaaaaaagaaacattttgaagaacacaattccatgaatgaactgaagcagcagcccatcaataagggaggggtcaggactccagtacctccaagaggaagactctctgtggcttctactcccatcagccaacgacgctcgcaaggccggtcttgtggccctgcaagtcagagtaccttgggtctgaaggggtcactcaagcgctctgctatctctgcagctaaaacgggtgtcaggttttcagctgctactaaagataatgagcataagcgttcactgaccaagactccagccagaaagtctgcacatgtgaccgtgtctgggggcaccccaaaaggcgaggctgtgcttgggacacacaaattaaagaccatcacggggaattctgctgctgttattaccccattcaagttgacaactgaggcaacgcagactccagtctccaataagaaaccagtgtttgatcttaaagcaagtttgtctcgtcccctcaactatgaaccacacaaaggaaagctaaaaccatgggggcaatctaaagaaaataattatctaaatcaacatgtcaacagaattaacttctacaagaaaacttacaaacaaccccatctccagacaaaggaagagcaacggaagaaacgcgagcaagaacgaaaggagaagaaagcaaaggttttgggaatgcgaaggggcctcattttggctgaagattaataattttttaacatcttgtaaatattcctgtattctcaacttttttccttttgtaaatttttttttttttgctgtcatccccactttagtcacgagatctttttctgctaactgttcatagtctgtgtagtgtccatgggttcttcatgtgctatgatctctgaaaagacgttatcaccttaaagctcaaattctttgggatggtttttacttaagtccattaacaattcaggtttctaacgagacccatcctaaaattctgtttctagatttttaatgtcaagttcccaagttccccctgctggttctaatattaacagaactgcagtcttctgctagccaatagcatttacctgatggcagctagttatgcaagcttcaggagaatttgaacaataacaagaatagggtaagctgggatagaaaggccacctcttcactctctatagaatatagtaacctttatgaaacggggccatatagtttggttatgacatcaatattttacctaggtgaaattgtttaggcttatgtaccttcgttcaaatatcctcatgtaattgccatctgtcactcactatattcacaaaaataaaactctacaactcattctaacattgcttacttaaaagctacatagccctatcgaaatgcgaggattaatgctttaatgcttttagagacagggtctcactgtgttgcccaggctggtctcaaactccaccaaatgtacttcttattcattttatggaaaagactaggctttgcttagtatcatgtccatgtttccttcacctcagtggagcttctgagttttatactgctcaagatcgtcataaataaaattttttctcattgtcaaannnnnnnnnnnnnnnnnnnnnnnnnnnnn

SEQ ID NO: 22719 - DNA, 8543 bp, Homo sapiens
  misc_feature 8542, 8543: n = A,T,C or G
cgcgtccgcatgctcacggcccctggagaccgtcgtgctggcgagccgtgctccgtagctccccggtccgcctcggcagcggtcagagtcgcctacaggagttgagccgcccgcgccagaaggttttggcgaagctcttggagaggcgtcgagcacagtagggcggcgggggtgcgttgagcgctcgggggtcaggcagtcggccgggatcgccgctggggagcgtttccgaggcgaggaggaggaggaggagatgctgctcctcttctccccctccccaggctccttctccagctccttcagcccacgcccgcagccgcttgtgggagaagaggtggtggctctcggcgcccgcggcggctgccggcggcccgccccgacgccgcgtccctgcagccctcgcccggcgctccagtagcaggacccggtctcgggaccagccggtaatatgcacgtgtcactagctgaggccctggaggttcggggtggaccacttcaggaggaagaaatatgggctgtattaaatcaaagtgctgaaagtctccaagaattattcagaaaagtaagcctagctgatcctgctgcccttggcttcatcatttctccatggtctctgctgttgctgccatctggtagtgtgtcatttacagatgaaaatatttccaatcaggatcttcgagcattcactgcaccagaggttcttcaaaatcagtcactaacttctctctcagatgttgaaaagatccacatttattctcttggaatgacactgtattggggggctgattatgaagtgcctcagagccaacctattaagcttggagatcatctcaacagcatactgcttggaatgtgtgaggatgttatttacgctcgagtttctgttcggactgtgctggatgcttgcagtgcccacattaggaatagcaattgtgcaccctcattttcctacgtgaaacacttggtaaaactggttctgggaaatctttctgggacagatcagctttcctgtaacagtgaacaaaagcctgatcgaagccaggctattcgagatcgattgcgaggaaaaggattaccaacaggaagaagctctacttctgatgtactagacatacaaaagcctccactctctcatcagacctttcttaacaaagggcttagtaaatctatgggatttctgtccatcaaagatacacaagatgagaattatttcaaggacattttatcagataattctggacgtgaagattctgaaaatacattctccccttaccagttcaaaactagtggcccagaaaaaaaacccatccctggcattgatgtgctttctaagaagaagatctgggcttcatccatggacttgctttgtacagctgacagagacttctcttcaggagagactgccacatatcgtcgttgtcaccctgaggcagtaacagtgcggacttcaactactcctagaaaaaaggaggcaagatactcagatggaagtatagccttggatatctttggccctcagaaaatggatccaatatatcacactcgagaattgcccacctcctcagcaatatcaagtgctttggaccgaatccgagagagacaaaagaaacttcaggttctgagggaagccatgaatgtagaagaaccagttcgaagatacaaaacttatcatggtgatgtctttagtacctccagtgaaagtccatctattatttcctctgaatcagatttcagacaagtgagaagaagtgaagcctcaaagaggtttgaatccagcagtggtctcccaggggtagatgaaaccttaagtcaaggccagtcacagagaccgagcagacaatatgaaacaccctttgaaggcaacttaattaatcaagagatcatgctaaaacggcaagaggaagaactgatgcagctacaagccaaaatggcccttagacagtctcggttgagcctatatccaggagacacaatcaaagcgtccatgcttgacatcaccagggatccgttaagagaaattgccctagaaacagccatgactcaaagaaaactgaggaatttctttggccctgagtttgtgaaaatgacaattgaaccatttatatctttggatttgccacggtctattcttactaagaaagggaagaatgaggataaccgaaggaaagtaaacataatgcttctgaacgggcaaagactggaactgacctgtgataccaaaactatatgtaaagatgtgtttgatatggttgtggcacatattggcttagtagagcatcatttgtttgctttagctaccctcaaagataatgaatatttctttgttgatcctgacttaaaattaaccaaagtggccccagagggatggaaagaagaaccaaagaaaaagaccaaagccactgttaattttactttgtttttcagaattaaattttttatggatgatgttagtctaatacaacatactctgacgtgtcatcagtattaccttcagcttcgaaaagatattttggaggaaaggatgcactgtgatgatgagacttccttattgctggcatccttggctctccaggctgagtatggagattatcaaccagaggttcatggtgtgtcttactttagaatggagcactatttgcccgccagagtgatggagaaacttgatttatcctatatcaaagaagagttacccaaattgcataatacctatgtgggagcttctgaaaaagagacagagttagaatttttaaaggtctgccaaagactgacagaatatggagttcattttcaccgagtgcaccctgagaagaagtcacaaacaggaatattgcttggagtctgttctaaaggtgtccttgtgtttgaagttcacaatggagtgcgcacattggtccttcgctttccatggagggaaaccaagaaaatatctttttctaaaaagaaaatcacattgcaaaatacatcagatggaataaaacatggcttccagacagacaacagtaagatatgccagtacctgctgcacctctgctcttaccagcataagttccagctacagatgagagcaagacagagcaaccaagatgcccaagatattgagagagcttcgtttaggagcctgaatctccaagcagagtctgttagaggatttaatatgggacgagcaatcagcactggcagtctggccagcagcaccctcaacaaacttgctgttcgacctttatcagttcaagctgagattctgaagaggctatcctgctcagagctgtcgctttaccagccattgcaaaacagttcaaaagagaagaatgacaaagcttcatgggaggaaaagcctagagagatgagtaaatcataccatgatctcagtcaggcctctctctatccacatcggaaaaatgtcattgttaacatggaacccccaccacaaaccgttgcagagttggtgggaaaaccttctcaccagatgtcaagatctgatgcagaatctttggcaggagtgacaaaacttaataattcaaagtctgttgcgagtttaaatagaagtcctgaaaggaggaaacatgaatcagactcctcatccattgaagaccctgggcaagcatatgttctagatgtgctacacaaaagatggagcatagtatcttcaccagaaagggagatcaccttagtgaacctgaaaaaagatgcaaagtatggcttgggatttcaaattattggtggggagaagatgggaagactggacctaggcatatttatcagttcagttgcccctggaggaccagctgacttggatggatgcttgaagccaggagaccgtttgatatctgtgaatagtgtgagtctggagggagtcagccaccatgctgcaattgaaattttgcaaaatgcacctgaagatgtgacacttgttatctctcagccaaaagaaaagatatccaaagtgccttctactcctgtgcatctcaccaatgagatgaaaaactacatgaagaaatcttcctacatgcaagacagtgctatagattcttcttccaaggatcaccactggtcacgtggtaccctgaggcacatctcggagaactcctttgggccatctgggggcctgcgggaaggaagcctgagttctcaagattccaggactgagagtgccagcttgtctcaaagccaggtcaatggtttctttgccagccatttaggtgaccaaacctggcaggaatcacagcatggcagcccttccccatctgtaatatccaaagccaccgagaaagagactttcactgatagtaaccaaagcaaaactaaaaagccaggcatttctgatgtaactgattactcagaccgtggagattcagacatggatgaagccacttactccagcagtcaggatcatcaaacaccaaaacaggaatcttcctcttcagtgaatacatccaacaagatgaattttaaaactttttcttcatcacctcctaagcctggagatatctttgaggttgaactggctaaaaatgataacagcttggggataagtgtcacgggaggtgtgaatacgagtgtcagacatggtggcatttatgtgaaagctgttattccccagggagcagcagagtctgatggtagaattcacaaaggtgatcgcgtcctagctgtcaatggagttagtctagaaggagccacccataagcaagctgtggaaacactgagaaatacaggacaggtggttcatctgttattagaaaagggacaatctccaacatctaaagaacatgtcccggtaaccccacagtgtaccctttcagatcagaatgcccaaggtcaaggcccagaaaaagtgaagaaaacaactcaggtcaaagactacagctttgtcactgaagaaaatacatttgaggtaaaattatttaaaaatagctcaggtctaggattcagtttttctcgagaagataatcttataccggagcaaattaatgccagcatagtaagggttaaaaagctctttcctggacagccagcagcagaaagtggaaaaattgatgtaggagatgttatcttgaaagtgaatggagcctctttgaaaggactatctcagcaggaagtcatatctgctctcaggggaactgctccagaagtattcttgcttctctgcagacctccacctggtgtgctaccggaaattgatactgcgcttttgaccccacttcagtctccagcacaagtacttccaaacagcagtaaagactcttctcagccatcatgtgtggagcaaagcaccagctcagatgaaaatgaaatgtcagacaaaagcaaaaaacagtgcaagtccccatccagaagagacagttacagtgacagcagtgggagtggagaagatgacttagtgacagctccagcaaacatatcaaattcgacctggagttcagctttgcatcagactctaagcaacatggtatcacaggcacagagtcatcatgaagcacccaagagtcaagaagataccatttgtaccatgttttactatcctcagaaaattcccaataaaccagagtttgaggacagtaatccttcccctctaccaccggatatggctcctgggcagagttatcaaccccaatcagaatctgcttcctctagttcgatggataagtatcatatacatcacatttctgaaccaactagacaagaaaactggacacctttgaaaaatgacttggaaaatcaccttgaagactttgaactggaagtagaactcctcattaccctaattaaatcagaaaaaggaagcctgggttttacagtaaccaaaggcaatcagagaattggttgttatgttcatgatgtcatacaggatccagccaaaagtgatggaaggctaaaacctggggaccggctcataaaggttaatgatacagatgttactaatatgactcatacagatgcagttaatctgctccgggctgcatccaaaacagtcagattagttattggacgagttctagaattacccagaataccaatgttgcctcatttgctaccggacataacactaacgtgcaacaaagaggagttgggtttttccttatgtggaggtcatgacagcctttatcaagtggtatatattagtgatattaatccaaggtccgtcgcagccattgagggtaatctccagctattagatgtcatccattatgtgaacggagtcagcacacaaggaatgaccttggaggaagttaacagagcattagacatgtcacttccttcattggtattgaaagcaacaagaaatgatcttccagtggtccccagctcaaagaggtctgctgtttcagctccaaagtcaaccaaaggcaatggttcctacagtgtggggtcttgcagccagcctgccctcactcctaatgattcattctccacggttgctggggaagaaataaatgaaatatcgtaccccaaaggaaaatgttctacttatcagataaagggatcaccaaacttgactctgcccaaagaatcttatatacaagaagatgacatttatgatgattcccaagaagctgaagttatccagtctctgctggatgttgtggatgaggaagcccagaatcttttaaacgaaaataatgcagcaggatactcctgtggtccaggtacattaaagatgaatgggaagttatcagaagagagaacagaagatacagactgcgatggttcacctttacctgagtattttactgaggccaccaaaatgaatggctgtgaagaatattgtgaagaaaaagtaaaaagtgaaagcttaattcagaagccacaagaaaagaagactgatgatgatgaaataacatggggaaatgatgagttgccaatagagagaacaaaccatgaagattctgataaagatcattcctttctgacaaacgatgagctcgctgtactccctgtcgtcaaagtgcttccctctggtaaatacacgggtgccaacttaaaatcagtcattcgagtcctgcggggtttgctagatcaaggaattccttctaaggagctggagaatcttcaagaattaaaacctttggatcagtgtctaattgggcaaactaaggaaaacagaaggaagaacagatataaaaatatacttccctatgatgctacaagagtgcctcttggagatgaaggtggctatatcaatgccagcttcattaagataccagttgggaaagaagagttcgtttacattgcctgccaaggaccactgcctacaactgttggagacttctggcagatgatttgggagcaaaaatccacagtgatagccatgatgactcaagaagtagaaggagaaaaaatcaaatgccagcgctattggcccaacatcctaggcaaaacaacaatggtcagcaacagacttcgactggctcttgtgagaatgcagcagctgaagggctttgtggtgagggcaatgacccttgaagatattcagaccagagaggtgcgccatatttctcatctgaatttcactgcctggccagaccatgatacaccttctcaaccagatgatctgcttacttttatctcctacatgagacacatccacagatcaggcccaatcattacgcactgcagtgctggcattggacgttcagggaccctgatttgcatagatgtggttctgggattaatcagtcaggatcttgattttgacatctctgatttggtgcgctgcatgagactacaaagacacggaatggttcagacagaggatcaatatattttctgctatcaagtcatcctttatgtcctgacacgtcttcaagcagaagaagagcaaaaacagcagcctcagcttctgaagtgacatgaaaagagcctctggatgcatttccatttctctccttaacctccagcagactcctgctctctatccaaaataaagatcacagagcagcaagttcatacaacatgcatgttctcctctatcttagaggggtattcttcttgaaaataaaaaatattgaaatgctgtatttttacagctactttaacctatgataattatttacaaaattttaacactaaccaaacaatgcagatcttagggatgattaaaggcagcatttgatgatagcagacattgttacaaggacatggtgagtctatttttaatgcaccaatcttgtttatagcaaaaatgttttccaatattttaataaagtagttattttataggggatacttgaaaccagtatttaagctttaaatgacagtaatattggcatagaaaaaagtagcaaatgtttactgtatcaatttctaatgtttactatatagaatttcctgtaatatatttatatactttttcatgaaaatggagttatcagttatctgtttgttactgcatcatctgtttgtaatcattatctcactttgtaaataaaaacacaccttaaaaccatgaacaagccaaaaaaaaaaaaaagtcgacgcggccgcgaatttagtagtagtagtcgacccgggaattccggaccggtacctgcaggcgtaccann

SEQ ID NO: 22720 - DNA, 492 bp, Homo sapiens
  misc_feature 491, 492: n = A,T,C or G
acgcggggagagcggcccagagttcgcaggtctggggctctcttcccagagagctcgtaggggaggacagtcaagggactcaagcgtctctcttgactccccttctctcgctgtgcagtggcggcgccgaggggtcgacgctcagggctaatctctatgagtcaccctcgaggccccgggtaatattgggtggatcacaagaactaatctttcatgatttggaaaccggaaggaaagaagcacttttgtagctgacttacctcaatgacatgaccagtgtctgagcctacaactgcgctatcttccctggatttttcttcaccttttccttactcatgagccaggtatgtgtttttagttccataaaaaagagccctagccaggcgtggtggctcacgcctgtagtctcagcactttgggaggctgtggcgggcagaccacttgagctcaggagtttgataccaagatgggcaacatggtgaaaccccgann

SEQ ID NO: 22721 - DNA, 620 bp, Homo sapiens
acgcggggatactaagccagggcagaatgcttgtgaagtagcaactaaagtggcagtgtttcttctgaaattctcaggcagtcagactgtcttaggcaaatcttgataaaatagcccttatccaggtttttatctaaggaatcccaagaagactggggaatggagagacagtcaagggttatgtcagaaaaggatgagtatcagtttcaacatcagggagcggtggagctgcttgtcttcaattttttgctcatccttaccattttgacaatctggttatttaaaaatcatcgattccgcttcttgcatgaaactggaggagcaatggtgtatggccttataatgggactaattttacgatatgctacagcaccaactgatattgaaagtggaactgtctatgactgtgtaaaactaactttcagtccatcaactctgctggttaatatcactgaccaagtttatgaatataaatacaaaagagaaataagtcagcacaacatcaatcctcatcaaggaaatgctatacttgaaaagatgacatttgatccagaaatcttcttcaatgttttactgccaccaattatatttcatgcaggatatagtctaaagaagagaca

SEQ ID NO: 22722 - DNA, 359 bp, Homo sapiens
  misc_feature 1, 353, 357, 358, 359: n = A,T,C or G
nagcatagtattttctttcttgtccagattagctaaattggattgttctatgctaaattcacttaatcactactctattatttttgaattttttagttctgtttttttcacttggttctttttttaaaaaaaacttctactacctttctgagacttctacttttttacttttttcaagaagctttataattacttgctaaagcatttttaccatgactgtttttaacttcttcaggataacccacaacatttggggtaatcttgaggggttggcctgggggtaactggtcttttctcatcccgcctttggggtttttccccaccaaatgggggattttccctgggtcctgaangaannn

SEQ ID NO: 22723 - DNA, 1138 bp, Homo sapiens
atgtgaaacagtacagtgttaggagagggaaagtgggaagttggatacgaggagtacctatcagcgtgttatggtaactacctgttatttgtttttgatgagatgcctggaggtagatacgtaaggattactaccaggagttagttcagggtgttcaagtgaaatccatgcgttgcgattgcgcgtgtggtttgactgcccctacaatggggaaaatgttctattccattatttggattggtagacgtgcgctgtacaaagtctttccgttgagcccctgctgtctgacatccgaggactggtctcgtcgaaatctgctgggagatgacaccacagactgttccttcattttcctgtatattctctgtactatgtcgattcgacagaacattcagaagattctcggccttgccccttcacgagccgccaccaagcaggcaggtggatttcttggcccaccacctccttctgggaagttctcttgaactcaagaactctttattttctatcattctttctagacacacacacatcagactggcaactgttttgtagcaagagccataggtagccttactacttgggcctctttctagttttgaattatttctaagccttttgggtatgattagagtgaaaatggcagccagcaaacttgatagtgcttttggtcctagatgatttttatcaaataagtggattgattagttaagttcaggtaatgtttatgtaatgaaaaacaaatagcatccttcttgtttcatttacataagtattttctgtgggaccgactctcaaggcactgtgtatgccctgcaagttggctgtctatgagcatttagagatttagaagaaaaatttagtttgtttaacccttgtaactgtttgttttgttgttgtttttttttcaagccaaatacatgacataagatcaataaagaggccaaatttttagctgttttatgtacaaggagagatctgtttcattttgttttgccgtatttctagatataagttttagcatgggccaggaaggactaaaataaaagtttttaaggtactgtactttttgccatacttgactcatatactcataatacagagttgtcgtgcgtagcaagtgaccgggtcctctaga

SEQ ID NO: 22724 - DNA, 356 bp, Homo sapiens
accatcctccaaaagaagtcaattttactgtataataacttttaaaaacaagtatacattttttttaaagatggagaggctaacaaactttgcaacctttccaggtaaggattcatgagacctgagcagccagccagccctgaaatggttggaacaagagaaagaagaagagctcgacagataccctgcctgggctggcagctagctgcaccacaagctggccagctgacagcgggcacatcccttcatcacccagtgcctttcttccctcttgtgaaaatggagatatgctgagaaggtttcttcagctcatccagagaaagcttcttcagctaactaggctgtagaaagggcct

SEQ ID NO: 22725 - DNA, 913 bp, Homo sapiens
  misc_feature 1, 2, 3, 4, 13, 16, 17, 18, 31, 37, 45, 51, 53, 59, 61, 64,66, 67, 73, 75, 80, 88, 91, 98, 100, 108, 111, 119, 121,124, 751, 752, 789, 790, 792, 794, 798, 803, 808, 814, 819,825, 827, 831, 838, 841, 846, 852, 854, 855, 856, 857: n = A,T,C or G
  misc_feature 858, 860, 862, 867, 868, 870, 874, 877, 882, 885, 886, 887,888, 896, 897, 898, 899, 900, 901, 902, 903, 904, 905, 906,907, 908, 909, 910, 911, 912, 913: n = A,T,C or G
nnnnaacaccaanttnnncataccatttccntaccantttcccangttccnanggcccntnccncnntacttncncaccntaaccacnttnacccccnangttacagncanttgtaacntntgnacctaggaaggcagacggctcgggacttgcccagcatcctcaagctggcaccataccagcgtgactagagccacctcccttggctccttgtccactgccctttgcatctcatgcgggtctccagaagaccccgctcctgctgtgcaggctcccacgcataccttagacactgctgtggtgttgggtggccacgtgacccacacaggccttttctagttcaccagttttctgcaaggatgctggttagggagtgtctgcaggaggagcaagtctgaaaccaaatctaggaaacataggaaacgagccaggcacagggctggtgggccatcagggaccaccctttgggttgatattttgcttaatctgcatcttttgagtaagatcatctggcagtagaagctgttctccaggtacatttctctagctcatgtacaaaaacatcctgaaggactttgtcaggtgccttgctaaaagccagatgtgttcggcacttccttggtctgaggttaattgcacacctacaggcactgggctcatgctttcaagtattttgtcctcactttagggtgagtgaaagatccccattataggagcacttgggagagatcatataaaagctgactcttnngtacatgcagtaatggggtatgatgtgtgtggtgtgnntnantccntcaangggtncttgtntggangtgttncntcancccttgnganccacnattgtntnnnnngncnacacnngnaganttngcganccnnnnaggggacnnnnnnnnnnnnnnnnnn

SEQ ID NO: 22726 - DNA, 1294 bp, Homo sapiens; identical to SEQ ID NO: 22613

SEQ ID NO: 22727 - DNA, 4444 bp, Homo sapiens
acaggtgtgcacctactgcaagaaatgaaagtgattgggaatgaagcaagataacagttattcacgtggaagatcgagaagtgtaaatatttaccaccaacagctcagttatattatggcaagttcatgaatgaaaaaaaggattttcaattctgaatacatatcctactattttaagacctatagatcatttgattctttctccccaattttggaatttccactcagctcaaaacacatttgaatcttttattaaggttgctttgaacctaatgaggcttaaaatattgctgcagcatatttagcaaagtttttctgactcataacagttttatgatttttctcttatcctcagttgctatacctgcctttcaggaactgccctcgttttcaagaacttgagagtgagactttgaaatcagaggaattccagaagaggctgcacccttataaggattttatagctaccttgggaaaactttcaggattacatggccaggacctttttggaatttggagtaaagtctacgaccctttatattgtgagagtgttcacaatttcactttaccctcctgggccactgaggacaccatgactaagttgagagaattgtcagaattgtccctcctgtccctctatggaattcacaagcagaaagagaaatctaggctccaagggggtgtcctggtcaatgaaatcctcaatcacatgaagagaacaactcagataccaagctacaaaaaactcatcatgtattctgcgcatgacactactgtgagtggcctacagatggcgctagatgtttacaacggactccttcctccctatgcttcttgccacttgacggaattgtactttgagaaggcgggagtactttgtggagatgtactaccggaatgagacgcagcacgagccgtatcccctcatgctacctggctgcagccccagctgtcctctggagaggtttgctgagctggttggccctgtgatccctcaagactggtccacggagtgtatgaccacaaacagccatcaaggtactgaggacagtacagattagtgtgcacagagatctctgtagaaagagtagctgccctttctcagggcagatgatgctttgagaacatactttggccattacccccagctttgaggaaaatgggctttggatgattattttatgttttagggacccccaacctcaggcaattcctacctcttcacctgaccctgcccccacttgccataaaacttagctaagttttgttttgtttttcagcgttaatgtaaaggggcagcagtgccaaaatataatcagagataaagcttaggtcaaagttcatagagttcccatgaactatatgactggccacacaggatcttttgtatttaaggattctgagattttgcttgagcaggattagataaggctgttctttaaatgtctgaaatggaacagatttcaaaaaaaaaccccacaatctagggtgggaacaaggaaggaaagatgtgaataggctgatgggcaaaaaaccaatttacccatcagttccagccttctctcaaggagaggcaaagaaaggagatacagtggagacatctggaaagttttctccactggaaaactgctactatctgtttttatatttctgttaaaatatatgaggctacagaactaaaaattaaaacctctttgtgtcccttggtcctggaacatttatgttccttttaaagaaacaaaaatcaaactttacagaaagatttgatgtatgtaatacatatagcagctcttgaagtatatatatcatagcaaataagtcatctgatgagaacaagctatttgggcacaacacatcaggaaagagagcaccacgtgatggagtttctctagaagctccagtgataagagatgttgactctaaagttgatttaaggccaggcatggtggtttacgcctataatcccagcattttgggagtccgaggtgggcagatcacttgagctcaggaggtcaagatcagcctgggcaacatggtgaaacctggtctctacataaaatacaaaaacttagatgggcatggtggtgtgtgcctatagtcccactacttgtggggctaaggcaggaggatcacttgagccccggaggtcgaggctacagtgagccaagagtgcactactgtactccagccagggcaagagagcgagaccctgtctcaataaataaataaataaataaataaataaataaataaataaataaataaaaacaaagttgattaagaaaggaagtataggctaggcacagtggctcacacctgtaatccttgcattttggaaggctgaggcaggaggatcactttaggcctggtgtgttcaagaccagcctggtcaacatagtgagacactgtctctaccaaaaaaaggaaggaagggacacatatcaaactgaaacaaaattagaaatgtaattatgttctaagtgcctccaagttcaaaacttattggaatgttgagagtgtggttacgaaatacgttaggaggacaaaaggaatgtgtaagtctttaatgccgatatcttcagaaaacctaagcaaacttacaggtcctgctgaaactgcccactctgcaagaagaaatcatgatatagctttgccatgtggcagatctacatgtctagagaacactgtgctctattaccattatggataaagatgagatggcagccagtagaaaccatctctagaaaccatctcatctttatccataatggtaatagagcacagtgttctctagacatgtagatctcccacatgccaagctatatcatgatttcttcttgcagagtgggcagtttcagcaggacctgtaagtttgcttaggttttctgaagatatcggcattaaagacttacacattcctttcgtcctcctaacgtatttcgtaaccacactctcaacattccaataagttttgaacttggaggcacttagaacataattacatttctaattttgtttcagtttgatatgtgtcccttccttcctttttttggtagagacagtgtctcactatgttgaccaggctggtcttgaacacaccaggcctaaagtgatcctcctgcctcagccttccaaatgcaaggattacaggtgtgagccactgtgcctggcctatacttcctttcttaatcaactttgtttttatttatttatttatttatttatttatttatttatttatttatttattgagacagggtctcgctctcttgccctggctggagtacagtagtgcactcttggctcactgtagcctcgacctccggggctcaagtgatcctcctgccttagccccacaagtagtgggactataggcacacaccaccatgcccatctaagtttttgtattttatgtagagacaaggtttcaccatgttgcccaggctgatcttgacctcctgagctcaagtgatctgcccacctcggactcccaaaatgctgggattataggcgtaaaccaccatgcctggccttaaatcaactttagagtcaacatctcttatcactggagcttctggagaaactccatcacgtggtgctctctttcctgatgtgttgtgcccaaatagcttgttctcatcagatgacttatttgctatgatatatatacttcaagagctgctatatgtattacatacatcaaatctttctgtaaagtttgatttttgtttctttaaaaggaacataaatgttccaggaccaagggacacaaagaggttttaatttttagttctgtagcctcatatattttaacagaaatataaaaacagatagtagcagttttccagtggagaaaactttccagatgtccccactgtatctcctttctttgcctctccttgagagaaggctggaactgatgggtaaattggttttttgcccatcagcctattcacatctttccttccttgttcccaccctagattgtggggtttttttttgaaatctgttccatttcagacatttaaagaacagccttatctaatcctgctcaagcaaaatctcagaatccttaaatacaaaagatcctgtgtggccagtcatatagttcatgggaactctatgaactttgacctaagctttatctctgattatattttggcactgctgcccctttacattaatgctgaaaaacaaaacaaaacttagctaagttttatggcaagtgggggcagggtcaggtgaagaggtaggaattgcctgaggttgggggtccctaaaacataaaataatcatccaaagcccattttcctcaaagctgggggtaatggccaaagtatgttctcaaagcatcatctgccctgagaaagggcagctactccttctacagagatctctgtgcacactaatctgtacctgcccggccggccgccaccgcggtgga

SEQ ID NO: 22728 - DNA, 303 bp, Homo sapiens
  misc_feature 1, 2, 3, 4, 5, 6: n = A,T,C or G
nnnnnnccaatgcaatgcaaatttagactaaaaagcaatggaacacaaaagaaacctgtatacattcttcggtattacgcacatgtgatgagtggtgcttttgggcacttgcctgacagtagcttggacagaaaagacactggagcctcagagaataactattgaagcaattctggaattaagaaataaggcctgttctttttagcaatgtgattcttgttgttgattctctctctggagttcatgtgctgcctcaggagactctgattttatatttgagaaaaataaaggcgttcaatctgc

SEQ ID NO: 22729 - DNA, 2768 bp, Homo sapiens
  misc_feature 2763, 2764, 2765, 2766, 2767, 2768: n = A,T,C or G
acgggccgggagattgcaccggaagacgcttcctgggtttgaggagttcagtgactgctattgaaccaccaaaagtccattatgaaactgtattgcctgtcagggcacccaaccttaccatgcaatgtgctcaaattcaaatcaaccaccattatgttggactgcggactggacatgacttctaccctcaatttccttcctttgccacttgttcaaagtcccaggctgtccaatcttcctggctggtccctgaaggatggaaatgctttcttggacaaggagctaaaggagtgctcgggtcatgtatttgtggattctgtgccggaattctgtttaccagagacggagctaatagatctgtctacagtagatgtgattctcatctctaactatcactgtatgatggcgctgccatacatcaccgagcacaccggcttcacaggcacagtgtatgccacggaacccaccgtccagatcggcaggcttctcatggaagagctggtgaatttcattgaaagagtgccaaaggctcagtctgcctccttgtggaagaataaggacattcagaggctgttaccttctcctctcaaggatgcagtggaagtctcaacctggagaagatgctatacaatgcaagaggtgaactctgcccttagtaaaatccagctggtgggatattctcagaaaattgagctttttggtgcggtccaggtgactcctctgagctctggctatgcccttgggagctccaactggatcatccagtctcattacgagaaagtgtcttatgtctctggatcctccttgcttaccacacacccccagcccatggaccaagcttctctcaaaaacagcgatgttcttgttctgacagggcttacccagatccccactgcaaacccagatggaatggtgggagagttctgcagcaacctagctctgacagtccggaatggaggaaacgtgttggttccctgctacccttctggagtgatctatgacctcctggagtgcctatatcagtacatcgactcagccgggctttccagcgtccccctctacttcatctcccctgtggccaacagttcactggagttttcccagatctttgctgagtggctttgtcacaacaaacagagtaaggtgtatcttccagaaccaccttttcctcatgcagagctcattcagaccaataagctgaagcactaccccagcatccacggagacttcagcaacgactttagacagccctgtgtggtgttcaccgggcacccttccctccgcttcggggacgtggtccacttcatggagctctggggaaaatctagtctcaataccgtcatattcacggaaccagacttctcctacctggaagccctggctccttaccagccgctggccatgaaatgcatctactgccccatcgacacccggctgaacttcatccaggtgtcaaagctgcttaaagaagtgcagcccctgcacgtggtgtgtcctgagcagtacactcagccgcccccagcccagtcccacaggatggacctcatgatcgactgccagccccccgccatgtcctatcggcgggctgaggttctcgccctgcccttcaaacgtcggtacgagaagatcgagatcatgccagagctcgcagattcactggtgcccatggagatcaagcctggcatctccttggcaactgtctcggccgtgctgcacaccaaagataacaagcacttgcttcagccccctcctcggcccgcccagcccacgagcgggaagaagagaaagcgggtgagcgatgacgtaccagactgcaaagtcctgaagcctttgttgagcggttccatccctgtggagcagttcgtgcagaccctggagaagcatggcttcagtgatattaaggtggaggacacagccaagggccatatcgtcctgctccaggaggctgagacgctcatccagattgaagaagactcgacccatatcatctgcgacaatgacgagatgctcagagtgcgactgcgggaccttgtcctcaaattcttacagaagttctgagtgggccatctgagctacttccctgaaatcctgcagtccctcactggctgccctcacaagccacctgaggagtggcatgagaggccattaactgtgtctttgtggtgtcctctggcttaaggagtgaagaggtggctcttgagggaaatggtctggacttattcccagcactgtttcaggcaagaactttccctttcaacttcaggctcattttcttctcaactctggctctctcaaggagctggagggtggcagaagtgggacaggagaagttttccaagaggttcatgggaggcggaggtgactggctggctgtcttgcatcagtcccaggcctcggccaggggagccagcctttggtttcgtttacttgcctacagtgctgtacgcaataagatgatgatcccaaaatatggtaaagtgaacccatctgtctgcattttctactctgagcccatttgttaataaacacttatttttatgcaaaaaccaaaaaacaaaaaacaaaaaaactttttggggcggccggccccggaaaaagttttacaaccatcgtgtgggccgggccccgatggtaagtgacactggcccagcggtccagggaacccgccgcaccggggggttcccccataaaaaggcgcggggccggggtttgaacatccgggggtcgggcctcgggtctcaaggcacgctaacccccggcgcnnnnnn

SEQ ID NO: 22730 - DNA, 2812 bp, Homo sapiens
agggagtcacccacgcgtccgcttcctgccgatgccggtgtggacgctgtgaatcgtggctggcccggttctccgcttctccccatcccctactttcctccctccctccctttccctccctcgtcgactgttgcttgctggtcgcagactccctgacccctccctcacccctccctaacctcggtgccaccggattgcccttcttttcctgttgcccagcccagccctagtgtcagggcgggggcctggagcagcccgaggcactgcagcagaagagagaaaagacaacgacgaccctcagctcgccagtccgcgtcgctggcttcgccgccgccatggcaatgagacagacgccgctcacctgctctggccacacgcgacccgtggttgatttggccttcagtggcatcacgccttatgggtatttcttaatcagcgcttgcaaagatggtaaacctatgctacgccagggagatacaggagactggattggaacatttttgggtcataaaggtgctgtttggggtgcaacactgaataaggatgccaccaaagcagctacagcagctgcagatttcacagccaaagtgtgggatgctgtctcaggagatgaattgatgaccctggctcataaacacattgtcaagactgtggatttcacgcaggatagtaattatttgttaaccgggggacaggataaactgttacgcatatatgacttgaacaaacctgaagcagaacctaaggaaattagtggtcatacttctgggtataaaaaaagctctgtggtgcacgtgaggataaacagaattctttctgctgatgacaaaactgttcgactttgggatcatgctactatgacagaagtgaaatctctaaattttaatatgtctgttagtagtatggaatatattcctgagggagagattttggttataacttatggacgatctattgcttttcatagtgcagtaagtttggacccaattaaatcctttgaagctcctgcaaccatcaattctgcatctcttcatcctgagaaagaatttcttgttgcaggcggtgaagattttaaactttataagtatgattataatagtggagaagaattagaatcctacaagggacactttggtcctattcactgtgtgagatttagtcctgatggagaactctatgccagtggttcagaagatggaacattgagactatggcaaactgtggtaggaaaaacgtatggcctttggaaatgtgtgcttcctgaagaagatagtggtgagctggcaaagccaaagattggttttccagagacaacagaagaggagctagaaattgcttcagagaattcagattgcatctttccttcagctcctgatgttaaggcctgagcgtcaatcatatgttgcagttagtatacaactgactaaaacaagcaagcagagaaaagcatcagccttccagagttactgtctgcttaaggcagaaacagcagtaaataatgaggaaaatgaattagctccagtgctggaacaactagctaacttggtgttacctgtaagtgaaaactcaagtgtcagatgaagggaggtggagttatcctcttatagtacatggcagtgtgacaaactcctactcactcgcttttcaagttggtgactgcagctgaaatgtttttctgtgatgtatgccacccttttacctatttgatttggaagtgtagaattcggattcatgtcatctccacagacctttcctcttaggagtgcctaagctgtcttactctgatggaggtataatgtagcacgaaagacttccaaagaaccagtttctctcttgctgttcctcttaacaactttcacgtctatctaaacattctatgcaggagtcctactaagaaattttggtgtaatgccactttgatcagttatttgttgtatgacttcattcaaaaacactttcatcaatagcatggggattgtatctatgaaagggaagttggtgtcctgcgttcctcacaaaattatccaaaggataaaatgaaaagtatgtgagaaacctgctttaattataatgtgctatgtttaagcattattgtttttctctatgacaagcaacagctctgtcctaggtccaaattagaaaaacacatattgatatttcattcagaatctcattaattggtagctgatctgattagctagagagaatgtgacagattttctccttatctcccagtctgcatatagtgaagctcactaataaattaatggatgatattaatagcagtgatctcagatgacaatgctaacactgactcctgggcatcccctcacatcctgctgtcatacattcactaatgagcaacgccagctgaagtgagtaagatctcccagtaccatgtggtactgagtcttctcagatacattcacttgtttggctcaagacatgaatctgagctgtgtgctgccatcctgagacagtattataaaaatttctgacaacagaaaactaacaaaatttgtccaatctgttgctatagctaaccagtaatttcttttgtcaaatgtaaataccgttcccagtaccttcctattggcttgatgctcaaagacacgaagattcaccttcctcagaaatgcatcaggctactctgtgtttgcagcatcgcccaggttcctaaaacaatcttccctttacaaattacttttatatctactacgaaaggatgagctcttgtttaaatgtctaactgtgaacatcaagtgtgctgactggagataaatgtttttcatcttttttttttttcggacgc

SEQ ID NO: 22731 - DNA, 3983 bp, Homo sapiens; identical to SEQ ID NO: 21101

SEQ ID NO: 22732 - DNA, 1611 bp, Homo sapiens
  misc_feature 1, 7, 9, 13, 14, 24, 28, 1593, 1594, 1595, 1596, 1597, 1598,1599, 1600, 1601, 1602, 1603, 1604, 1605, 1606, 1607, 1608,1609, 1610, 1611: n = A,T,C or G
natcgancncccnnttcatcgacncccnttgtctcgggacgcgcgccattgtgttggtacccgggaattcggccattatggccaagagtggtaatggcgtctgtatgatcttcggagcctgctgcatcggacctcggccagtcataaaagatgacaacagcagccaggccaacctttgaacctgccagaggtggaaggggaaaaggagaaggtgatttgagccaactttcaaagcagtattcaagcagagacctaccctctcatacaaagataaaatacagacagactactcaggatgcccctgaagaggttcgtaaccgtgacttcaggagagagttggaagaaagagagagagctgctgcaagagagaaaaatagggatcgtccaacccgagaacatacaacctcctcttcagtgtcaaaaaagccacggttagaccagattcctgccgccaaccttgatgcagatgaccctctaacagatgaggaagatgaagattttgaagaagaaagtgatgatgatgatactgcagctcttcttgcagaactggaaaaaattaaaaaagaaagagctgaagagcaggccaggaaggaacaagaacaaaaagctgaagaagagaggattcgtatggaaaacattctgagcggaaaccctctccttaatctcactggcccatcccagcctcaggccaacttcaaagttaaaagaaggtgggatgatgacgttgtcttcaagaactgtgcaaaaggtgtagatgaccagaagaaagacaaaagatttgtaaatgacacactgcgatctgaatttcacaaaaagttcatggagaaatatattaaatagtacagttttatgtgcttaattaaagactgtaaaacgtaaaggatcattctgactttttttatgagttttttttttcttttcccctgtctaaattgtgtgtgggcttccccagttttaaactcctatctttttctttagtgataccttacttgataatggacttgggaataggtttaacccagtttgcattctccaaatgtttccagtgatatgttttcctgggaaaagcaaatctgcctgtaataaatatttttaatctaaataaccaaatctgggtgcccaactttttgttgggatttatgctgctagtaatacattccataatatcttttgaaaagaaaaattaccattgtgtattgtgcttgtgcattaacttgtccttttccccctgtttctctcacatttaagatgagttaattcatattttctctgcattttttaaaagagtgtaatggaagatgagagggattctattttggaccacatgttggtgtggaggagtgtcattgacagtaagcaccccaggcgtgtgtctgggagagcattgggtatcgctcacttctgcaggtacttgtttttttttctcatggccgaagaggagagctctgtaagcattcttttaaagtatacggtactcacttgtgttctggatactcaactgccatgtttcctttgaaagagattgaatatgcacctgacatgcatttagtgcaaagcctgagaaagcttcaaacaatatataaaataaaaccnnnnnnnnnnnnnnnnnnn

SEQ ID NO: 22733 - DNA, 3901 bp, Homo sapiens
  misc_feature 1, 2, 3900, 3901: n = A,T,C or G
nnccgccacgcgtccgccggcccgatggagcgcgcgggcgctactagccgcgggggccaagcccctggcttcttactgcggcttcatactgagggccgagccgaggcggcgcgggtgcaggagcaggacttacggcagtgggggctgacagggattcacctacgctcttaccagctggagggagtaaactggctcgcccagcgcttccattgtcagaatggctgtatcctgggagatgagatgggcctggggaagacctgccagactattgctctcttcatttatttggcaggaagattaaatgatgaagggccatttctgattctttgtcccttgtctgttttgagcaactggaaagaagaaatgcagagatttgctccaggtctttcctgtgtaacatatgcaggcgacaaggaggaaagagcctgccttcagcaagacctgaaacaggagtcacgttttcatgtgctactgactacctatgagatttgcttgaaagatgcatcatttctaaaatcattcccttggagtgttcttgttgtggatgaagctcacaggttgaaaaaccaaagctccctgctgcataagaccttgtcagagttctcagtagtcttcagtctcctgttgaccggaactcccatccagaacagcctccaagagctctactccctcctcagttttgtggagcctgatctcttttccaaggaagaggtgggagattttattcaacgctaccaggatattgagaaagaatctgagtcagcaagtgaactgcacaaactcttgcagccatttctgctgaggcgagtgaaagctgaggtagctacagagcttcccaagaagacagaagtagtgatataccatggcatgtcagcattgcagaagaaatactacaaggccattttgatgaaagacctagatgcatttgaaaatgagacggcaaagaaagttaaactacagaacattttgtcccagcttcgaaagtgtgtggatcacccatatttgtttgatggtgtggagccggagccttttgaagttggagaccacctgactgaggctagtgggaagcttcacctgctggataagctactagcattcctgtattctgggggccatcgggttttacttttctcccaaatgacccagatgttggatattctccaagactatatggattacagaggctacagctatgagcgtgtggatggttctgtgagaggagaagagagacacttggccattaagaactttggacagcagcccattttcgtttttctcctgagtactagggcaggtggagttggcatgaacttaacagcagcagatactgtgatttttgttgacagtgactttaatcctcagaatgacttgcaagcagctgccagggctcatcgcattggccaaaacaagtctgttaaagttattcggctgattggtcgagacactgtggaagaaatagtctataggaaagcagcctccaaactgcagctcaccaacatgatcatagaaggaggccattttactctgggagcccagaaacccgctgccgatgctgacctccagttgagtgagatactcaaatttggtttggataaactgctggcctctgaggggagcaccatggatgaaatagacctggagtccatcctgggagaaacaaaagatggccagtgggtctctgatgccttgcctgcagcagaaggagggagcagagatcaagaggaaggaaaaaatcatatgtacttatttgaaggtaaagattattctaaagagcccagtaaggaagacagaaaatcatttgaacaactggtaaaccttcagaaaacccttttggagaaagctagtcaagagggccgatcactccgaaataaaggcagtgttctcatcccaggccttgtggagggatctaccaaaaggaagcgggttctgagtccagaagagctggaggacagacagaagaaaagacaagaagcagctgccaagagaaggagactcatagaggagaagaagaggcaaaaggaagaggctgaacataagaaaaagatggcctggtgggaatccaacaattaccagtccttctgcctgccctctgaggagagcgagccagaggaccttgagaatggggaagagagctctgctgagctggattaccaagacccagatgctacttccctcaagtacgttagtggtgatgtcacccaccctcaggctggggccgaggatgctctcattgtgcactgcgtagatgactctggccactggggcagaggtggtttatttacagctctggaaaagcgatccgctgagccaagaaaaatatatgagctggctgggaaaatgaaagacctgagtttgggaggtgtccttttatttcctgttgatgataaagaatcaagaaacaaagggcaagatttgttggccttgattgtggctcagcatcgtgatcgttccaatgtcctgtctggcattaagatggcagccctagaagagggcctgaagaagatatttttagcagcaaaaaagaagaaagcaagtgttcatcttccacgtattggacatgccacgaaaggttttaactggtatggtactgagcgacttattcggaaacatctggctgcaagaggcatcccaacttacatatattattttcctagaagcaagtctgctgtccttcattcacagtcttcatcttcctcctcaagacagctggtgccttaagaattggcccagcctcagatcctgtctttagcaaccagctaatatttacccagaggtactgcaatagagtatttcaaaatggaatcaggatctggtgggctcagaaattgtcccttcgaagtacaataggatccctggaggtcgccgcttgggacggacacatgggagcccacccttttgggaagcccagaccccgccgtgacggccaccatcagtcggtcccgcaacgacaacaacaaacaggtgggcggccgaaaatcaacacgtgggggcagaagagagtacagagacaaggatcaacgcggcacgtacactcgcgcgacaggcaagtagcaggcacgaggacaaaagacgacaaccacatagccaacacacagcatcacggaccgacaactagcgacacagcagagcacgcagagagacacagtgagacagtggacggcgagcggcggagccgcaggggaccgcaccgagaacgggcgagaacgaggaggagggcaggaggggaggaggagaggcggaggcaggggggaggaagggcgagaagggggaagcgcgagggcggagagggcggcagaggcgcgaggcggacggagggcgcggagcgcgagtgagcgagacgcgagggggggcgaggggggaggcggggggaagagcggagggggcggaggcggggggggcggggcaggggagcggagaggggcggaggtggggagaagcgagggcgcggcggagggagggcaggagtgagggacgcgacggcggaggaggaggacgaggacgggagaagcgggggggacgaaggcgggagccagagagaggggcggggtgagcggagcgcggaccggcgaagcgagagaagaacagggcagagaggaggcggtcggggcagcggggcggggggagggagggagggcaaggagggagagagcgaaggaagaaagagaggggatggcagggcagaagcaggcggaccgcggtgtcggcgaggagggaggggcacgggagggacaggacgcgggaggggggggaggggggaggggggggcagcgggagggcgtgggggcagaggcgagggggggggcgcgggcgtccgaggaaagggaggcgagagacagggcaaggcggcgcacagggcggagcgagggagcggaggagcgcggacccgtgagacggccagann

SEQ ID NO: 22734 - DNA, 1598 bp, Homo sapiens
  misc_feature 1, 2, 3, 4, 5, 6, 7, 8, 9, 10, 91, 92, 93, 94, 1589, 1590,1591, 1592, 1593, 1594, 1595, 1596, 1597, 1598: n = A,T,C or G
nnnnnnnnnncatttagtactttatcatccataatatcttactctctaatccacataatggagttgtgccagactccaatctgaacataannnntatatatacatatatatttatatatatacacacatacataaactataaacctgaatatcttagcatacaaaacttatctaacaactaataatttaggattcctttgagagggaggggttagaagaaactcttcttagtctttgaaatagtcctgacagtaagcaataaacaacattattaatttctgggttctcacttattcaagtgaaagacaaataaaataaaattcacttctgagccactagaaattttgaaatcataaaggattattgggaaatgagtagtctttaagaacaatttagtgttatctaagtaaagtggattttggtaagatacagagaaaaatctatgcataaataaattcttgtttcattgagcaactataatcgctaagtgggtctttttaagtatctcaggaatgtttttaaaatattaatagtgaataaattagattgaggataggaccaatcttttccaaagcaaccaaatataataaggaagaagtttgaagactattttaatttcttcccatccttcattggaaccaacacctccctagaaatctagcttaatttcaaatcatcacctcctcacaaaatattctgatttgacgttatccacgttcaagtatttaccaaaaagaaaacataattttatctacaaggtaagcccaacctcacttaaatttaggaaaaacccaagaaacaaaaacatgacccacttaactggcataaatgtttacctgttgttttgtagatgatctgtttagaggcactgaagtttctcttcaaggctcagatgattagtcacacttagttctaaccatatattccttctaggctatccctaagaatataactgacacaagagaaaggaacctttacattattattgaggttatttttaatatcaattgaagcagcgttctgattacagttctacttgttttctaactgttttcactctttaaaaacacaattttttttttttcaatttcaaggattacgaaattcttctgtcttagttacaaacaaaatgcagctatgaagcactgggaagtaaatgcaaaatatagaaagaatcttcatgattctcccaaactgtaagcacagctcacaaagtctcattgctttagaatgttttctggatgaacaagttaccagctgcaaaccgacttcagaagtgaggaaaatgttttctcatgtttcatgtagctgtcaaattttcaaaaatcctccatccttcaatcacccagtggggaaaatgtgttataaaacactgccccctggagtattctgggaggaatgtcttaaaaaaaaaaaaaaacagcaaggagaaagtactttcaaattctttactaaccactaacagaatttctaagaagcaaaagaaaaccacagaaaggaaatgtacatgaataaagttgagcaggatgtgtacaactttaaactgtattgtattcatgttgctaaacaatattggccttctcgatgannnnnnnnnn

SEQ ID NO: 22735 - DNA, 868 bp, Homo sapiens
  misc_feature 1, 853, 854, 855, 856, 857, 858, 859, 860, 861, 862, 863,864, 865, 866, 867, 868: n = A,T,C or G
natagggagtcgaccacgcgtccggtagtaacagcgtatagtctgtctctctccctatctcatctcctagtagaaaaagaaaactgtttcatttgcagtcatctgaattagtttagcatcaaagcctacgtcttttgtgatctaaataaaattatttttattactctgtttctctaaatctgcattataaaaagctaattttcctttttattttagggtggaattgcgtttgttgccataaaaggagcatttaaagtttacttcaaacagcagcaatatttacgacaggcacaccgcaaaattctgaattatccagaacaagaagaagcataaaactgacttctggttgttctgcagttctctcatccttatgaatctgttgtgttgttttgattccatcattaatgcacttgtggagacttgtgataagctgctgctcctatattttttaagaaatataataaagcacttagggcaggggaaatcatctcggtaatcatggaacctaaggatgtgatttgttttcattgtttgtatgtactacttttatggcagtcatatgaaccattatcttagcatggtaaacctgggttttgttcatattttctccagacagaaatgcaaagatcgaactgtgcaaatattaaaaaaatgcacatgctgttttattcaaatgcctcttttgtacatgttcatgtttagtgttttctcagaatcagcaactcaaggtgctatgaggatttttctcactaacataatttgattacatactaaataagaggatatgttaatatgaggaaatgtaaattggatcactgtactccagcctgggggacagagcaaaactctgtcnnnnnnnnnnnnnnnn

SEQ ID NO: 22736 - DNA, 4333 bp, Homo sapiens; identical to SEQ ID NO: 21849
  misc_feature 4152, 4164, 4225, 4244, 4257, 4266, 4278, 4324, 4333: n = A,T,C or G

SEQ ID NO: 22737 - DNA, 2012 bp, Homo sapiens; identical to SEQ ID NO: 20122

SEQ ID NO: 22738 - DNA, 367 bp, Homo sapiens; identical to SEQ ID NO: 22638
  misc_feature 367: n = A,T,C or G

SEQ ID NO: 22739 - DNA, 4215 bp, Homo sapiens
  misc_feature 1, 4204, 4205, 4206, 4207, 4208, 4209, 4210, 4211, 4212,4213, 4214, 4215: n = A,T,C or G
ngcgtccggcggcgcctattggcgtcggccgcgctgtattgtcataaatagagccggttttgtggtgttttcactactcggttggatgcctcagccatagtaagtgggaaagtgagcgagcaagcgagctactagcgaccggaggaaagtgaacagggggagaagggaacagcaagaacaggactccagagcgataaacactcgctggagagggagacgcaggaagcgatgaaagagatgtctgcaaacaccgtgctggacagccagcgtcaacaaaagcattatggaattacctccccaattagtttggcatctcctaaagaaattgatcatatttacacacagaaattaattgacgccatgaaaccatttggagtgtttgaagatgaggaagaattgaaccacaggctggtggttcttggtaaattgaacaatttagtaaaagaatggatttctgatgtcagcgagagtaagaacctcccaccttctgttgtggctactgttggtggtaaaattttcacatttggatcctataggcttggagtacacaccaaaggagctgacattgatgcactttgtgtagctccaagacatgtggaaagatctgatttttttcagtctttttttgaaaaattgaaacatcaagatggcattagaaacttaagagctgtagaagatgcctttgtacctgttataaaatttgaatttgatggtattgaaattgatctagtctttgcaagactggcaatacaaaccatatcagataatttagatctaagagacgactctcgcctgagaagccttgatataaggtgtattcgcagcttaaatggttgtagagttactgatgaaattttgcatttagtgccaaataaagaaacttttagactcaccctaagagctgtcaaattatgggcaaaacgacgtggtatttattccaacatgctaggattccttggtggtgtctcctgggcaatgctagttgcaagaacttgccaattgtatccaaatgcagcagcatctactttagttcataagttctttttagttttttccaagtgggaatggccaaatcctgtgctgctgaagcaaccagaagaaagcaatttgaatttgcctgtctgggatcctcgggtaaatccatcagataggtatcatctcatgcccataatcacccctgcctacccacaacagaattctacgtataatgtgtccacatcaactcgaacagtaatggtagaagaatttaaacaaggtcttgcagtcacagatgaaattcttcaaggaaagtcagattggtccaaactacttgagccaccgaatttctttcaaaagtatagacattatatagtattgactgccagcgcatcaacagaagaaaaccatctagagtgggttggattagtagaatctaaaatccgtgtacttgttggaaacttggaacggaatgaatttattactcttgcccatgtgaatccccagtcattcccagggaataaggaacatcataaagacaacaattacgtatcaatgtggttccttgggataatttttcggagagtagaaaatgcagaaagtgtcaacatagacttgacatatgatatacagtcatttactgatacagtgtacagacaggcaaacaatataaatatgctaaaggagggaatgaaaattgaagcaactcatgtaaagaaaaaacaacttcaccactaccttcctgcagaaattcttcaaaagaagaaaaagcaaagtctctctgatgtcaatcgaagctcgggcggacttcaatccaaaagattgtctctggatagcagttgtctggatagctccagagacactgataatggaacaccttttaattctccagcgtccaagtctgatagcccttctgtaggagaaacagaaaggaatagtgctgagcctgctgctgtaattgtggagaagccactgagtgtaccaccagcccaaggactttccattccagtgattggcgcaaaagttgactctacagtaaaaactgtatcaccccccactgtgtgtaccattcctaccgtagtaggacgaaatgtcattcctagaatcacaacacctcacaaccctgcccagggacaaccgcatctgaatggaatgtcaaatataactaagactgttacacctaagagatcccattccccatccatagatgggactcctaagaggttgaaagacgtagaaaagtttattcgacttgaatcaacatttaaggacccccgcactgctgaagaaagaaaaagaaaatcagtggatgccattggaggagaatctatgcctattccaactattgatacatcacgcaaaaagagactacccagtaaagaactaccagattcatcatctccagttccagcaaacaacatccgtgtcatcaaaaattccattcgactgacccttaatcggtaaaagcagtgcctcctcacttaagtgaacaagcaatcatttagtggcatagatgcagccacttgttttttaaatagaagtggctgtcatacgtgaaataaggtgaaagtgacagccttcagtctaataaccttgaagtggtttttgaactgtcaaactttgacctgtagatgctgtagcattctctcactgattgctacatacacttctctgaggatcacctgctgtcaaattgccatctacagtattacagctttgcatttgagggtttctccctaacttcaggcagtattggaccattctaaccccggaccctgtacaaatccgaacccttgttgttattttttgggttttctgttttgtctaatgtgtatccttgatacagctaaaaaatggaaccaacaaaaaatgtcttgattttccaatgttatacatttactttagcatgaaagcactttaaacctgagataaatgaatgtgaggtatcttttctgctttcctcatttgtgtagatgtactgtctgttctgttgatttaaattatttttttccagattggcacatgaaatatttaaacttttttgtgtgcctttctgtccaaatgttgcatagttaccagggaagattagtccagtgattacataagagttgggcaccataaattctctatattttgcctcccatggaggcctttgaaatgcatctttattaaaaatcaaaatataaccaggatactgaaagtcagtatatgaatggtaaaattgttacatatcctatttcatgccattcttgttagttgactggtattttttactgaggagcaactcattccagcatcaacaataagataacctttaagtatggcacacttgtatttttgaggtgtaaaattaacttggcatgataattcctgatcattatttaccccacaacttcaaatagtttcttcacggactaggcatgcagaaataagcagtggattttattgaaacctaaaggcattttgaatgacattgttaccaaccattaattggctcaggacctttgtaatttttatttaactatatgagttgtctttttttacgctgcttttttcaatgcatttcttaatattttttaagtttcatgaatgcatgctcagtttattaaaatccataaccatgtaattcttgtaatatgttgattcagtgttttgtaaatgaagtcgtatgtattttcagagtatttttgtatgtactgtaagataccatcttttcaaagagaaacgtttaaaacctttattgtctctccttagtctaattttttaaatatggattatgcttgaattactatatttaaaatgaaaatgtatagattacacagccaggaatgctagtatctaccaccttctttagatttcactcagcatttagtaggtccagtaggaaaaacccaaaatggtacattgagtagtgtggggaagacacctcgtgtattataggactcacgggatgccatctagcaagtggagaaatagcagtccattttctcttgcaagccctttaccattgagttgaaattcttgaattgccagagagccgtatcctccaggtcccactcctgttcattgccccttaggtctccaaaatgtaaattctaatgtttaccttgtaccatggaaaacatgaaaagagtcttagaagtaaagaacaacaaggaaaaaaatgtttgttctattattccctttttatatagcagcaaaagataagaataaaatcacataaccaagnnnnnnnnnnnn

SEQ ID NO: 22740 - DNA, 512 bp, Homo sapiens
  misc_feature 497, 498, 499, 500, 501, 502, 503, 504, 505, 506, 507, 508,509, 510, 511, 512: n = A,T,C or G
acgcggggctctttctgatctctttttcatgctcctccttgctccaaagaaaagccggatggcaaaagagcccagaacctattggaactgacaaaatcaagtcacggcgcctacaaagatgaggggcagattctggctgccttttaatttcgtccttcacctgatatctgtgccagagaatgataaaaatcataataaaggaaataatggaagaggagacttatgttactggggacatctaacataattattttcctgattcagtggcatggttcagtcttccaggagttctgctacagagaagagagtaacccccatccatcatggccaaagcacccagtcaggctccgctctggatccagcccgacaaatgcaacccttgaatagggtttgtgcaagcaaactggatgacgaccgaagaaaccctgtcgcttctgagaagacacccaatccaagaatgtgagttctggaaatgtcattaaatgtcagttatatannnnnnnnnnnnnnnn

SEQ ID NO: 22741 - DNA, 1695 bp, Homo sapiens
  misc_feature 1, 2, 1604, 1641, 1689, 1690, 1691, 1692, 1693, 1694, 1695: n = A,T,C or G
nnaagacgtgttttgcgactgccctgtcattaggccagattgtgcattagacttaggcctgcctgcagttctcattcctgcacctaatcctgagctgtaaaacttcgtgcatgggagctcttggctgttccgttcccacataaagcacgtacctgactcatcaactcatctgtcgcaggtgctcagtcgaaatttgttaaataaatggaggcgcttagttaagtttgcctttttcttttgtagcaatgtgaaagctaagggtggaagtctagagtgaagctgagttttcagcttgggcagaggcttaaggaataaaagatggaagagtaattaaggagtgggtcgtgctgtgggaagtgctgtgtcaagacacctgaggatggaattggtagccctctgttttgggactggttcagatggtgttttgggttcctttctatgacctttatctctgaaacttgattgtcttaaaatgtattttgtgggagaaaatataattattgtatattttgtgtaacagaatcagtgagaataagctgctgtcgcaaactgtcttgcctagagagagggcagtggcctacagctgcagaaggggccacacgggcctgctgagtgttccgtttcatttcaaattaggtcattctgtcttgattttgatatggatgtttcagaagaccctagcagatgtccctgtttaacttgaaaccatagatcagaaaactaagttcatatttcaattttacagagatttgaatagaaaaagtaatcaagttaaaacctgcaaagctaaaattgaactacttgggagctatgatccacaaaaacaacttattattgaagatccctattatgtaagtacagttcacgttttagggctaatatgaagacccaacacatttgtatcctgccatattaaataacagatgagattgtgttaaggatgtttttgttatgcaggttttgccattttcttctttttcctgtccatttaggggaatgactctgactttgagacggtgtaccagcagtgtgtcaggtgctgcagagcgttcttggagaaggcccactgaggcaggttcgtgccctgctgcggccagcctgactagaccccaccctgaggtcctgcatttctcagtcggtgtgtaatcacgttccagggcccaaagcccagctctttgttcagttgacttactgtttcttaccttaaaaagtaattgtagatggaaatcagttgtgtttggcaggagaatcaataaaaatctttgattcagacagcttatggggtattttaagcattcttagactagttgaacatctcactttgccccagttacaaaaatagtagaacaagcaacataaaacaatgaaggaaaacctcacttgaaggcccaggtcaacatctaagcctgttgagacttagataatcgagtctacctcttcagtaggtttgtgtggatggcctggagggcaggtgccctctgctccccagtgctacctctctcttccctagggccttttgtggattgacagtagtccccttcgtaggagctcacagtctagattagaagtggtttaatttctacacacccatagtgcacacttgnatattgaaaagatagggaagagagaaacatttatggnatcaagcgttggcaccttcaatacttcatgaattttggccagtttacnnnnnnn

SEQ ID NO: 22742 - DNA, 353 bp, Homo sapiens; identical to SEQ ID NO: 22483

SEQ ID NO: 22743 - DNA, 866 bp, Homo sapiens
  misc_feature 135, 136, 137, 138, 139, 140, 141, 142, 143, 144, 145, 146,147, 827, 849, 863, 864, 865, 866: n = A,T,C or G
caattaactaaacttttttttaaattaactaaagttggtatttcactaggacgatttagcagatgaaatgggttttaagtttagaacaccatttcttcttccttattacatttccctttttaatgttagccctcnnnnnnnnnnnnnatatacacacacacacacacacacactctgcatcaaaaaagccttcctacattaatacttgagcatgataaccttacaatgaaaggtaaatcattagttgaatcatgaaacattttcttccccttgtggagaaaaatcaaattgcttttcctctgctcttacaccacaatcatcaacacagtagacttctgtgaccaaatgtgtggggatttctccccaccaacaagaagcaatcagttctgcagaagataccaccagctgagcaccttctaatccaattcaattctcatgctatctacctggagatagcattagatcccacaggctgagagagggctcagtctcacaagactgcccccacttcagacactagttgtaaggccaggcctcatccagaacttctggccaaccagcttcaagtcagtgttcccatgacccccttcttaggtttgattaatttgctaaagctgtgcccagaactcaggaaaacacgtgtactggtttattataaagaatagcacaaagaatgcagatgaagaggtgcacagaacaaggcatgtgggaaggggtgcagagctctcataccctccctgggtgcaccaccctccaggaccctccacgtgttcagctatctggaagctctctgtacccggtccaggacttcactggaccgtcacgantgaagcatggacaaccgggtanaaatatgattggannnn

SEQ ID NO: 22744 - DNA, 740 bp, Homo sapiens; identical to SEQ ID NO: 21299
  misc_feature 1: n = A,T,C or G

SEQ ID NO: 22745 - DNA, 461 bp, Homo sapiens; identical to SEQ ID NO: 21774
  misc_feature 461: n = A,T,C or G

SEQ ID NO: 22746 - DNA, 951 bp, Homo sapiens
  misc_feature 1, 946, 947, 948, 949, 950, 951: n = A,T,C or G
nataaaggggaagggttttgtgtggaaaaacgcccttggagtgtgacatttctgcgagaatgcttaaataccgatttcccgcaggaacaatggcgctgtcttcagtggcacagtggagcagctctgaagatgcaaaggtaagagcttagttaagcttagtttccaaactaaaggagtaaacctgttgatttacaggaataggaactgttgcatcgtttgaaatttacttttttttgttagatacacgaaaaaacttccagaacatctgggagaatatttaatggaaaatcgcttggttaaaacctgacacttttaacaggtatgtgttgttttagtactttatgattgagcatagcatttaatccacacctagactaaatcaaattttttttgtcagtgaacagcgttctgagtgtggacgagtagccagtgaagataatgaatgtcgaatgtgactgactagcagcttcattttgaagtaggttgtatggcttaaaagttctgtagtatttgtactataatacttgccttttagcattaccttggtttgtagtcagtgtcacagaagtgcagtttaatgtattatgtgtacatatacaaggtctgattgggtctaatcaatgatgaaacctatcccggaagctgataaccctgaagaaaaataagtaccggattcggcctctgagattaagaccagtaattcagaggtggagtaaattttgttgcccgtgaatttataacagttgtgttaaaaaatcctgggttttttttttttctgccaacagtgagggtcgctgtctgcccattgatagaggccagattgtcttggaagttccaaagttgcaacgatttctgtaagtggagtttttctgtttgcttagagatcagtgaatattgtgtccttggtcttatctgtgatgatcttatcccgaacctgaacttctgnnnnnn

SEQ ID NO: 22747 - DNA, 436 bp, Homo sapiens
  misc_feature 1, 426, 428, 429, 430, 431, 432, 433, 434, 435, 436: n = A,T,C or G
naggtcaagtaaggtaaatagagattttaaaaaaaattatgaccacaaaaggaagtaacagcccttcctgtcttgctgtagtaactgaaccatatgcgtttatatcatgctaattgtgcaatttatttttgagttggtctcaagtattttggtttcgaatgtgaaagatatgttagattttgaaagtggtttttgtagtaaaattctcagttattttttttcttcgccaagatacagattacctttcctttaagctgatcctaaggaagttattttttgtataccttcagagaggggataacatcccaaagatattagtgttcacagaggatggatatttcctacgagcctgggatttatacagttgacacacctcatggtatatttgcagccagtactctatatggaccatcccgtctgggatcncnnnnnnnnn

SEQ ID NO: 22748 - DNA, 362 bp, Homo sapiens; identical to SEQ ID NO: 20639
  misc_feature 362: n = A,T,C or G

SEQ ID NO: 22749 - DNA, 375 bp, Homo sapiens
accacagttaccactgtctgttacctcgcgagttcaagtgcttcacgtgagacagctaccgagaacaggccccctggaaactggaaaatgccaagtaaatgtcatgcacaattgttgttcacattttatctcaatcacttttaccaaatcaggctaaaccctgggtattcataacgtcttgggctgtaccccccgcgagccgggggtggcgggcggggacgtctgctcgtcagagtcattcaatgaagatatagccgtgttcgccaaacagattcgcgcagaaaaacctctattttcttctaatccagaactggataacttgatgattcaagccatacaagtattaaggtttcatctattggaattagagaaggt

SEQ ID NO: 22750 - DNA, 1327 bp, Homo sapiens
ccgccgcatcctcagccaccgtcgcagctgcctccgccaccaccgccgcctcctcttccttggccaccccagaactgggcagcagcctcaagaagaagaagcggctctcccagtcagatgaggatgtcattaggctaataggacagcacttgaatggcttagggctcaaccagactgttgatctcctcatgcaagagtcaggatgtcgtttagaacatccttctgctaccaaattccgaaatcatgtcatggaaggagactgggataaggcagaaaatgacctgaatgaactaaagcctttagtgcattctcctcatgctattgtggtaagaggcgcacttgaaatctctcaaacgttgttgggaataattgtggcacaaacattttctgaaacttccatcaacttttttcccctgactgctgctttctgtcatgtcagaggatgaagtttttgctgctgcagcagaagtacctagaatacctggaggatggcaaggtcctggaggcacttcaagttctacgctgtgaattgacgccgctgaaatacaatacagagcgcattcatgttcttagtgggtatctgatgtgtagccatgcagaagacctacgtgcaaaagcagaatgggaaggcaaagggacagcttcccgatctaaactattggataaacttcagacctatttaccaccatcagtgatgcttcccccacggcgtttacagactctcctgcggcaggcggtggaactacaaagggatcggaggcagttcccatgttatacgcagcagatacttacggagcattgtaatgaagtgtggttctgtaaattctctaatgatggcactaaactagcaacaggatcaaaagatacaacagttatcatatggcaagttgatccggatacacacctgctaaaactgcttaaaacattagaaggacatgcttatggcgtttcttatattgcatggagtccagatgacaactatcttgttgcttgtggcccagatgactgctctgagctttggctttggaatgtacaagtgagcgagttccatctttggttgagcttttaagtacagcatagtcataatacaggagaactaaggacaaaaatgagccagtctcatgaagacagtttgacaagtgtggcttggaatccagatgggaagcgctttgtgactggaggtcagcgtgggcagttctatcagtgtgacttaaatggtaatctccttgactcctgggaaggggtaagagtgcaatgcctttggtgcttgagtgatggaaagactgttctggcatcagatacacaccagcgaattcggggctataac

SEQ ID NO: 22751 - DNA, 867 bp, Homo sapiens
  misc_feature 1, 2, 3, 4, 5: n = A,T,C or G
nnnnnacagttcatttaagttttttattatctgacttacagatattttattttctgctaactagtggttgagaatacaaattataacggagttaaaaattaaactacatttaaaaacaccaccctagaaaacatagtttaccaaacacaaaaatcaatttgtatttatttaaattttttaaaagtaccaatgaaaaaactcttctcagtcattaaaacatgagtaacatgacaactacaaagctttctcaggagtaataatagaatggataagatttagagccaaacaagtgactatggggactcacccattttctatttatattgtatagaactcttaaaacaaagcaaaataaaacaaaacctgatttactctttaattcccagaaaaagctttccttttcttccactcatttgtatttccttaaacagctgtaaatcagcttcttgtattgtgctgacagagaaaataaacagtgattgccattactgaaatttaaagttaaatattaggtatttacatgagcttttatgaagaaatggggacagcaggagaaatgaaagtcaccaaaagtcatgagaccaataaacattctgagagaacatcaagacatgagatagaaatctcaacagctttagtaatttcttgatgtcagtagttaaatgattagttgaaattaaaatattagatttgaagttagtcataggcaatattacaattattctgcttaatataaagtctattaaattaatgattgatttaaaagatgactgataattcctatagttctggagcaagaactgctgcttttggtttccttattatatatcaaattctatcaccatatcattaagtattctcggacgc

SEQ ID NO: 22752 - DNA, 529 bp, Homo sapiens
atagggagtcgacccacgcgtccggccctttgaggtgctgagccttcttgtgtagggcctaacactggaaaaactgcctcttcctttcaaggccaacctgcccctgctgcagcgggaactgctgcactgcgctcgggcggccaagcagaccccatcccagtacctggctcagcacgaacaccttctgctcaacacaagcattgcatcgcctgctgactcgtcagagttgctcatggaggtgcacggaaatgggaagaggcccagtccagagaggtgagcagatgagctttgctgtccttgccttcctggaaccgcactggtcctcccctttgcttataaaagagagagaatttgattgctgtggttgtaatgtctcaaactttttttgagacaaggcctggctctgtcgcccagactggagcgcagtggtgcaatctttgctccctgcagcctccatctcctgggctcaagcgatcctctcacctcagcctcctgagtatctgggattacaggcacgtgccaccatgac

SEQ ID NO: 22753 - DNA, 291 bp, Homo sapiens
  misc_feature 1, 2, 3, 4, 5: n = A,T,C or G
nnnnngtgaaatcaaatccctgcctttagttctccacaaagccctgttctccaatagcacatgcgtttctctgtgagctgtattcgcatcagcgccggaagcctcagaaagaatgcgtgtttacactctgtacgcggggatgagcctgatgttccagaccgcgctgcagcagctggatttgggactgatggagatgatcaataggtaattaatgaagctatatctgtgccacaggaagtagcagacatgaactatccatcaaacaaatcatagtgtaataattgtgcaggt

SEQ ID NO: 22754 - DNA, 2676 bp, Homo sapiens
cgaggcgccgcgcgcccgcgtactgcagccgcctcaatatccccttccccttcatcgtcttcgcttacttctacatggtggtgaagaagtgcttcaagtgttgctgcaaggagaaaaacatggagtcttctgtctgctgtttcaaaaatgaagacaatgagactctggcatgggagggtgtgatgaaggaaaactaccttgtcaagatcaacacaaaagccaacgacacctcagaggaaatgaggcatcgatttagacaactggatacaaagcttaatgatctcaagggtcttctgaaagagattgctaataaaatcaaataaaactgtatgaactctaatggagaaaaatctaattatagcaagatcatattaaggaatgctgatgaacaattttgctatcgactactaaatgagagattttcagacccctgggtacatggtggatgattttaaatcaccctagtgtgctgagaccttgagaataaagtgtgtgattggtttcatacttgaagacggatataaaggaagaatatttcctttatgtgtttctccagaatggtgcctgtttctctctgtgtctcaatgcctgggactggaggttgatagtttaagtgtgttcttaccgcctcctttttcctttaatcttatttttgatgaacacatatataggagaacatctatcctatgaataagaacctggtcatgctttactcctgtattgttattttgttcatttccaattgattctctacttttcccttttttgtattatgtgactaattagttggcatattgttaaaagtctctcaaattaggccagattctaaaacatgctgcagcaagaggaccccgctctcttcaggaaaagtgttttcatttctcaggatgcttcttacctgtcagaggaggtgacaaggcagtctcttgctctcttggactcaccaggctcctattgaaggaaccacccccattcctaaatatgtgaaaagtcgcccaaaatgcaaccttgaaaggcactactgactttgttcttattggatactcctcttattatttttccattaaaaataatagctggctattatagaaaatttagaccatacagagatgtagaaagaacataaattgtccccattaccttaaggtaatcactgctaacaatttctggatggtttttcaagtctattttttttctatgtatgtctcaattctctttcaaaattttacagaatgttatcatactacatatatactttttatgtaagctttttcacttagtattttatcaaatatgtttttattatattcatagccttcttaaacattatatcaataattgcataataggcaacctctagcgattaccataattttgctcattgaaggctatctccagttgatcattgggatgagcatctttgtgcatgaatcctattgctgtatttgggaaaattttccaaggttagattccaataaatatctatttattattaaatattaaaatatctatttattattaaaaccatttataaggctttttcataaatgtatagcaaataggaattattaacttgagcataagatatgagatacatgaacctgaactattaaaataaaatattatatttaacccttagtttaagaagaagtcaatatgcttatttaaatattatggatggtgggcagatcacttgaggtcaggagttcgagaccagcctggccaacatggcaaaaccacatctctactaaaaataaaaaaattagctgggtgtggtggtgcactcctgtaatcccagctactcagaaggctgaggtacaagaattgctggaacctgggaggcggaggttgcagtgaaccaagattgcaccactgcactccagccggggtgacagagttaagactctcatggggacactactgttcaaaaggccctggccaaataactcccaaatgaaacactcaacccaaggatgttttcagcccactgttagtgaagctgggtgcagaatgcaaagcctctaaaaggagaggatacaaagtcaggtgagtaggggccattggcaatgctcagagccagccagactccaaacagggagcccaagtggtttttttctgggacactctacttgaattattgtttaattagtcaaccatagatcttcaaaagagaacaattagttaacatgataaaaagtgactgcattctttggactgtatcataattatagtaagcaaattctgacagttttaatgaaaatagcctccaccattttgcaggtatgaagataacttaattatccacagggcttttaatgtctgctggacaatacatgaatgataagctataaatgacattgttttatgatataaaaatactagtttttttcatttattatttctataggcattcactgtttgagtcaaggttaggcttgttaagtgattaaaggcaattttattacagcagcatgtacttattctattctaaaagaataatattcataaacagaaacaggttttatatttgtttgcaacctgcaaaattgaattattttgctgatataaaatactaagaactcacttgaggaccatgccaccttctgaaaaggccacacacctacttctaaaaggagaggatacaaagtcaggtgagtaggggccgttggcacccac

SEQ ID NO: 22755 - DNA, 1527 bp, Homo sapiens
  misc_feature 1, 2, 3, 1526, 1527: n = A,T,C or G
nnnggtgttgcatggcgtcgcttctctctgttttgcttcgtgtttctttctgtgctttgttttctcgttcctcttgtttgctctctggtgttttttcctttgcgctttgtgttcgccccttttttgtgtctctgatgtctttgggggaggtcttctttggtgagtttctcgcttgttttgtattttcttgggtatttttctgtggttgttgatctcgcgattttagtttatctgtgagtattttgttctgagtctgccttgtttctagctgtttagtggttcctgttaattgcagcctgttgcatcttcctttttgcgttcagatcttgatccgtatttagcttcatgtgtctggatgtgtgtttttttatgttgtgtgtcacagagctaaaaactcagttcccaaatccccagtgctaaggcagcgccatcaggtattttaagctaaacttcttcacccctgagagcatgtcagctggagaaaagcagttcttccttgcccacttgagaagtgcacgcccactcacccaacatcctggtctctaggaaagcctcatgtgaggttcctctttctttcagctcagtgcccatgggcaaggatcatgatttccattccgtgttacaatgacaatatttaatgagcataaccttctcagtctcctgctctcaaatttaggacagagccgctaaggacaaaacaatccctcccgtgctttatgatggcagcaggggctggggagcctctgagggactctttcattctgcagttgtctggaagcctgggtggcgtcatgagctgaaggatcatgctttcctgtcctggctccataggttataggctggctggtgaaaggttcacgtggcccaggctgaacttcattgcctagctttggatgtgctttctgccataaagactgatttttgttcgttctgagccttcaaggaatttgttttttacaactggaatatgctcctgtgtgtgttaacagatcatggatgttttatgttttcactgatcatttaaagagtttgacctcagagctccaggatcatcagtaaatttgtcatgttatatatttatttttttataaatcaagacttctgtgtgctcttaaatatattaaaaacaatttacatttcaaaaaaaaaaaaaaaaaaaaaaaaaaaaattgtggggggccccgggcccgaaaaaggtttttaaacccttcgttgggggcgggggccacggttaggagacctgggcacggggtccgagaagaatcgcggccctcgtcgagggtggggtttccccacccaaaaaaaaaaggcgcgggcagcgcgtgttggcaccaaccccaagggtggcggggcgtccacggggtccacacagggggccagcgagcaataagacccgccccgggggcgaaaaaacaaagacgaaacacatagaagcgcacagcacaccgacacaacgaaacacctagcaacagcaaacagaacacaaaacgacacaacaaccgcaagacaaaacagagagagcagann

SEQ ID NO: 22756 - DNA, 2600 bp, Homo sapiens
  misc_feature 1, 2, 2600: n = A,T,C or G
nncgtccggtggttgtctagtctcttctgtctttagaacagtggttctcaaactttagtacacatcagcatcacctggagggcctttttttaaaataagacacagattgctgggctcatggtcagagttcccagttaagtaaatcaggaaatttgtatttctaacaagtttataggtgaggccaatactgctgttttgggaactatgctttgagaaccactgccttgaaaaaatttccaacttctacctttaagatcagcctgacttatcaaacgctagagaaaaactgaatctacccttgggcagatgacttgggattggattctatacagcagtcttgctcaatcttcccagtttccagttttattataccaacaattggtttttacaagctagaagacaatgaatgtataagttctatggaacagtgagataaatctaagcttcttgtctttgtatttagaaacattgattctatggatgatcatttgtatcatgttgaccctttgacttgtactgaaggtgattttaaatttaagtatgtagtgtttgaatttcttccatccatgtcgttttaatgagatgtttccatgtcagctcctttacagccttggctcctggcttacagatttttgaatagttgtttgcttgccagttgttttacatctttcattggccaccaaaatattagccatttgagatgagatgagactacttgttgtaccttcatctttcatttaattttctggcgtaaattaacattttaatttcatatatatctgtaaagagtctacccaaaggcttcacggaaatttgcaaaatgaactaattcccttttaagcagcaggtgtgcctgtttttgacttttcagtaaatatgttgtttgtgcacatatctacatggtggagaccatattcattatttcatcttccaaataatgggaaaaatataaaagtgaatcagtgtgctttgggaattcagtgaaatcatgttaactcatatagagggggccttagtttatctcttctttactgaattaattagttttggaaattcttttaccattaaaaaaaattaaggaccatacagagaatgatttaagaaaaaacaagtcacttaaaaatcatcacctatttataaactgtattaattacacataatgcttattgattcaatgaggtttctctaaagacttctgcttaataaatatgctgacttcatttaaattagtttagactattgtaggaatggaaggaaatgattatatttactagaattagtgagatcagaaagcatatcagaatgttgatgatatcaaggagacaatctacagagtttttgcctctgtggatggaaataagggtgtttttttttggttttttttttactttagtttcccataatttttggaaattatgtgtgcatttagttcttttagtaacactgattttaaaattaaatttcaaaagtcaatctctaagagtaatttatttttgttttaccaaccagtgccaaaaaggagaggagggaatccaaaagccaatcttttgaaccaatgtgtaaaagattatgttttttcttaaagttagggaggctcgggccctgacactgccagccccagtgagcatccctggctacctcgggattatgtgcaagctgctttgtcctacatttctttcatctggttcttattgggagtgcttctctctaataaaaattgatttcccacaaaataggcaaagctgaacaaagatgaatgcttttgataagttgggtttcacttcagttgaaacaatgtgatagaatatccaggtgtggcatgatggggcaggaggaggtgcctagagggaaaagttatttttgtttcttagtgttgtgttgtggggatgggacagataagaataagatgtttattgccctaatcatgctaagagactattattcaatatgcttttcccgcttttctaagaggaataaacttagacaaattacattataaacagttcccctactactatctcccactctagataaagccagtgggtggtatgggtccttttattccttatagtattatgccaaagaatcaacttattttcattgaagattataaataaatgaagcttgttatagccataatgatttgagtcagtataccattttacctataaaatgcaaaattcatccttgcaaccccattcaccaggagccttgaagcattttgtttactccaaaggccttgtcaaggaagcataattttttgttttgccttcttatttagtcagtttggtcatatttacttaaaaaaacaaactgaaaatcacactcctttatatgttgatataactgattttatagaatctgtctgttctttgtttaacaggtctctgtaagcaagcttgcaagtgtattttgtgtacattttatctgaggtggaaatgaaaattctaaagagaaaatattttaaaagatattgtatttatgttgcttgtgttgtagaataaagattcaaatgcattaaaaatctggtacatgaaacaattgtgtttactgaataaatatatataaatacaaaaaaaaaaaattcactggcccgcgcn

SEQ ID NO: 22757 - DNA, 614 bp, Homo sapiens; identical to SEQ ID NO: 20822

SEQ ID NO: 22758 - DNA, 1380 bp, Homo sapiens; identical to SEQ ID NO: 20118
  misc_feature 1380: n = A,T,C or G

SEQ ID NO: 22759 - DNA, 367 bp, Homo sapiens
  misc_feature 363, 364, 365, 366, 367: n = A,T,C or G
acttttcattatttaccgtttataatttggaggtaagaccattagacccaaagaacttttgtcttggtgtgttcttgtttaaatatggaatttattttacaaaatagttttgttttgtatacatgtctagtcttaaggggcaaagtgaaattttaatgagtctacagaatgttctaagtggactgggtggtgcagcagcttcctcccatcgtgatatttacaagaatgccaggtctctcttgactgataggtcaatggctgtttgatgtgcagcggccaattgtctactataactacagaatgaacctgtatttatgtgtactgctcgaactagaaaatttagccactctctgctttaaggcnnnnn

SEQ ID NO: 22760 - DNA, 560 bp, Homo sapiens
  misc_feature 555, 556, 557, 558, 559, 560: n = A,T,C or G
ggctcactgcagcctctgcctcacaggttccagcgattctcctgcctcagcctcccaagtagctgggactataggagttagccaccgcacccagccagtacacattttaaaaatactaagtatccctccattaaataagcattttctggccaccgtgaggaccatgggaaagtatactgtgtagacaacatgaacacatatgaaacaattaaagggcagtgcaaagcagaaaacaataaagtgatcaattcaactgcagaattcactgcctaaggttttggcaataaaaataggtaagtgtttgaactatattttcttttgatgcttttggagtggtgtttttatttcatttcttaatatatttttcaagagaaattatctaatctagtttatctaaatcttttgagacatttcctatccgccttctcccttttccctggcaaaggagctcaacctgtgaaagtgcaaatgtgtgagctgcgtgtctctgcttaatcgttaatgctctgccattttccaaagcaactgtaattagtacctcggtccgccaccgcnnnnnn

SEQ ID NO: 22761 - DNA, 7984 bp, Homo sapiens
gggagtcgacccacgcgtccgcgggatctgtccgagcaggaagccagcctcagcccggccgctgtcgccgccctgtcctggtgcccgtccgcgtcgtcgccctcttcactggccctcatcacttctcaccgcgccctccagcttcacccgtacaggtagccccgccgccgcgcacctgccttcgctcccgcaccggtgacagtggatagtggaaacaggagatcgtggatcctccttcaaaaatggaggatggaaagcccgtttgggcgccacaccctacagatggatttcagatgggcaatattgtggatattggccccgacagcttaacaattgaacccttgaatcagaaaggcaagacatttttggctctcataaaccaagtgtttcctgcagaagaggacagtaaaaaagatgtggaagataactgttcactaatgtatttaaatgaagccacactgctccataatatcaaagttcgatatagtaaagacagaatttatacatatgtcgccaacattctgattgcagtgaatccatactttgacatacctaaaatatattcttcagaagcaataaagtcatatcaaggaaaatctcttgggacaagaccacctcatgtctttgcaattgctgataaagcttttcgagacatgaaggtgctcaagatgagtcagtctatcattgtatctggagaatcaggagccggcaaaacagaaaatacaaaatttgttctaagatacctgactgaatcctatggaacaggtcaagatattgatgacagaattgttgaagctaacccactcctagaagcctttggaaatgcgaagactgttcgcaacaataatagcagtcgatttgggaaatttgtagaaatacattttaatgaaaagagctcagttgttggaggatttgtttcacattatctcctagagaaatctaggatctgtgttcaaggcaaagaggaaagaaattatcatatcttttataggttgtgtgctggtgcttctgaagatattagagaaaaacttcatttgagttcaccagataattttcggtatttaaaccgaggctgcactagatactttgctaacaaagaaactgacaaacagattttacagaaccgcaaaagtcctgagtaccttaaggcaggttctatgaaagatcctctgctagatgaccatggtgattttattagaatgtgcacggctatgaaaaaaattggtttggatgatgaagaaaagcttgatctcttccgggtagtagctggcgtcctgcaccttggaaatattgattttgaggaagctggcagcacttcaggtggttgtaatctgaagaataaatctgctcagtctttggaatattgtgctgaattactgggtttggaccaagatgatcttcgagtaagtttgaccacaagagtcatgctaacaacagcagggggcaccaaaggaacagttataaaggtacctctgaaagtggagcaagcaaacaatgctcgtgatgccctggcaaagacagtgtatagccatctttttgatcatgtggtaaacagagtaaatcagtgttttccttttgaaacatcatcctattttattggagtcctagatattgctggttttgagtactttgagcataacagttttgaacaattttgcatcaactattgcaatgaaaaacttcaacaattttttaatgaaaggattctgaaggaggaacaagaactctatcaaaaagaaggtttaggtgttaatgaagtgcattatgtggataatcaggactgtatagatttaattgaagccaaattagtgggaatactggatattttggatgaagaaaatcgccttccccagccaagtgatcaacactttacatctgcagttcaccaaaagcacaaggatcattttcgactcactattcccagaaaatctaagctggcagttcataggaatatcagagacgacgaaggcttcattatcaggcattttgcgggggcagtgtgctatgaaacaacccagtttgtggagaaaaataatgatgctttacatatgtctcttgaatccttaatatgtgaatccagagataagtttatacgggaattatttgaatcatccacaaataacaacaaagatactaaacaaaaagcaggaaaacttagcttcatcagcgtgggaaacaagtttaagacacagttaaatttgcttctggataaacttcgaagtactggagcaagctttattcgttgcatcaaacctaacttaaagatgacaagccaccactttgaaggtgctcaaattctgtctcagcttcagtgttcagggatggtgtctgttttggacttgatgcagggtggttacccatcacgagcttcatttcatgaactctacaacatgtacaaaaagtatatgccagataaacttgcaagattggatccaagactattttgtaaggctttgtttaaagctttgggcttaaatgaaaatgactacaagtttgggttaaccaaagtattttttagacctggcaagtttgcagaatttgatcagatcatgaagtctgaccctgaccacttagcagagttggttaaaagagtcaatcactggctcacatgcagtcgctggaagaaagttcagtggtgctcactctcagtcatcaaattgaaaaacaaaataaaatatcgagctgaagcctgcattaaaatgcaaaaaactattcgaatgtggctttgcaagaggagacacaaacctcgcattgatggtctggttaaggtgggcacactgaaaaaacgacttgataaatttaatgaggtagtcagtgtgttgaaagatggaaaacccgagatgaataaacagatcaagaatctggaaatttctattgatactttgatggccaaaattaagtccactatgatgacgcaggaacaaatccagaaagaatatgatgcactggttaaaagctcagaggaactcctcagtgcattacagaaaaaaaaacagcaggaagaggaagcagaaaggctgaggcgtattcaagaagaaatggaaaaggaaagaaaaagacgtgaagaagacgaaaaacgtcgaagaaaggaagaggaggaaaggcggatgaaacttgagatggaagcaaagagaaaacaagaagaagaagagagaaagaaaagggaagatgatgaaaaacgcattcaagctgaagtggaggcacagctggcccgacagaaggaggaggaatcccaacagcaagcagttctggagcaggagcgcagggaccgggagctggccctgaggattgcccagagtgaagccgagctcatcagtgatgaggcccaggccgacctggcgctgcggagaaatgatggaacaagacccaaaatgacaccggaacaaatggccaaagaaatgtcagaatttttgagtagaggtcctgctgtactagccaccaaagcagctgctggtactaagaaatatgatcttagtaaatggaaatatgcagaactacgtgataccatcaatacttcttgtgatattgagctcctggcagcttgcagagaagaatttcataggagactaaaagtgtatcatgcttggaaatctaagaacaagaagagaaatactgaaacagagcaacgtgctccaaagtctgttactgattatgattttgcaccatttttgaacaattcacctcagcaaaacccagcagctcagattcctgccaggcagcgggagattgaaatgaaccgacagcaacgcttcttccgcatcccattcatccgccctgccgaccagtacaaagaccctcagagtaagaaaaaaggctggtggtatgcccattttgatggaccatggattgcccggcaaatggaactccatcctgacaagccacccatcctacttgtggctggtaaggacgacatggagatgtgtgagctgaatcttgaggagactggcctgactcggaagcgtggtgctgagatcttgccaagacagtttgaagaaatctgggaacgctgtggaggcatccagtaccttcagaatgcgattgagagcagacaggctcggcccacctatgcaacagccatgctgcagagtctgttaaagtagatgttgcacaccagccttacagctgggagcctttgccatggtacttaggtagggtgtgtgcccccagatttaaccattccataatcatgttagagttacttctataaagtgaacagattttattaatcacggcttttggtgaatttgtttaaggttaattatggtagcaaattttggacctaaacattatttttctgtatcccgctgtaattcccaaaactctcattattctctaactattacacatgggcatattctgatgtttctcatcctttgccagaagactaccttacatccatcgtaattgttctctaggaaaagagaacttttttcaaaattcaaaatacttcttaaggatggcacagtaccatataactggagtaataaaacatgagcttacattcttacaataactaaaccacttaaaatgatcaaggcactaatgttttggtctgaaaagctgtgtactttatagacattttcagacatttttggaaatttccattaaaggtggaaaatctatttttttcctcctttgcagtgtcttagtttgaatgaaacacttcgaagttctagaattctagaaagagccttaatgtatttgatgtattctgtgataagaggtactaatagtatccagcacagatttgcttttctttgctagcacaatgtgtgttgctgtcagaatattctttttatattctgtggaaaaataaaggaaattcagattgtttaaatgcctaaaagttttgagataagttttgtttcaattagaaaaggaaataggttttaggtggcatagtggcttaactggactgaattcaaatattctttcaacttcatctcaatagtgatttttgtatcagaatcttgtccaagttgtttcattgatttagtaagtgttctgcttccaacatctttctttttaagaaattcctagtgtcttttttggcctttgaggttttggtaattgtagacctgtttcataagctttgtaattcagaaatccttgtatttagtaagtgcttgttttacataactgataattttaaaatgttttctttgtgtgctgttagtattgattcaaatgtcagcagctttaagcctaatatttatgactttcacatttggaatttaaagacaaaaatacatcaaggagttatgctgacataattctaaggagttttgttgtattttagaataaaattataaagtaaaatgattctctgtactgctttttcccccagtttttagagaccctaacctttgaaatgaaattccagtgatttcttttttccctagaaagattacctcagttagggaagtatttcccagctgactagtgtttgtgagccacagacactgtcttcagaattgcttctctcatgtcttagtagagaaatatttatttattatgatacattcaaatgattgtcaagttaaattaaatggttgtgtctgtgctattgagaatgcaaatgtgattatcttttgaaggctgtattactgcatagcttcacccaccctcgggtcatttcgtccctgtgattggggacagaaggtgtagctactgaagtaaatgacctattctctctcttccatctctcgcctttaactggtgtttttatttgtgtaggatagtgaatgataagcttttttcctaaccagtagtgagtaaagttcttgaacaaaatttagtagccaaattgttttttaatgacatgtctctttagtacaatagttttgtgtatcttttagatacattaataggcactagatggaaaattaaagagttaaacatatttaaatgagagaatctaatgtttcagaaatttgtaagaaatgtatcacagcaaagggttgttataagtccttagtttttgactctaatagttaatacaattatagttaatcttaagccataatgtttctaatcatgtcacacagctgtcctagaacttatctatttaaaatagtttcctgagttaattttggccagcagggcaactgccctaattcagatagatttacagtaacctacgtacagtagatgcacatacacacagacacccctttgctggagaaacttaggaccctgtcagccttttaaaggaaacagcaggagtggtgtcctaaatgatgttcatgcagctgctttaccatgttcacagtcaagcccatgcatgccaggttaaaactgtggaaatcaaaagtaaattcactcatattttaatcattttaactgagatttaaaattagaagtttaaaccactatatataaagaactaatcttttcttaataccagttctttccatagcatatgctttgcaaaggcagcatgcataaaatatttaaaatgagaggacagaatgttttcacatttgattcaattttaatataattcctaattgtggtaacacagttgagatatgtattatgagttatgggaactaattgagaaaaggaagttactctaatccacgtatgttaagagaatattgagttttcttagttgtaaagttggggagatggcaccttctcagaggattgtgaaaatatgaggaagaaacaaaacagtgcatgtaggagcacagggccacacaaaggcattctattgttatgctcattctgcttctgtaatgacttttcataggtcattcttgtgaaccattttgttttgcaagcaaccaaggaaagaacatcttaagtggaaaatcagtggtggttgtgaacacttagagaatagcaatccacaggcaagaataatggtattgtttgtagagctttattaattggatattttttaaaagacattttcattcacaggtcattactatggttctcagcgatccaaatatgtagatcattggttttttttttacctgaagtagcttaagagtacttggatcagtagaataaatatttattgaatcaatcagtcagccaattaatatgatgttagtgatagacctgcctccttttatggaagaggtaacagatccagagaggtcaagtaatttagttgtagactgaaaaatatatcaaagcctttgctgcaatcatatgtaacaaaaagaaccaaaacaaacactttttagtggcacctgtggatttacaaagggttgcctctctgtcattccacaacttcagaaggtgtgacaggttttccctatttatcattaccaataataacaagtattgagagttttaaaatttctcccagaagataaactaacaaggatggaaggggagggcaaaggatatctaaacatgagaataaggacatgttagagggggggaaacagttgtaacaataaggaaagagaagagcaacagtggaagagacaggttgtgtgcccctaaagattctgcacccccagtttggaaacactgatacattttaggacacagagcactcctagatctctacgaaattttagaatgaataatgtgtaatttataggatcagaacgtatggttattaaaacttggatcaagatatgcccggtgtatacattcttagcacataggaatggcactgccatactggagaaggtcagcagtaaataggcattctgtacataagcctcatggaagggtaagatggagagactggcagaagtagcacctactctgctgggagcacttctctgagtacgctttagttcaattcaaatcactgtattctttccccattgctaacctaatatatgaaacaagcttagctgtctcagaagtttttcaagagatgatcaggaaaaattaatgcacattcaaaaggggaatcttcagtacaaatttgtttttttaaaaatagatttaaggctgggcgtggtggctcacgcctgtaatcccagcactttgggaggccgaggcgggtgga

SEQ ID NO: 22762 - DNA, 1289 bp, Homo sapiens
  misc_feature 1, 1282, 1283, 1284, 1285, 1286, 1287, 1288, 1289: n = A,T,C or G
nataattaacgcggggggctaggtccgaggcagggccgcgggcaagatggcagcggcgctgcgcgtgcgttgttgagtgttcgggacgccggcctgcaggcgccatggtcttcctcaccgcgcagctctggctgcggaatcgcgtcaccgaccgctactttcggatccaggaggtgctgaagcacgccaggcacttccggggaaggaaaaatcgctgctacaggttggcggtcagaaccgtgattcgagcctttgtgaaatgcaccaaagcccgatacctgaagaaaaagaacatgaggaccctctggattaatcgaattacagctgctagccaggaacatggactgaagtatccagcgctcattgggaatttagttaagtgccaggtggagctcaacaggaaagtcctagcggatctggccatctacgagccaaagactttcaaatctttggctgccttggccagtaggaggcgacacgaaggatttgctgctgccttgggggatgggaaggaacctgaaggcattttttccagagtggtgcagtaccactgaggactgttgctgtattgattaggaaaagagacagagtaatttgcagtttgtttgatttatacttttgtttatctacaacccaataacagacatgagggatggccctgtctctctgggacagagcctcacagatgatgtccatgttttgtgtgaatgaaactcaaacactcttcaaaaaaaaaaacacagccacgacagcacacagactaaacacaagagggggcacccataaaaaaaccacggaaggacccaagataacagcaccacatttgtgacacaggtgctcaatatgagacgaataatacaaacatgacgcacgacacaccgtgatcgcaaccagcacacgggacacgtggaacagaccccactcctggggggcgcattaggggcacacccccgagaataggccccggggaagatacacacgcgtactgtgacccacgattatgaggagaactatcaggaaataataaacgcagcggcagaaaagacaagcctgaaaagcagacgcgcgccaggcagcgaacccacgccgggacgcacggaggaagaaccacagaaggagagatcaagcgcacgcgacgagcaccagcagcgacacacagcgagcggcacgacgagagcaggccacagagcagcagcggagccgacgcagccgagaagaccaacgagagcgagcgtcacaagaagcgcagagccagggagacgaaggcccagaacgagcgcannnnnnnn

SEQ ID NO: 22763 - DNA, 2571 bp, Homo sapiens
  misc_feature 2567, 2568, 2569, 2570, 2571: n = A,T,C or G
acactgtgcagaataaacaaacctcagtgtaatagctcagccaagtcggttaacaaataaggaaacaacacaacaagcagcagtccctggaagaggggagggaaaatcagtattccgagttgctacaaaatacttattttaaaatggccgagtttacaccacaaaatccatggggcatgccaaataaacagaaaagtttgacacacagaaagaagggaaaagcaggcagcagaaattgtccttgaaggcccagatgtcagacttagtagacaagacagcaaagcagctattataaatatgttcaaagaactaaaagactgaattctagcactctggaaaaaaaaaaagaactaaaggaaatcatgcttaaaataccaaaaatccaaatcgattttacaagttaaggaacacctccaaatttgctcatgcacagctgatgagaagtcaggactcccaactgagcctcaggctctgttcaccattccaggctattttctttgacaatgtattgtgtagtaatccaaagactggtcgagggaatttggtttttgccataaaggtcatggggagacattaaagctttctgtacgcggggagcgtcgccatggtgcgcatgcgcaaacagcacatgccggtgtggtcgacgggtcctccaagagtttggggcgcggaccggagtaccttgcgtgcagttatgtcggcgtcggtagtgtctgtcatttcgcggttcttagaagagtacttgagctccactccgcagcgtctgaagttgctggacgcgtacctgctgtatatactgctgaccggggcgctgcagttcggttactgtctcctcgtggggaccttccccttcaactcttttctctcgggcttcatctcttgtgtggggagtttcatcctagcggtttgcctgagaatacagatcaacccacagaacaaagcggatttccaaggcatctccccagagcgagcctttgctgattttctctttgccagcaccatcctgcaccttgttgtcatgaactttgttggctgaatcattctcatttacttaattgaggagtaggagactaaaagaatgttcactctttgaatttcctggataagagttctggagatggcagcttattggacacatggattttcttcagatttgcacttactgctagctctgctttttatgcaggagaaaagcccagagttcactgtgtgtcagaacaactttctaacaaacatttattaatccagcctctgcctttcattaaatgtaaccttttgccttccaaattaaagaactccatgccacctcaaaaaaaagaaggaaaaaaaagttggggcgcgcgccgcggagagtttaaacatctggtggcgcgcggcagtgggaatgggagggtcagggtcacggaaccggggatgtggatggggccaccaaaaagcggggggggttgtaacatggttaggttggtctacgcctctctcccgctgcagcttcaccactcacatgacagtcagacagctaccacaccaaccagacgatcactgcatagtagcacatgacgagtactgcagtcgactcccatcaagcacacgacgcagaacagcgacagagcgcaccgactacgagcacgatcacaccacactaatgcaatgaactcgagcacataagctgcgacgactgagcacagagacgcagagcggggagagtacgaagaagagaaagtaccaccgaacacggggcacgcggcacgagcatagatgaagagtggcggcagacagagcgcaggagagcgaacagaacgaccaagaagagccagacgaagagcacaaggaagcagagggcgaagagctagaacggaggcggagcgaacagcagagacaggcacgacaagcacacgagcagcgcaaggaacacacgaagacgacacgagacagggacgagacagagagacgaccaggcagaacaagacaacgagacagcgaaggacgccgcaacgcgcacgagcggacgagaggccagcacaagggacaggagagagagacgagaaagagtggcggagagacgagcgagaggggacgaggaagcgcaaggacgatagcgaagacgagagaggagagagaggcggccgcgcgacgagaagtagcaagcaggccagagcagaagaagacagagcacaggaagacgagcgagcggcgagcaggcgacgagcgcaggagggctgacggccgcagaagaacgggagcggcagaggccgggcggatagcgccaagcgcagcgacgcacgagacggagaagcgcacgagagaagagaagagagagccgaaggagaagcgaacgagaggacgagccgaaacgcccgccgcgaccaacgaacgaggagacgagaggaccggaccgagacgacgcgcgacgacagagccgaaacacagcaggacgacgcacgccaacacagacacggcggcgaagccgagcgcggcagcaggcggaccagatacgaacaacgcaaccgcacgcagccacgacagcaaggaaagacgcggaagagagaccacagggacacacgcacacnnnnn

SEQ ID NO: 22764 - DNA, 469 bp, Homo sapiens
  misc_feature 1, 2, 3, 4, 5, 6, 7, 8, 9, 10, 11, 12, 13, 14, 15, 16, 17,18, 19, 20, 21, 22, 23, 24, 25, 469: n = A,T,C or G
nnnnnnnnnnnnnnnnnnnnnnnnnaacctggaatgacatttttttattccacaagtatttactgagtacccatcacgtgccagacacgttatctggagatagagatgtaaacaagacagagttcctgcctcaagcaacccaccatctagtaggcggaagacagactataaatacataatgcaagataatttctgatggtggcaagtgctccaaagacaatatgacagttaaataaagcaactgagtagagggagagggaaaaagcaactggggagaggaacatttatggctgagagatcaggaaaggcttctttggcgaaaagacactggagctgaagcctgaaggaagaaggctgagtggtgcggcagggctgggagttgcaggaagagctgacagcaagccccgtttgatggggggaagctggtgaaggatggcagagtccatgcagggcaccgtgggacctgatn

SEQ ID NO: 22765 - DNA, 2012 bp, Homo sapiens; identical to SEQ ID NO: 20122

SEQ ID NO: 22766 - DNA, 3611 bp, Homo sapiens
  misc_feature 1, 3611: n = A,T,C or G
nacacttaccccccttggacctatcttaactataccacttcccccccaatttaattgccccgacattttttttttatatgttttctttatttcttttttcgctatccggtattactcacgtttccacccaaagattgctaaaagaaaccctggtcgaagtaactttccccaatctaaattttcccctcaaagaaccctcatcttattttaagaaaaatacttcttacacaagacaatccactgatgcaaaatatttattccaagttagttattttatgcagtagtttccccctcgagacttgtgataaccacatcttttaaatctgtaaataatgttatcaaaataatcttaatctttgaaatctcacaaaaatttatattttacaatccaccctgaatatcaaggctgcaagaataacacaacatttcctatatccaaatattttacagctgtacccaaaaaggaaaaagaaaaaaaaacaaaaaaaaacaaccaaaaaaacccacatatgcttggttaagggctaaagttacccgagcagccaaaaataaaataaaatatccaaattattagcattaatttaatacaattataacttcaatagtcactttgtcattgacaatgattgcttgatcacaggggtgagtgccccaagggctggtagtagaagctgttgctgcagaccagtgtctcctcttccctgcactgccagctcctacctgtgcatcgccccatatatactgggtgtgtatgtgtgtgtgtgtgagtgtgtttaaaaaatctgtcccaccacacaaacttctctctataaagcagataacagggaagaacaataacaaaagcaaaacaagccaattgctctctctttgggatatgattatttcccttgtgaatgaagtattcaacaacataagaaaaggaaaagaacgatttcttttgtatactccctaaacacacagagtttactgggtcagatttaactgtgagcatttatatgcctacttccaggcatcgtcatctgatgtttcactgctactggtttcggtgtctgagtcctcaaactctgctttgcaagtgcttctccaaggggagaacagactggaactgcggctctgcaagaagccattctttccaaagccatttcttctcagctgctctgtcttcatgtggaactctttgagctcatcctctgtgaggggaaggcaattctcatcattttcaggatattcctgccaacccatagctttcaataacctgtgctctgcttctagagagtgtgagagaacctccccttcttccactacagggagggcaagaccattttgatgacagccttcctccccattttcctttggttcaggtgtgctgttgtcctccaaatcttccagcttgtcacagtctctattctctgagaagtctccattccggtcatccttcagagttttcaggaactcactcttcctgtcggtggttcggcgggtcaacttggtcagacgagaggagctgatctcaattggaggggtggtgctggagggactctctttgggagaactcagagctgcaccactagccagtaccactggtttggtaacagagattggactggtaaaagcagactcccggctagaggaaagggatcctgacttgtgctccatcctgttagctttccatgcattaggcttggaaggaggtggtacaggcttaggaaccaggttcttatagacacttggaaccacggatgacaatttgttcccatttgcatggtgagatcctggtgaggtgaatgcagcagagaaggcagcagcaggatcctctttggaaacttttttgataactagcatcttggagggttgcttggcactaggcgggttttcccatactccagaaggtgtcccaataggtctgcatggctgatgctgtttgccagcttctggattcaaggaaggaaagtcctcctcttcaaactgcaacttttccaccttgtcttctttcttttcttccctaatctccataggtggcttttcctgaaaagcacaccctttccgggagtggaagctgccattccaatggcgatggttccctgtgccacctccactacgttggctcatgccatcatgacctcgggaagagctatgccaaccagatgggttccctgtgattccagcatatgctcccttagagacaccagagtccacagaatcatggcggaacagggagggctggtgccaagaatctcctgcagttcgtaggggaccattgttaaaaaaaccatcagaggaattatgtcgacggcggcttactccaaatctaccttctcctctgggtaggtgctctccgtgtttttcgaaggtggcagtaggtgacttagctgactgtggtgttgagaaatttagccaagcaggaacaaaatcatgctgcgccatttaggtccagtgtctcctttcagtaaggtgaggcatccaacctcatggccaggatcccagagtgtaacctctgtggtcctgtttctgaactcgagtcggccagctggatctcccacaaggtttccttgttaaaagggtgcttaagtaacctggccggcagcacgacttatgatgaagcacgaagaagccaggttctgtgtcgatcactctctcagtcccctcaactgctcatcttaaactatttggttcctgacacgtttccaaaaggggaaaggggaaaaggggaaggggggaaggggaacataaaaagtatttgttacatttaaaaagggggggaaggggaaagagctgtatctatgttcacctcattcaacttccttgagttatggcactatgatgttgcttaattaggtaagacatggatatttgcaccgagtgcaaatactgttcataacaaggtcatagctagaaagacagatgggctcaagtgtggacaaataatgtcatcaaggtaatagatcaaaaatattaaagccctataaaagatctgagcagtcaactccaaaacatccacatgacaaagtccttaaaatacaaatctcattactcttactcatgcaactgctaaaaaatagtgtgcagatatgtatttatatttgccttaaccttcaaaatctagggacataaatcttgtctttgttaaaaaaaaataaaaaataaaaatagacaggaatttgctacacttttccctccacgaacagcagctttcaaggcaaatttcttggtataaagctactaaatgtatattctatgtctttggcctttactatttataaattcagagcaaagttaaaacattagaacgatgggtaggatggatattaagaaatagtcaaggagaaatataggtccaaaatgaggatttcttctcttcagttttctgtgtttcacttgttctgctccttcccaaaatctaaattgagccactggaaggagatatgaagaatcttctatgctttggtagagaagtcacttattattttggatccatttccaccacttcacaatcatttgaaaggccacacgaatctatcactctctccaaggacttgcaaaccggtttcggaggaacgtgtgtttcccgcccttcccacctccgctcctactctcgtgtgcgcgagcggacn

SEQ ID NO: 22767 - DNA, 3504 bp, Homo sapiens
  misc_feature 73, 74, 75, 76, 77, 78, 79, 80, 81, 82, 83, 84, 85, 3493,3494, 3495, 3496, 3497, 3498, 3499, 3500, 3501, 3502, 3503,3504: n = A,T,C or G
cgcgtccgtgaatcttttgcagtgtactgtgtgcaataccaagggcatagctccctgtaatttgggaaatacnnnnnnnnnnnnnaaaaaaaaaaaaaggcagcctgtgcagtcttagtaactttagtattaagagcacttaaagtcaaactgacaattttgggcttattacaaaatgtgatgctttaaagcacacgttctttattgttgttgtaattagtccataaaaaatatagctttcggaagaattaaatacccaccatatcatttatgtatttgtgtatgttttacgggagatcaaaccactctcgtggtgccgcatccgtactcgcttgacttggaagaaatatcacaagcactaaagtatatcagggcatcccaggattgggtactgtatcctaggtttgcagttgcagaaattagcatctagtgtcacaggtaaaagaatttcaggaccaggtttaaactttattttaaatatttttatacttaggtctctttttcctgcctctccccaaagaagagccactggccttagttgtttgagcttactgcttatattatagagtgtaaataggtaactagagactaaaattttattaaccagcatgtttggtatatttaaagcagtgactgagtgtgtttgagtgagtggctgagtgcagtgtcttttgtttaaacacactgcctcgtgtctttgtagctgattcagagagtttgaattgtggggtgggagactaacttcagctccaggctgcagtaatgtgttggtagttacacttgaggcatttttttgttgttgttaattaactctatagtctcaaactatttttgcaaatatatcatttttcctaattggttcttgacgtgcagtggactggctctgtgaatgattggcagggtcttagttttgcgagagcatttccttctaagaattattgtgatctgcagaaacagccatttgattcaaaaatcatgtagaaaaggagtaggagaagcaaaacgtttcatttttgggccttaaccatttgaaatgtttggactttaaacataaagccatggagtttataaagccaagtaaccatttgatatggataataatatctactctagagagagtatatatatgcacattgatttttaatgctgttaagatacttttgtaaaactgtaggaacaagagtaattagaccaaattgaagcttaggggacagtaaagtggttgctttccatttagggtaaccatgcatgtggttagtcctctcctcctgagattcagaaccagttgactgtccccttaggtgtataaggagaaaagttgacatgtctgggacctctgacatgtgtacacatgcttgcacacatgcacacacagtgaatgttttaagttatacaaacataagaccttaagatgcaaagagccagaatattctaaagaggtgatgaacagagggggtggaaactgcatcacagatgttttccaagggccagggtggaatctgagctctagtgtctgactttgagatgcattatatttttaacacataaatgaggggatccatatcacattctttcttgtggaccaccaaattgaaggctttcttgtaattcacaagcagcagctctccagcatctctccgtagcctgggtgaagtcccagaagctggtgtgcatcattttccaaggtggcagagctgcttgctctgcagatcattcctttgagagaggagtacaagtgaagaaacaaggaggcacttcctgtaggagcactgatgtgccttgtccacactcccctctgagctttactggtaagagagctccgactgaacatgctgagcagttgagcacttttccatcagcaacaacagcgaggatggaaatggaaaggaaccgaactaaaatgcatttccctttgcagggcagagagctaagctcttaggaatagtgttatagaaataagcaccctaacttcaattcctgaaaatgttggttaatggagagaattttggagtttcacttaatattttcccatcggtcgccataaataagtcttcaggcgctcctagaagagtcccagcccaaggctcgattaaggaccacactgcaggtctgaggctcactgctctgagtcctgaacaccagagccctgcagagagtggtgataacacatcatctctgcaaagaggaacctctcccccggccgccacttcactcaggcttctactgagcagcaaggacagcctgggtttcaaatgccacttcccctgctttagggatccaggtgtcctgatagcgtgaccctgctgaggcaaggtatcaactccgagagtgactgagtcactgagcgtggcacatgaacaaacgtcatgacaaagattctctgagtgaagttaacaccacgtattttacctttgcaaaaaacaaactggcaccctgagttctaactacggacggacgatatctttgcctccacacccagattcctggaaatggctaacgtttcctttctaggggaagggtcgaggaatactcaagtgctagcttagcagctttgttcagtccagatcagagctgttaggtaaaggcctaaccacctccctgcagtctcttatatctcaagctttaggaacccatttctaaatgtacactagcggagaatttatattgtcagccttgattaccataggacaggcagaaaggcgataatttgtatcttttaatataaaagaagcttttaacttttccagcctattataataactgagttatattcactgtggctcaaactaattggcattgtggaacatttctttaccttcaaagttttctccaccaatcatttcagttctattgcagtcctggtgccatatgtcccctgcaaattgtgaaagtaattagtgacaaaatagcagcctgctccttttcaatggcgaaactgtcggcattagcagttttgggtaagctggcggtactataacacgtactggaaacctgttcctcatcaccacctaccagattctggaaatgccgtcttctagaaaacgatggcgtttgtggtggtcttcttttgaaaggaacagtaatttgtgtggatattgttaaagtgtttaaagaatattttgacaattaagtttacattttacaattgctttattttttattaaaatagttgtatataaatattaccctatttcactgttgttcaagtaaatctaaaccttgtagacaagtgagtcatctgatatgtatagaagctgtgatatatagagtacatttattgtgtaaatgtttatgaatataattgttcctgtgtttttataagttggggatattttgttgttttacggcaacaaaatttattgcatttaaatggtttttatgtaatagaaatcacgcaaaatagtgaaggatttaaaatatgtatatgatacatgtaaatgtacaaactttagaaagaaataaatccaacaaatttcaatcaaatgaaagaaannnnnnnnnnnn

SEQ ID NO: 22768 - DNA, 985 bp, Homo sapiens; identical to SEQ ID NO: 21932
  misc_feature 1, 2, 3, 4, 5, 6, 7, 8, 9, 10, 11, 12, 13, 14, 983, 984, 985: n = A,T,C or G

SEQ ID NO: 22769 - DNA, 1185 bp, Homo sapiens; identical to SEQ ID NO: 21532
  misc_feature 1, 2, 3, 4, 5, 6, 7, 8, 9, 10, 11, 12, 13, 14, 15, 16, 17,18, 19, 20, 21, 22: n = A,T,C or G

SEQ ID NO: 22770 - DNA, 544 bp, Homo sapiens
  misc_feature 543, 544: n = A,T,C or G
acaccgggaccaccaaagggccatgaactctttgtcagtcaagtcccaaggtcccatagagagcagatggccactttaatgtcacctcaagcccttaggctgtttttagacatccatctccttagtggatgctttttatagacccccatccaagacctcacacatcttgtaattaaatttcatctggtagtattttgactttttttccagcctgtcaacaccttctgtgttcttacttgttgtatctcaaatatttgatacccttttcagtgttgtattaatctaaaatttgttgtttgtgtttatgttttcatgaagttactgttaaaaaatataggaagaagagaaggttaagatttgagcccttcagtgtatagttgagcttgtcctggaagacatcagccatttaagaatcactaagttggccgagcgcggtggctcacgcctgtattcccagcactttgggaggccgaggtgggcagattgcttgagcccaggagttcgagatgagcctgggcaagtggcgagaccccgtccctatann

SEQ ID NO: 22771 - DNA, 2016 bp, Homo sapiens
  misc_feature 1, 2, 3, 4, 5, 6, 7, 8, 2016: n = A,T,C or G
nnnnnnnnctcctggccacagccctcccggtagctgggactacaggcgcccgccaccaagcacagctaagtttttttatttatagtagagacggggtttcactgtgttagccaggatggtctcgatctcctgacctcgtgatctgcctgcctcggcctcccaaagtgccgggattacaggcgtgagccaccgcgccgggcctgatttcagtttcttccagcccttcctattgttaacatgggggttgtgttgaagaatataaagttacaaagtcaaggaagtaggaaacatttttacaagtattatgtagccatcttggtggggctgtggtgaggtaggctgcaaatgattctcctatttctttccctgagttcagaacataggaattagattgatagacatcaacatacccgctttattgctgactcatgacaactaatgggaagacatggctcagatgtgcagccacagtgagcttctgaacatttcttctcagactaagctcttacacacagttgcagttgaaagaaagaattgcttgacatggccacaggagcaggcagcttcctgcagacatgacagtcaacgcaaactcatgtcactgtgggcagacacatgtttgcaaagagactcagagccaaacaagcacactcaatgtgctttgcccaaatttacccattaggtaaatcttccctcctcccaagaagaaagtggagagagcatgagtcctcacatggaaacttgaagtcagggaaatgaaggctcaccaattatttgtgcatgggtttaagttttccttgaaattaagttcaggtttgtctttgtgtgtaccaattaatgacaagaggttagatagaagtatgctagatggcaaagagaaatatgttttgtgtcttcaattttgctaaaaataacccagaacatggataattcatttattaattgattttggtaagccaagtcctatttggagaaaattaatagtttttctaaaaaagaattttctcaatatcacctggcttgataacatttttctccttcgagttcctttttctggagtttaacaaacttgttctttacaaatagattatattgactacctctcactgatgttatgatattagtttctattgcttactttgtatttctaattttaggattcacaatttagctggagaactattttttaacctgttgcacctaaacatgattgagctagaagacagttttaccatatgcatgcattttctctgagttatattttaaaatctatacatttctcctaaatatggaggaaatcactggcatcaaatgccagtctcagacggaagacctaaagcccatttctggcctggagctacttggctttgtgacctatggtgaggcataagtgctctgagtttgtgttgcctcttttgtaaaatgagggtttgacttaatcagtgattttcatagcttaaaatttttttgaagaacagaactttttttaaaaacagttagatgcaaccatattatataaaacagaacagatacaagtagagctaacttgctaaagaaaggatggaggctctgaagctgtgacttcattatcccttaatactgctatgtcctctgtagtaccttagatttctatgggacatcgtttaaaaactattgtttatgcgagagccttgctaatttcctaaaaattgtggatacattttttctcccatgtataattttctcaccttctatttaaaaaaaaaaaaaaaaaaggtttgcggccacatattttaccctataaggagctaacataacttttgatttagtgttattcataaaattaggttagcagtttattaaccttttgtatttgctctggcaatgtttaatatctcataagctatacacacctcgaagccatcaatgacaaccttttcttgctgaatagaacagtgattgatgtcatgaagacaattttatctccttttgccttccataatttgtacctgcccggggcggccgctctagaactan

SEQ ID NO: 22772 - DNA, 1214 bp, Homo sapiens; identical to SEQ ID NO: 20119

SEQ ID NO: 22773 - DNA, 1189 bp, Homo sapiens; identical to SEQ ID NO: 20185
  misc_feature 1179, 1180, 1181, 1182, 1183, 1184, 1185, 1186, 1187, 1188,1189: n = A,T,C or G

SEQ ID NO: 22774 - DNA, 4038 bp, Homo sapiens; identical to SEQ ID NO: 21526
  misc_feature 4023, 4024, 4025, 4026, 4027, 4028, 4029, 4030, 4031, 4032,4033, 4034, 4035, 4036, 4037, 4038: n = A,T,C or G

SEQ ID NO: 22775 - DNA, 1039 bp, Homo sapiens
agagacagggtttcactacgttggccaggctggtctcaaactcctgatctcgtgatctgcctgccttggcctcccgaagtgctgggatcacaggtgtgacccactgcgcccggccttatctgtctctttaagatcctattgcatttgggatcctgtagtattatgccactgcctatttacctaataatatatattgaacatctttccatgtcagtacacagatctctgcttaattcatttgaatgttcttctgtagtattcatacataatttatgttatcattttcctgttgaagaataggtaggtgttttccagttcttcagtattgcaaacaccactacattgaacatctttgtatccatgtgcaaatattcccgcaacatactgtgctagctgttcagccacatcacctttatgaaattctcacaggaacctgtgaaggctataggtaatttgccacattccacagatgagaaaaaggctaagagagcttacatgtcttgcctgaggtctcacaactcataaatgacggagcctaattgaagtaaagatctgtctgacagcagaactcaagtattttctctgataccacgatttacaattgtggtatatgattcatatatgtgtttaaatgtaaacatataaaccacatgtttataaattactcattttttttctttttcttagatgatttcacaaaagttcatcttcattgcagatacctgcctttctttctaggttgtatctcccacttcacccttctagaccatcccagaagatctataagatttcatctgggaaatcactaggagttcttggaagggaaagaaggaagattgttggttggaataaaaacagggttgaatgagttccagaaagcagggttctcaacctcgtggacagcaatctgcagaagaagagaacttcaaaaaaaccaactagaagcaacatgcagagaagtaaaatgagaggggcctcctcaggaaagaagacagctggtccacagcagaaaaatcttgaaccagctctcccaggaaga

SEQ ID NO: 22776 - DNA, 3711 bp, Homo sapiens
  misc_feature 3686, 3687, 3688, 3689, 3690, 3691, 3692, 3693, 3694, 3695,3696, 3697, 3698, 3699, 3700, 3701, 3702, 3703, 3704, 3705,3706, 3707, 3708, 3709, 3710, 3711: n = A,T,C or G
accctgggatagggagcgatctccgagcgaggcggcaagatggacgcgggatttttccgcggaacaagtgcagaacaggataatcggttcagcaacaaacagaagaaactactgaagcagctgaaatttgcagaatgcctagaaaaaaaggtggacatgagcaaagtaaatttggaggttataaagccttggataacaaaaagagtaacggaaatccttgggtttgaagatgatgttgtgattgagtttatattcaaccagctggaagtgaaggcctgaaccaaaatggaagttattccttgcgtctgaagtatagcaccatcaccttattaggtcacagcagagtgagtgtcccaatgtcgctctgacccaactcccttgatgatgcagtgtgtgtttggaggtgagttgtgtaaagtggccaaacatcaacaacaacaacaaaaaacacaaacaggaaagagcaattgggtaaagctgtacactgctcttttaaaatactattatgagatggacatttatgtgaagcatgaggggcaattctgatttgattggatattgtttttaaaggaactaaggtctttgtagctgcatgtcagctagtcatcagttacattttagagacaggatttttgtttatacttaaacttcagacaaattggcagcatataattgttcctttatacatgagataatatgatgatttaactggtggttaagaacattcttattgtaagacaggttctgttttgccacagcaacccaaaggacagttaagatatgtaccatatgaccttttcgcatatataccaatgtgaatttacttttacattaatcatttcccccaaagagttcaccctatgttttgacagaacagttggcatttcaactgataaggtatttctagttttaaaataatttggtgtttgtattttgttttgaatatttttaaagactaattttaagaatgcactttctataaagtatatgcatcttagaaaaccaggaacaggggagaaagttttttaaatgatgattgaagatagattttattggagaaatgctttactgatgtgtattttagtgcattttaaaaacctaagtatctggtagtattccccttgtagtgagcatgagattaaagtttagaactttttaagacaattctttttttgtggttgtgtactcattattgcttgttcgtcttttgcaatttagataaatgatataacattaaactcaaggtggttgagttgcagtagggagtcggaagcaagccaagggaacatctttctctacaggggacttggcgattccaaacccccaaggttccaagaagaaactgaagacacctggaatctgtacttgctttgtgctattgagctgtgcttgttatacagaccttgttgcttgaccaacggatttagcatttaaaaacccaattatttttgagaaatcttgacctcttagcaccttgtggacagttgagaatttgaggcattgttatagatagatttatccttatataaaactcaggcctttagcttagccctcacaagttacagactgcatgcataactcgttagttttcataactggacaatagattttttatgcaaagctttctgtagtgttagggagcagtttatgtactttttccgtttctcattgggggaaaatttccaggcaagcaaatacttttcttgttagtaaatactagaatttgtggatgtttcatgatggtttttaaagttaataaatgtaaggcccactaacagccacagagtctaaaaatacttacgaaatccacaaaggattaacaggctgctctgatgcttttggtagagtgagagagaatttggtaatctgttagagattatattgctgagaagctactagggaagactatttgtaaaatagtaaggactatatatatgtctaagcccctatggtagacttaaaaaatactaatttaaatgagttttaggttggttgatttgttggttggttggttttgaagtaacctgtttttcttcctgtcgtgtctttttgcagaatccagactccaaaatgatgcaaatcaacctgactggatttttgaatggaaaaaatgctcgagaatttatgggagaactgtggcccctgctgctaagtgcacaagaaaacatcgcgggaatcccttctgctttcctagaactgaagaaagaagaaataaaacaaagacagattgaacaagaaaaactggcatctatgaaaaagcaagatgaagacaaagataaaagagataaggaagaaaaagaaagcagcagagaaaaaagggagcggtctcgtagcccaagaagaaccaagagccggagtccttcccctgctccagaaaagaaggaaaaaactccagagctcccagaaccttcagtgaaagtaaaagaaccttcagtacaagaggctacttctactagtgacattctgaaagttcccaaacctgaacctataccagagcctaaagaaccttctccggaaaaaaattccaaaaaagaaaaggagaaggagaagacccgaccacgatctcggtcacgctccaaatcaagatcccggacgcggtcccgctctccttctcacactcgacctagacggcgccatagatcccgatcaagatcgtattcacctagaaggcggccaagcccaagaaggcggccatctcctcgaagaagaactccgccaagaagaatgcctcctccaccaaggccatagaaggagtcagatctccagtacagacgcaagaagacgttcgtcagcatccttgtctgggagtagctccatcatcctcttcatctcgttcacggtcaccaccaaagaagcctcccaagaggacatccagcccccctcggaaaactcgtaggttatctccttcagcaagtcctccaaggcgaaggcacaggccatcacctccgtgcaagtccaccacccaaaactcggcattcccctacaccccagcagtcaaaccgtacaagaaaaagtcgcgtctctgtgtctccagggagaacttcaggtaaagtgacaaaagcataaacaggtcactgagcaaacagagcaatccccttcaccagcaaccgaagcctcagcaaacagctagcagttcatctgacatcggcacagcaagcatcaacggaggccacaaatggctagaagcagcattctgtgcacgcagagacgccaatacagacgaccaacaccagcagtcttcatctgactctggctcctcctcctcctcagaagatgaaacgacgccaagagatccatgtgacgaaaggagagcgtggacggaggcggagacatacacctatccggagtgctcatccatcaccagaacagagccacaaagaaaactatccccatcgaggtagaacggaagagaagaccacaccaagcacacaaccagaaggagaccggcaacgacataccggacaaactacaagaccgcgacggaatccacaaccacagccaagagacggacacgtacgtataccccaaggacgaactgaaccatcgcagagcaagataaccgcaccacaaacgcgaacacaaacgcaggaagagcccaaggcaaagaaggaacacacagcaccaacaaaagaaacgaaaccaacaccacaaaagggaacaaaaataacccagacatggccgacgannnnnnnnnnnnnnnnnnnnnnnnnn

SEQ ID NO: 22777 - DNA, 1989 bp, Homo sapiens
  misc_feature 1788, 1811, 1830, 1849, 1858, 1989: n = A,T,C or G
ttgagacggagtctcgctctgtcacccaggctggaatgcagtggcacgatcttggcccactgcaagctccgcctcccaggttcacgctattctcccgcctcgggagctgggacaacaggtgcccgccaccacgctcggctaattttttgtatttttagtacagacggagtttcaccgtgttagccaggatggtctcgatctcctgacctcgtgatgcacctgccttgacctcccaaagtgctgggattacaggcgtgagccactgcgcccggccaataatttttttagtttaagttcatttttgtccccgctgatgaaagttagagctgcttcctccaggcagccctgggagtaggggcacagacttgtgcctcgcttcccagcagctgcccagtgcctctgtccacacccacctccctggtgtacttgccccctacagcagcagcccagatcctcccctggattaaaattgcaactggtgccctaacccaaaacttgagaaaaaattctctatcacatccactcttctggcatttgtagaatctctggccctgggtgtgtcttttcctgtagctgttacagatttcttaagcagatttcttaagcagatggacatgtccagattcatgcctaaatatccagttgataactggaaaatgctggttcacggttctttagtaaagattaataagggatccccatgtgctggggagtgtgcttccatttgagtggggatatcagaagaaaaagaggggcttgtgtagtaaaccttactttgccaattcagctgtagagcccaaattgttacaagatgcaaagatgtactccactttttgaccaagcatcagcacctttggcttaccatccagtccttacttctgtgactgtaagggccccaccagtgtcagcagacttgtttgtgctttgggggaactctcttctcagctccctttgccagtcccaagcctggtggatctgcatctcacgcccactgcacaccgttcctctccatctgcccttccctcccaggcccccggtcgggggagcaggtgtggcaagtgttaggaactcccttctggtgacagctggtcttcctagagtgttgctggtaactatcgcctcttggtcttctgacatcattgccaggaacggggcactttttcgtcttgtagtttggccctcgggtttcctcactaggtattgtgtaactccctcaaaaaaaggtttatgaaatgctgaacctcaggtttcatagacgtctttgtacactaaaaattctgcagcagaatatttttaaacattcgcagttttttgtaagctatatttttgtatatttaattgctattttaaaattttaatgcattttgctaatcactcctcaaaaataaaacatgcatgtaattgactcaaacgtgtaaataaaagcaaattttgacgcaagcaccttcagcaagacttggaaactcaaggtgagtaattctatcagagctggtaactagtactgagtgattgtgatggaagcccctgcccttcctgtggcatagtgtgcaagcgggggtggggtcagtggtgaagagtgtgtcaggccaccacagccagagaacagagaatcctggaatgcagagtacagtggagtctgaagccccctggccttcctgagctctgaaacagctggatacagataagcagtctttcacgtgaacgccagcaccagggtgacctgaaatagcctcgtgccgaattcggcacgagcacacatcacaggcttaaactgtcttagagactttncaagtgattggatcacaggctanggatctgtgcatggtgccngttgaaacccaagtcttcncagtgctangtgagggagggctcaaccggggtaatgtgaatggggctgttgtcttttgcaatcccttaacatattaactttggacaaaccttgataggcttgcaccaaacctttctaaacatttttatggatcatctccn

SEQ ID NO: 22778 - DNA, 903 bp, Homo sapiens; identical to SEQ ID NO: 20618
  misc_feature 1, 2, 3, 4, 5, 6, 7, 8, 9, 10, 11, 12, 13, 14, 15, 899, 900,901, 902, 903: n = A,T,C or G

SEQ ID NO: 22779 - DNA, 1020 bp, Homo sapiens; identical to SEQ ID NO: 20647
  misc_feature 1, 2, 3, 14, 20, 35, 42, 48, 81, 1019, 1020: n = A,T,C or G

SEQ ID NO: 22780 - DNA, 1026 bp, Homo sapiens; identical to SEQ ID NO: 21285
  misc_feature 1, 2, 1025, 1026: n = A,T,C or G

SEQ ID NO: 22781 - DNA, 2028 bp, Homo sapiens
  misc_feature 1895, 1896: n = A,T,C or G
aacagtctggatggagcagtcagagggtttgataaagtgctctggacccctcgggtgctgtcaaatggcgtccagttctcgcgcatcagtccagatggtgaagaaggctaccccggagagttaaaagtctgggtgacatacaccctggatggctgagagctcatagtcaactacagagcacaagccagtcaggccacaccagtcaacctgaccaaccattcttacttcaacctggcaggccaggcttccccaaatataaatgaccatgaagtcaccatagaagcggatacttatttgcctgtggatgaaaccctgattcctacaggagaagttgccccagtgcaaggcactgcattcgacctgagaaagccagtggagcttggaaaacacctgcaggacttccatctcaatggttttgaccacaatttctgtctgaagggatctaaagtatacaccacccagcccggggtccagttttacacgggcaacttcctggatggcacattaaagggcaagaatggagctgtctatcccaagcactccgggttctgcctgcagacctagaactggcctcgatgcagtcaatcaggcccgcttccctcctgtgctgctgaggcctggtgaggagtatgaccacaccacctggttcaagttttctgtggcttaaggaagtgtgaagatatgatccagtccagggctaggctcagccacctgtctcctgtccagaaaaaaggtgaagattaagaagctttcagaatgattctatggattaaaatcatacaaatggtggctgttctgagaatcagtctgggtattgatttccttttccagtgactggctccaggccatgtctaatgaccagctcgattccctgtgcagttcagagggcaagtgaacccaaccaacaatgtcgtcatctaagccctgaccctagccagggactcccatgctgctgttggctccatctctccacactgcctctttcttttcaactttttgcccttcctttctttaaagctattctcacattgcttttatttcctcctccttcacctccaaccactgtcagcagcactctggagttttcaaatgtcacattagcctcaccctgcatgctaggagatggacctgtctctatacagcagtagatgattgataagtgaggaaactgaggcttacagaggttgaagaccaacaagctaataaataaaaagttgaggccgggcacggtggctcacgcctgtaatcccagcactttggaaggccgaggcaggcggatcacgaggtcaggagatcgagaccatcctggctaacacggtgaaaccccgtctctacataaaaaattagctgggtgtggtagcacgcacccgtagttccagctacttgggaggctgaagcaggagaatcgcttgaacctgggaggtggaggttgcagtgagccgagatcatgccactgcactgggcaacagagcaaaactcgatctcaaaaaaaaaaaaaaaaaaaaaggaaaaaaaagcagctctctctctcgggagagggaggggacttccgagaggaaaaggcctgcaagagcctttgggttaactgagaaagcacagcccggccaacgcttgggaagaaagacaggcaagcactggaaacaggagctattagggtgaggagagagccttgcctttcacagcacagtgaggatgacattgcaccagggacagagattgtatgtgacaaggctggggctccttctttcctagacaatcaaagtatcagtgatgggttttggttggtgattttgaaaaaaaaaaaaaaaaagtatgttatactagtgtatgctgtactgaattgaaataaaaccaaaatctgcatcttttaaaaaaaaaaaaaaaaaaaaaaaaannccctggtgggccgccttggccaatgcgattttgattgaacaagcttttgatgcggcccgcattgagcttacttggcaattgccttataggggggggtttaaattaattgggcgggttttaacaaaggggaaa

SEQ ID NO: 22782 - DNA, 3983 bp, Homo sapiens; identical to SEQ ID NO: 21101

SEQ ID NO: 22783 - DNA, 1090 bp, Homo sapiens; identical to SEQ ID NO: 22541
  misc_feature 1: n = A,T,C or G

SEQ ID NO: 22784 - DNA, 539 bp, Homo sapiens
acatgtaatatgcagaggtgtttgtgagctgcagcagtagtgtatcatttgcatcttttgaacaattgtctttgggatccattgtgatgacatctgtctttattggaggaaagataattcttgatcaactccgtttttattattctcatgtctgacgatacatctgtgttctttgtccagtgacttttctggcaccgttaaccagctaaatttcatgtatgtgtcgttagtcttcatggtgttcccctcctgggatcccagaatcgtgttgctcttcttttcttgccaatgtatcttaataacatcagggaaaaatttctcaagaagacaaaggtatgttccagccttctggagctttgtttcagcaattgaaggaagaaaaatagtgggcttgggggaaacatctgcatcaagttgtttatcaagtgccaggcattctggtaggtaatttccatatttaatttcatttaatctttataacatccactttagataaataatctccattatcttctttgtacctcggccgccaccgcggt

SEQ ID NO: 22785 - DNA, 577 bp, Homo sapiens
  misc_feature 577: n = A,T,C or G
cgcggtggcggccgaggtacgcggggatttggagcatgaaccctattgtgaactgctcatctgagggatctaggttgtgtgcttcatatgagaaactaatgcctgatgatctgtcactgtctcactttgcccccagatgagaccatctagttgcagaaaaataagctcagagtttccacggattctacattatgatgtgtattctcattttatggaagacatgttgccagagtaaagcacaatatattcatcttgaaatgtaatactgagaagatatggaagttatggaagttgtggccttcagaattgacacttacggagagactagaacagcgtgggtgagttgtgaggggcaggaagcatgtcttaatggacttaaccaattttcgtcaactattcacagtaaaatctttcaatgtacaaaatttaataatctgataaacaataaacaaaatatttgaataggcatttttcataagacgtacaaagggcagacaggcatacgaaaaggtgctcaacatttttgatcatcagacaaatgcaaatcaaaactacaatgagatattacgtgactcan

SEQ ID NO: 22786 - DNA, 757 bp, Homo sapiens; identical to SEQ ID NO: 20428
  misc_feature 1, 2, 3, 4, 5: n = A,T,C or G

SEQ ID NO: 22787 - DNA, 548 bp, Homo sapiens
  misc_feature 548: n = A,T,C or G
acctagaattgtgtaggaaggaggagtagcaatgactagatttaaacctagaaatacaagcaggaacctggctgtaaaaggctacactttatctaagagacagtgagatattaagatgtagagtgtatctgtttgtaaaaggtttaaacaggtgagagtttatctcatgtaataggaagtccaggacattggaaaaggaagtggcgtaagcagtccaaagctctaagcagctcaacaatgtcgtcatcgacccaagctctttctctctttctacttcaccatccttagcatgtagcttttattgtctttgtcataaaatggctgctacattgccatgactcaagttttcattccaggcaggaagaaggagagagaacaaagggtaaaacaccttgtcctcatgtgtcttgcctttttattctagaaaataaaaccttccttgagaacttctgcctacctctcactggccagaacttagtcacttagtgatctgtaaccacaaagaaggcttgggttcagttcctttacttcctagtgcttcaagtaan

SEQ ID NO: 22788 - DNA, 2273 bp, Homo sapiens
  misc_feature 1, 2, 3, 4, 2269, 2270, 2271, 2272, 2273: n = A,T,C or G
nnnnaggaagccagttttttgaagatggtttatttaaccatatcttatcctagagagatggctgtttctttcctgttaataaacttttacaagttcctgaaacttcagaaagtttaaacaatttttacttaaaaaaatgtaaaaagaaaagtctccaaacattattgtcatactggggatcacacattttaaaacacatagaaatattttttaaaaattatcaatttagcagcaacaggtaaattcattatcttaaaaatatgggagaaggattaagctttgtaagagctcgatcatggattcttttgaaattgtgtgtagtttaatgggagagtgtttggtgtatatagatgagaatgccatcactttgttcctttccatttgagactgaactgaaatctcccctagtaatttttatttttttaaaggaacccttctccttgtccccacaaccccagcaacaaaagaaaggaaggaaggaagaaacaacagcttaaaaaaaaaagtaatctgtaaaatagtacagttggattgctgagaatctatgtaaagagttaggagatataggttaataatttttggaacaaattttaaatataggcattactagaggaaaattatctatggactgtcctattaatgaagaatgtctgtcttacctccgtttgttttgggaggaggagaaaatatagaagaatctaataaggaacaagtgattttacttttttagctcccagctactgttgtgctcgttttaattgctgttttgaagatctgctgcttaattatccccatcccttagccggagatgtggagtgtttcctttcagtttttggtgatgttgaattcttttgtattccctcctggggccaggggtcagaattcccaagcatgaccacagcttcttttaaacattaagcttcccagtgggaaggaaactccagctcgacaggtaaagggagtgggtggggttgctgcctgcaatttctctaaaaccgctttagtgccttcgtacatacacccagacatcctgagcaagggggacgcacatgtgtgtgtgtgtggtccagtcactccacagatgtaagatactcacccataaaggaaattggagtggttctggacaggccccaaaggcagtgggctgaatttaaaataaataaacaaacgtcaagcaagttaatatgcttatgtctcagtaatgtagaatgccaagttccttcctgtgtcgtgtgccctccattactgtgcattgattcctccaggtgtgtaattgtgacaactgcagtgatttggaaagtctctttgtcttgggcaaatagaaggggttcctgttgttctgctcttgtccttcgtctcctccccttttcccccagacctcccccttctttttgtcaacttgctgggagctttgctttattggttggcagtgacctaagaacaggatatggtgaggatgtcatggaagagaagagctctttccgtggtattctttggcaagagccatgtctactaagaggttaggtgacttcagtatacttataaaattcagtgagagtgccttcttctcttctaccacactctggcatagatacaggcttgctggtcacctctcattacatagatttattttaaaaacattttgattatgttaatttgagctttcccttttttttttttaaactactttttaaaacacttgattactagtggcttagaggtgtgtacatctcctgaacatcacaaacttggtttctacctaccacacgagtagccaaaagaaaagaagcactaatagagaaaggggtgtctcacaccagacagaggacctctgctgtcaattagatccagtatcatgacctaactttaagtgtggaaaagagttcagatctctgagacactgtgaagaaatggatggctcatgtaacatctctgatccctcagtccccaaccctggacgtgtttcatttacaacattcataggagttaacttagcagtgttgcaagttaaggttccaaaccaaattatttaatcagtgtccccccaataaaatcacttatccatttatggctcacgtagctttcaatttataagcaccttggatttcctatggaggtatgcgcccggtgggaagaaattttcccccttctttctggcctgaatggtgctaaggtagccactcgcgttttccaaaccccgggggctggcaatggcatcaaacgggtccccggcaacaaaagggaaaaaacctggggagatggggcctcnnnnn

SEQ ID NO: 22789 - DNA, 394 bp, Homo sapiens; identical to SEQ ID NO: 20433

SEQ ID NO: 22790 - DNA, 658 bp, Homo sapiens; identical to SEQ ID NO: 21891

SEQ ID NO: 22791 - DNA, 643 bp, Homo sapiens; identical to SEQ ID NO: 20678
  misc_feature 1, 2, 640, 641, 642, 643: n = A,T,C or G

SEQ ID NO: 22792 - DNA, 3730 bp, Homo sapiens
  misc_feature 386: n = A,T,C or G
tactttttaactctctcgttaagagatgaccagagctggggatgcgggcacctgtcttccaggccctcttgctgtgtggccgcagactggtggttcagcctcttaactcggacatgaggaaactgaaaaacagagtagcagctcagactgccagagatcgaaagaaggctcgaatgagtgagctggaacagcaagtggtagatttagaagaagagaaccaaaaacttttgctagaaaatcagcttttacgagagaaaactcatggccttgtagttgagaaccaggagttaagacagcgcttggggatggatgccctggttgctgaagaggaggcggaagccaaggggaatgaatgaggccagtggccgggtctgctgagtccgcancactcagactacgtggcacctctgcagcaggtgcaggcccagttgtcacccctccagaacatctccccatggattctggcggtattgactcttcagattcagagtctgatatcctgttgggcattctggacaacttggacccagtcatgttcttcaaatgcccttccccagagcctgccagcctggaggagctcccagaggtctacccagaaggacccagttccttaccagcctccctttctctgtcagtggggacgtcatcagccaagctggaagccattaatgaactaattcgttttgaccacatatataccaagcccctagtcttagagataccctctgagacagagagccaagctaatgtggtagtgaaaatcgaggaagcacctctcagcccctcagagaatgatcaccctgaattcattgtctcagtgaaggaagaacctgtagaagatgacctcgttccggagctgggtatctcaaatctgctttcatccagccactgcccaaagccatcttcctgcctactggatgcttacagtgactgtggatacgggggttccctttccccattcagtgacatgtcctctctgcttggtgtaaaccattcttgggaggacacttttgccaatgaactctttccccagctgattagtgtctaaggaatgatccaatactgttgcccttttccttgactattacactgcctggaggatagcagagaagcctgtctgtacttcattcaaaaagccaaaatagagagtatacagtcctagagaattcctctatttgttcagatctcatagatgacccccaggtattgtcttttgacatccagcagtccaaggtattgagacatattactggaagtaagaaatattactataattgagaactacagcttttaagattgtacttttatcttaaaagggtggtagttttccctaaaatacttattatgtaagggtcattagacaaatgtcttgaagtagacatggaatttatgaatggttctttatcatttctcttccccctttttggcatcctggcttgcctccagttttaggtcctttagtttgcttctgtaagcaacgggaacacctgctgagggggctctttccctcatgtatacttcaagtaagatcaagaatcttttgtgaaattatagaaatttactatgtaaatgcttgatggaattttttcctgctagtgtagcttttaattgcatgggtagttttaaataaatggagaaagcacctttcagaagctacactagcaggaaaaaattccatcaagcatttacatagtaaatttctataattttacaaaagattcttgatcttacttgaagtatacatgagggaaagagccccctcagcaggtgttcccgttgcttacagaagcaaactaaaggacctaaaactggaggcaagccaggatgccaaaaagggggaagagaaatgataaagaaccattcataaattccatgtctacttcaagacatttgtctaatgacccttacataataagtattttagggaaaactaccacccttttaagataaaagtacaatcttaaaagctgtagttctcaattatagtaatatttcttacttccagtaatatgtctcaataccttggactgctggatgtcaaaagacaatacctgggggtcatctatgagatctgaacaaatagaggaattctctaggactgtatactctctattttggctttttgaatgaagtacagacaggcttctctgctatcctccaggcagtgtaatagtcaaggaaaagggcaacagtattggatcattccttagacactaatcagctggggaaagagttcattggcaaaagtgtcctcccaagaatggtttacaccaagcagagaggacatgtcactgaatggggaaagggaacccccgtatccacagtcactgtaagcatccagtaggcaggaagatggctttgggcagtggctggatgaaagcagatttgagatacccagctccggaacgaggtcatcttctacaggttcttccttcactgagacaatgaattcagggtgatcattctctgaggggctgagaggtgcttcctcgattttcactaccacattagcttggctctctgtctcagagggtatctctaagactaggggcttggtatatatgtggtcaaaacgaattagttcattaatggcttccagcttggctgatgacgtccccactgacagagaaagggaggctggtaaggaactgggtccttctgggtagacctctgggagctcctccaggctggcaggctctggggaagggcatttgaagaacatgactgggtccaagttgtccagaatgcccaacaggatatcagactgtaagaggcaaaaattaaatgaagtacaactgtcagaatacaatggaaaatctaactggaacactttgtactgggttccataatgtaaattagtcattatgtgataagatgacctcgggacccaccagacccatttatctacacttcactccatgtcctatattacctggaactaggaaggtagttgatgttcacctccaaccccaccaaaaactaacttcaaccctcatctgtctagttagggatgtcaagcatcaaacagatggaattaactggttatatagctctttaataagtcagaatgatccctacctctgaatctgaagagtcaataccgccagaatccatggggagatgttctggaggggtgacaactgggcctgcacctgctgcagaggtgcacgtagtctgagtgctgcggactcagcagacccggccactggcctcacttcattccccttggcttccgcctcctcttcagcaaccagggcatccatccccaagcgctgtcttaactcctggttctcaactacaaggccatgagttttctctcgtaaaactgattttctagcaaaagtttttggttctcttcttctaaatctaccacttgctgttccagctcactcattcgagccttctttcgatctctggcagtctgagctgctactctgtttttcagtttcctcctcagcgccttctcctcggggctcaggtgcgtgaggcgctgtcgcttgcgcgcctggggcagccccccgctcgctgcctccgggctggcccctctctgggctggcaccatgagcggcagggcctgccgccggggctccgcggcggaggcggctgccccgacagaagcagaactttagggtcccgtcgccggttcggcgcgctgccaccaccaccaatagctccagactacgcacccgcgcaccgcgccctcgccgatttaacacgcaggctctactag

SEQ ID NO: 22793 - DNA, 500 bp, Homo sapiens
  misc_feature 1, 2, 3, 4, 5, 6, 7, 8, 9, 10, 11, 497, 498, 499, 500: n = A,T,C or G
nnnnnnnnnnnggtcttcatggtatcacatcaccaggtcttatataacttgaacctgtattcatgcaacacttttcttactggattcccaaactctttatatctttctccactccatattacaaattaatttctatgacacaatttttttaaatcaaaacttcaatttcactctcttttactcagtatttaaacctcaaactacagcaactggtaattttaacacccttcctagaaagtcctaacaaatcttacctcccacatgggaaggagggccaacctgttaaactcactgtcccaagaataactatactaaattctccccttttatgtttctgctctcattcattctcttacgtaaagccatccctatttccttttacctttccaaatcccacccattctttcaaggccagggttcacatccctccttaaggatgttttcctggccgggcgcagtggctcacacctgtaattccaacactttgggaggctcannnn

SEQ ID NO: 22794 - DNA, 1463 bp, Homo sapiens
  misc_feature 1, 1463: n = A,T,C or G
ngcccctggttttttgcgccccccttttttgtttttttttttgcgaccgaatcttgctctgtcacccaggctggagtgcaatggtgcggtctcagctggactgttaacctccgcctcctgggttcgagattctcctgcctcagcctcccaagtagctgggactacaggcacccaccaccacacctggctaatttttttgtatttttagtaaagacggggtttcactatgttggccaggctggtctcgaactcctgacctcgtgatccacccaccttggcctcccaatcttatttgctttacaagtcctgcttcagggttaccttccctgaccactgctgcctccctcccagcatttgccagggactgtcattgccttagtttattttttctgttttgttttttttttgtcgtttttgttttttttttgagacagcgtcttagtctgtcgccaaggctggagtgcagtggcgcaatcaaagcttgctgcagccttgaactcctgggctcaagcaatcctcttacctcagcaactaggactacaggcacatgccaccacgcttggccttctaatttatttctgtgtcaacaaaataaaactcaggcctaggaatagcttggttcagaaatcacagagggacttagtattccattaatacaaatggaaacattaagttcatcatcagatgataaaaggaaaaaaaaaaacctgatactcatctcaaaagacgcagaaaagacatttgcataaatccagtacctattattatttcaaatttaaaaacttcttcttttttaagagatagggtatcactatgttgcccaggctgatcttgaactcttggcctcagatgatcctcctgcctcagcctcccacagtgctgggactacaggcatgagccaccacacccatcataaattaaaacttctgaacaatctagtaacaaatggaaatgctttcccatgatccagcacatctagcagggggtgtctgctgacattctacacaaagagacacactggagttgtgcttctcatcatttcacattaagaacccaactgcacctttttctgtgcctctaaacacctgtagtctgataggggacaccccccccaagaccttaatcattcacattaacaccttgagactttttgccatatctgactgaatatagccagtcattttttcccttaaatcaagtcacttttttttttttttaaacaaagtctcattctgttgccctggcatgatctcagctcactgcaacctcctcctcctgggttcaagtgatcctcgtgcctcagcctcctgagaagctggtattacagacgtgcaccaccatgcctgactaatttttgtatttttagtagagacaagttttcgctatgctggctagaagttaaaggtcagcctggccagcatagcgaatttttgtatttttagtagagacaagttttgcggacn

SEQ ID NO: 22795 - DNA, 502 bp, Homo sapiens
  misc_feature 1, 499, 500, 501, 502: n = A,T,C or G
nattcataagaaaaaaacattttatttgcactacattgaattattcaacattttgtcttatgttgagaatttctttaaccctgaaaattgtttcttcgtgtaattccaagtaaacaatgaagtttataaatatataaagtacatgtcacatagtacagtccacaacacaacccctaagatcctttgtcactattcgactaatccttattatattcttatttttcatatattcaaaaggaatatttgacaatgaaacgtctaatatttatagaatattctctggaatcctttctataataattatgcaaaaccattataaaattatatatacaggcaagggtaattactcaaatctaaagtgccatcacacatttaaaaagccctgacaattactatgacattccagatcataagatgcttcacaatttaagacatggtaggcatgtgaagaagttgaatccatgaaatataaaaaattaaccttaatcgactgattgcnnnn

SEQ ID NO: 22796 - DNA, 1329 bp, Homo sapiens; identical to SEQ ID NO: 22577

SEQ ID NO: 22797 - DNA, 1866 bp, Homo sapiens; identical to SEQ ID NO: 21250
  misc_feature 1, 2, 168, 1861, 1862, 1863, 1864, 1865, 1866: n = A,T,C or G

SEQ ID NO: 22798 - DNA, 1993 bp, Homo sapiens
atgaactacgtgaaactgtaaaaaaatgattgaatatctccatttttatatggttcaacctaatagaatgtgagagggctcatatttgaacccaggccaatttagttcaaaagcctatactttgcattgtacctgcccgggcggccgaggtacgcggggacctcattcatttctaccggtctctagtagtgcagcttcggctggtgtcatcggtgtccttcctccgctgccgcccccgcaaggcttcgccgtcatcgaggccatttccagcgacttgtcgcacgcttttctatatacttcgttccccgccaaccgcaaccattgacgccatgtcgggttattcgagtgaccgagaccgcggccgggaccgagggtttggtgcacctccatttggaggaagtagggcagggcccttatctggaaagaagtttggaaaccctggggagaaattagttaaaaagaagtggaatcttgatgagctgcctaaatttgagaagaatttttatcaagagcaccctgatttggctaggcgcacagcacaagaggtggaaacattgtcttatttgcttcctgccattgtccacatcaatcatcagccattcctagagagaggcgatgggcctatttgtttggtgctggcaccaactcgggaactggcccaacaggtgcagcaagtagctgctgaatattgtagagcatgtcgcttgaagtctacttgtatctacggtggtgctcctaagggaccacaaatacgtgatttggagagaggtgtggaaatctgtattgcaacacctggaagactgattgactttttagagtgtggaaaaaccaatctgagaagaacaacctaccttgtccttgatgaagcagatagaatgcttgatatgggctttgaaccccaaataaggaagattgtggatcaaataagacctgataggcaaactctaatgtggagtgcgacttggccaaaagaagtaagacagcttgctgaagatttcctgaaagactatattcatataaacattggtgcacttgaactgagtgcaaaccacaacattcttcagattgtggatgtgtgtcatgacgtagaaaaggatgaaaaacttattcgtctaatggaagagatcatgagtgagaaggagaataaaaccattgtttttgtggaaaccaaaagaagatgtgatgagcttaccagaaaaatgaggagagatgggtggcctgccatgggtatccatggtgacaagagtcaacaagagcgtgactgggttctaaatgaattcaaacatggaaaagctcctattctgattgctacagatgtggcctccagagggctaggttagtacaaactcgcattcatggcttggtttcccagaagatctccatttaacttttttaaagaaagtttattgctttctttaacctgcattttttctaagttttttttcacataaaggtgctgtctttgtggcaaggcctaggcatgacaatcggaggactcgagggggatggaggactagtgatcggctggctgcttccagtcgattagagaggtgaaaaagctgaacgtgtgccagtaatcttcaaaaggcagaacatatcacctctgccccgtaaactgttctctcccgagggaaaaaatgggaagttatcctcacagttcactgccggtgggaatttcctccttggtcccaatgtctttggctgaacttgccattggttcacgcccttgtttcaaactggtgcactggtgaacacggtggggacatctggagaatttcacgcacagatctgggtgagaatgtccagagaacgaaaatcccaaattctacaagtgcaggagaaatcgcggcaatttgaaatggagaagcgataacgcagtcatatctttttcaatagggagatgtaacaacttaaaggagacgatccaactaatcgacaaaaactcatgacatcaccacacgaggctaggacacaacatactatagcatgacag

SEQ ID NO: 22799 - DNA, 596 bp, Homo sapiens; identical to SEQ ID NO: 21754

SEQ ID NO: 22800 - DNA, 2071 bp, Homo sapiens; identical to SEQ ID NO: 21824

SEQ ID NO: 22801 - DNA, 627 bp, Homo sapiens
  misc_feature 612, 613, 614, 615, 616, 617, 618, 619, 620, 621, 622, 623,624, 625, 626, 627: n = A,T,C or G
cacctgaacttgtgattcgcctgcctagcctcccaaagtgctgggattacaggcgtgagccaccgcgcccagcttcaaaaagtttaaagcagagctcagaggtcttaaccacaggtacatctgaggagcatttttgaaacagtttccagcttcctcaacaggaagagaagccaaattccgaatttatgactcctttgaggaagtcgagagctgtaaggaaagccaggaacaggggcaagggagagatgcatcccgaatgatcctgtgccaattctttctggaatctttgatgtgatctcagctgccctttctatacttgacacagtgattgtggcacccactggtctagctgtggtctacaaggaacccccaaagggaagggcacagtgagcaggggcatcggcctgagtgacaaggatttgagagggcaggttggatgcagggagaggactggccaaatgccatgtgtctggacttagactgcctggttcaaattggacttcaccctttttgacctcatgatctagtacgagttctatgaaaaggcgttgctccttttctagtctgtaaaatcatcctgaaatgtgcactaataaagtggagactacgcannnnnnnnnnnnnnnn

SEQ ID NO: 22802 - DNA, 1249 bp, Homo sapiens; identical to SEQ ID NO: 20798
  misc_feature 1, 2, 1249: n = A,T,C or G

SEQ ID NO: 22803 - DNA, 1163 bp, Homo sapiens
  misc_feature 1: n = A,T,C or G
ncatcactcccggaactcactgtatagtcttgcctattctgtgctgtaattctcacatcttaactaaaggagctaccacaactaaacaaacagacaaaaaaaaatcagagtataccttcacaaaataagcagtctatatgaaataagggagttgcatttggtttttttgtcagtaagtctgtaatgctcgatatatcaactttcagaattccagtaagtcagagcaaagagaatgaaatctgtagctcagcttgtttattttttgggtttgcttctgctgaattttgtttcccccaagtcagaatacgagtctttttgtgttctctctcttctcttattcttccgagaagtgaaggtggtgggtgtacagcccatatttgtttactttttctgtagctcatatatctattattactggtggtttcttagtggaaatttttctttcactctcactttggctttacctccaagtgctttcttctcttggctgcaattgagcactataatttgtggctttccggagggggagccttggtggtcaggtggaggaggcaggccacattccaaaagtggagtggtaggtgttccagacagagtgctgattcaagagtgagtaggggtgtagggtgaaagttggctactaattcaagcctcacctgaggcagtgttgctcaaacagaaaagtgccctctctaattagctgcccccatatgcgcttagattaatgacagccaactaacttagaaaccccttccagagtaagctagccaaacaatagatgttccatggacatgacaaagagctaattttcttgtgctaaggaatttttagctcttgtatttgtggtggactgcctcatcacctaatgaaggtgaagtacattctccattttaggaggcagagttaaaacattttcctcctgtggatgtctgattagaaaaaaaaaaaaactcatacttcactgtacctttccagcaagtcttatcctctcaaagcactgtgtaaagctttgaaattaactggttcagtgagtagattatattttggtactttcctatttgtccttaaaaacattttctgactgttggatgtaaaagaagatattaatgaaaggttgaaacttcattatcattgattctttttaaacaccccccttaattaat

SEQ ID NO: 22804 - DNA, 1900 bp, Homo sapiens
  misc_feature 1897, 1898, 1899, 1900: n = A,T,C or G
tcgacccacgcgtccggggggcggagcggcgggcggggcgtcgccgtactaggcctgccccctgtccggccagcccctcgaagcacctactccacaggtccagccggccggtgagcgcctggggaccgcagaggtgagagtcgcgcccgggagtccgccgcctgcgccaggatggagttcgtgaaatgccttggccaccccgaagagttctacaacctggtgcgcttccggatcgggggcaagcggaaggtgatgcccaagatggaccaggactcgctcagcagcagcctgaaaacttgctacaagtatctcaatcagaccagtcgcagtttcgcagctgttatccaggcgctggatggggaaatgcgcaacgcagtgtgcatattttatctggttctccgagctctggacacactggaagatgacatgaccatcagtgtggaaaagaaggtcccgctgttacacaactttcactctttcctttaccaaccagactggcggttcatggagagcaaggagaaggatcgccaggtgctggaggacttcccaacgatctcccttgagtttagaaatctggctgagaaataccaaacagtgattgccgacatttgccggagaatgggcattgggatggcagagtttttggataagcatgtgacctctgaacaggagtgggacaagtactgccactatgttgctgggctggtcggaattggcctttcccgtcttttctcagcctcagagtttgaagaccccttagttggtgaagatacagaacgtgccaactctatgggcctgtttctgcagaaaacaaacatcatccgtgactatctggaagaccagcaaggaggaagagagttctggcctcaagaggtttggagcaggtatgttaagaagttaggggattttgctaagccggagaatattgacttggccgtgcagtgcctgaatgaacttataaccaatgcactgcaccacatcccagatgtcatcacctacctttcgagactcagaaaccagagtgtgtttaacttctgtgctattccacaggtgatggccattgccactttggctgcctgttataataaccagcaggtgttcaaaggggcagtgaagattcggaaagggcaagcagtgaccctgatgatggatgccaccaatatgccagctgtcaaagccatcatatatcagtatatggaagagatttatcatagaatccccgactcagacccatcttctagcaaaacaaggcagatcatctccaccatccggacgcagaatcttcccaactgtcagctgatttcccgaagccactactcccccatctacctgtcgtttgtcatgcttttggctgccctgagctggcagtacctgaccactctctcccaggtaacagaagactatgttcagactggagaacactgatcccaaatttgtccatagctgaagtccaccataaagtggatttactttttttctttaaggatggatgttgtgttctctttatttttttcctactactttaatccctaaaagaacgctgtgtggctgggacctttaggaaagtgaaatgcaggtgagaagaacctaaacatgaaaggaaagggtgcctcatcccagcaacctgtccttgtgggtgatgatcactgtgctgcttgtggctcatggcagagcattcagtgccacggtttaggtgaagtcgctgcatatgtgactgtcatgagatcctacttagtatgatcctggctagaatgataattaaaagtatttaatttgaagcaccatttgaatgttcgtaatagggcccaattggggccatttggccttcgcccataggagggggttacaataactggccgggtttcaacccgggactggggaaaccgggggggccacnnnn

SEQ ID NO: 22805 - DNA, 889 bp, Homo sapiens
gcgtccgcaacggggaatgcgagtctggtccctcgcgctccccgccccacgcgcgtgaccagagcgcgctggcccggcccacccggggcggttgtggtcgctatatataaggtggggaggccgccggcccgttcggttccgggcgttaccatcgtccgtgcgcaccgcccggcgtccagatttggcaattcttcgctgaagtcatcatgagctttttccaactcctgatgaaaaggaaggaactcattcccttggtggtgttcatgactgtggcggcgggtggagcctcatctttcgctgtgtattctctttggaaaaccgatgtgatccttgatcgaaaaaaaaaatccagaaccttgggaaactgtggaccctactgtacctcaaaagcttataacaatcaaccaacaatggaaacccattgaagagttgcaaaatgtccaaagggtgaccaaatgacgagccctcgcctctttcttctgaagagtactctataaatctagtggaaacatttctgcacaaactagattctggacaccagtgtgcggaaatgcttctgctacatttttagggtttgtctacattttttgggctctggataaggaattaaaggagtgcagcaataactgcactgtctaaaagtttgtgcttattttcttgtaaatttgaatattgcatattgaaatttttgtttatgatctatgaatgtttttcttaaaatttacaaagctttgtaaattagattttctttaataaaatgccatttgtgcaagatttctcaaagattaggtatatatttaaatggaagagaaaatatttttatgggagaaaaatacatttgaaccatgaaatttcatcttttaaataacatccagtacagatatctgtg

SEQ ID NO: 22806 - DNA, 860 bp, Homo sapiens
  misc_feature 1: n = A,T,C or G
ncgacccacgcgtccgctgacctcttgccacaaactaccacttctttaggcatctcagcaacgttttgcagggaaattgcttccacaactagcaggacacagaaaatgctttccaagagttcgtcaaatttggaagcatggatttttatgctacaggagtaaacaaacttatttctcattggcaaaaatgtgttgattgtaatggttcctattttaattaataaagatttgtgtgaacctagttataatgacttaaaattcatggtcccaaacagcaattacttttgcaccaaactaaaaatataagttaaaatggaagagtctaggagcaaaccaagaaaagatcacctacttcatcatctctggtcaaaaacaaaccaaaaaacttaacagctatcacttaagtttgcttcctagcaattatttagcttccagtctagattacaggatatataaaactttctttctttctttcttaactatgacactggcaccaatgagagtcctgtgactgactttcacatttccaccattactcaattactggtaccataccacctctaatcccctaaatcaaactgcaattcaacaataaagggcgtacagagatgactttgtcctgaaggaaaatgaatatccttgtaccctctatatagctaacttccaaatgtaagagaactatggggtaaccttttgtttctattcctatcaagatgagcctttaagagagggacttttattaagctcttgaccaagaagaatacacttgattcagagtttctgatgctcttaatcagaactatatgtattgtctcaatattaaataaagtcaaatgtttccatacaaaaaaaaaaaaaaa

SEQ ID NO: 22807 - DNA, 1880 bp, Homo sapiens
caaattcatttggttttcctcaaattcgtgtaaaaaaaaaaaaacccacaaacttgccatctactatttctccaggactggcagtctgccctcaaaagcttcagacaagattcatgagtataagcctgaaaaagagaaacctacaacacccggaaatcggcctacgtccccatataaatccctttacacctcagtacgaaactcccccattatattagaaaataaataaaaggttaccataagtaagttccagaaaaacaacatattgccgacctcacggatttttaccaaccactcgctttccctgtggccttggcacactggcatgctggtctaggatcctctacgcacaacgcctgctcgcctcctccgtgtggttgccaagccaagccgcctgctaccttcatcaccaaattgcactcgctccttcctggaatcctttttcctagcttcaccaccaaatcgttagcgctccttccttcttcctagcttccttcaccaaatcgcactggctcctggactcttttcctatcttcaccacgaactgctgcttgctcgcttgctcctcagtcctagcttcatcaaacactggttcctggaatcctgtctgctgctgtcttcctagattcactgaatccacttctgtgtagcacctgggtcagctgtcaattaatgctagtcctcaggatttaaaaaataatcttaactcaaagtccaatgcaaaaacattaagttggtaattactcttgatcttgaattacttccgttacgaaagtccttcacatttttcaaactaagctactatatttaaggccttccaaattcttctaactcttccaaaagccttctgccttagttttttttaaattacaccagtccttttagtagctttttgatgtgatttttaaccaacttccccttctagcttcaagtattcttctaaattggttctggtctacgtaaacaccctcatcttctcaagctttaccttctaacttctgcaccaccagaaattaaattgatgggcttttaaaataaattggttaccaataatttcctcattttttcagtgctattttatccaatttttggctttatatttttctatcttctatacttctccaatacttgtcttagcttgtttttcattttctatctgaaactcttgacaatattttcattttctatcttgtttctatcttccaattttcttctaagtttgtacattttgcccttagctttttgtttcctagcttgtcttttttcttctgcttcctacttttcaggtttaaatttatcttttttcttctaaaagtatgtttttatcttctaatttccctatcttctctattcttttcttcgccttcccgtacttctgtcttccagttttccacttcaaacttctatcttctccaaattgtttcatcaccaaattgcactcgctccttcctggaatcctttttcctagcttcaccacaaaatcgttagcgctccttccttcttcctagcttccttcaccaaatcgcactggctcctggactcttttcctatcttcaccacgaactgctgcttgctcgcttgctcctcagtcctagcttcatcaaacactggttcctggaatcctgtctgctgccgtcttcctagattcactgaatccacttctgtgtagcacctgggtcagctgtcaattaatgctagtcctcaggatttaaaaaataatcttaactcaaagtccaatgcaaaaacattaagttggtaattactcttgatcttgaattacttccgttacgaaagtccttcacatttttcaaactaagctactatatttaaggccttccaaattcttctaactcttccaaattcctcccgccttaattaat

SEQ ID NO: 22808 - DNA, 3983 bp, Homo sapiens; identical to SEQ ID NO: 21101

SEQ ID NO: 22809 - DNA, 623 bp, Homo sapiens
  misc_feature 596, 597, 598, 599, 600, 601, 602, 603, 604, 605, 606, 607,608, 609, 610, 611, 612, 613, 614, 615, 616, 617, 618, 619,620, 621, 622, 623: n = A,T,C or G
agtcgacccgcgcgccccaatctttgggagagtttcagtactggcatagaatttaaatgtcaaaattctttctgaaaccctttctcctagaaactaggaaataataggtgtagaagactctccctaagggtagccaggaagaagtctcctgattcggacaaccatgaggggtagtggtgctagggagaaggcaaccttcactggttttgaactcagtgcctaagaaagtctctgaaatgttcgtttttaggcaatataggatgtcttaggccctaattcaccatttcttttttaagatctgatatgctatcattgccttaataatggaacaaaatagaagcatatctaacactttttaaattgataattttgtaaaattgattacgttgaatgctttttaagagaagtgtgtaaagtttttatattttcacaattaacgtatgtaaaaccttgtatcagaaatttatcatgtttactgtttaaaatgattgtatttataaaattgtcaatatcttaatgtatttaatgtagaatattgctttttaaaataatgtttttattttgctgtagaaaaataaaaaaaaatttgattatannnnnnnnnnnnnnnnnnnnnnnnnnnn

SEQ ID NO: 22810 - DNA, 815 bp, Homo sapiens
  misc_feature 1, 2, 3, 4: n = A,T,C or G
nnnnaaattgggacaggatcggtatagtggctaacgctggtaatcccaccactttgggaagtcaaaatgggtggttcacttgagcccaggagtctgagaccagcctgggcaacacggtgaaaccgcatctctacaaaaagtacaaaacagcaggcaaggtggcgcacaacctgtagccccagttactcaagggtcttgaggcggaagatccctcaagcccaagaggtcaaggctgcagtgagtcatgatcacgccatgccacggcactccagcctgggcaagacagtgagaccccgcctcaaaataaagtaaaatataaaataaaaacagcaagtgggaactcagcattcaagttaacttgtagagctacccagctgctaagagcagtgtgatctttggtgctcttaggatcactttggtatctgctcattttcctttttgtctaccctataaagcacaaaatcgagtgggtaaaaagtatgaaaccagcactgtttctactttcttagaggtctggtatctagtgagcaggctgaggcctcaggactagttcagtgttaaggatttcatgttgaaactcatttgtcctctgtgggttttttgacagtagagagtgacctaactcgtttgattttgtttttccctcagttgactttccatcttcagttcgaatacatttattgaccaaaatggcagacattgagtgagtacttcttgccccagttttaattcttttcttccttttttcccctgttgtgagttatttgtttcaactttcttggtttcaggtttttttcctaaatcgttcacatacg

SEQ ID NO: 22811 - DNA, 644 bp, Homo sapiens
  misc_feature 1, 27: n = A,T,C or G
nagcggctgtgaggctcatcacatcgnagctagagagacgctgaccgagcgaagctcacgacgagtcgcgcacgcactcagctgaggacagaggagctcgtctcaaaaacaaaacaaaaacaaaaacaaaaatcttactgtggtaatagttgcatagctcaggaatatagaaaaatgatggaactgtacactttaaatgactgaattgtatatcaataaagctgtttaaaaagatattctaaaacaactataatagcagtgtactgtggagtatattttatatatagaactataatatatagtaacaatagcacaaagcatggaaaggggtaatcgaaatatactacagtaaagttctgacattttacatgaaatgtagaatattatttgactatagactataagttaaagatatatattgtaaaccctaaagccacaactaaatatttaaaataaagatgtatagctaataagggaataattactatgcaatagattaataaaaaattctcactctgaaagagaaaaaaagaagaaaagaacaaacagagcaaatagaaaccaaatagcaagatggtaggtttaaacccaacattattgataattacattaaaggctgaatattccaattaaaggcagagact

SEQ ID NO: 22812 - DNA, 1159 bp, Homo sapiens
  misc_feature 1015, 1154, 1155, 1156, 1157, 1158, 1159: n = A,T,C or G
cgacccacgcgtccggcggtgttctgcaaaatgggttctccggcagcggattcgacccacgggtccggcaagtgctgcgaaccacgtgggtcccgggcgcgtttcgggtgctggcggctgcagccggagttcaaacctaagcagctggaaggaaccatggccaactgtgagcgtaccttcattgcgatcaaaccagatggggtccagcggggtcttgtgggagagattatcaagcgttttgagcagaaaggattccgccttgttggtctgaaattcatgcaagcttccgaagatcttctcaaggaacactacgttgacctgaaggaccgtccattctttgccggcctggtgaaatacatgcactcagggccggtagttgccatggtctgggaggggctgaatgtggtgaagacgggccgagtcatgctcggggagaccaaccctgcagactccaagcctgggaccatccgtggagacttctgcatacaagttggcaggaacattatacatggcagtgattctgtggagagtgcagagaaggagatcggcttgtggtttcaccctgaggaactggtagattacacgagctgtgctcagaactggatctatgaatgacaggagggcagaccacattgcttttcacatccatttcccctccttcccatgggcagaggaccaggctgtaggaaatctagttatttacaggaacttcatcataatttggagggaagctcttggagctgtgagttctccctgtacagtgttaccatccccgaccatctgattaaaatgcttcctcccagcataggaaaaaaaaaaaaaaacaaccaaaacaaaaaaccgggggccttttcggggggcgggcacacacaggctggtacggacacggcgcacacgggccatacggcggtctcctggacccagtctttttgtccaaagggggggaactgggggcccccaaaaggggccgtataattcgaaacccagggtacgtgaacaccacgaaacaaaaaangcaacaagaagggagaaagcacaacataaaacaagggcaaaaacaacgccactaccccacacacaaactacaaccgaacgacacgacacaacgaaagcgacggccaccgaggcaacgtcgcgaaaaagtcgaagcacannnnnn

SEQ ID NO: 22813 - DNA, 1167 bp, Homo sapiens
  misc_feature 1, 2, 3, 4, 5, 6, 7, 8, 9, 10, 11, 12, 13, 14, 15, 16, 17,18, 19, 20, 21, 22, 1167: n = A,T,C or G
nnnnnnnnnnnnnnnnnnnnnntttttttttttttttttttttttttttttttttttttttttttttttttttttttttttttcggttttttttttttctgttgatatcagtattttattacttgcgttatgagtgctcacctgggaaattctaaagatacagaggacttggaggaagcagagcaactgaatttaatttaaaagaaggaaaacattggaatcatggcactcctgatactttcccaaatcaacactctcaatgccccaccctcgtcctcaccatagtggggagactaaagtggccagggatttgccttaggtgtgcagtgcgttctgagttcactgccgattacatctgaccagtctcctttttccgaagttccttccgttcaatcttgccagtgatggtttttggcagctctgagacaaactccaccttccttgggtacttgtatggggctgtcactgacttgacatgctgctgcagttccttggtcagctgatccttgtcatgggacaggaactgtggggtcaggacaataaaggccttcaccacccagaggcattaatgatgtcatcactcctccccaggaaacaaatgtagccctcttcatccatctttcctctgtccccagtgttgtagaagtccccacattccactttagctgtcttctctgggtcaccctcatagcacatgaagaggctcacaggcctgacaggtttgattctgatgccaatgtttccttctgtgttaggtggcaggatgctgcccttgtcatcaatgacctggacgtcatagggtgggaatcatacactgcaggaggccgcagcccttctgcccctcccaagcactgtctggtttatgcatgggacaccagtgtggatgaaataacagaggaaacatcagaaaatggaataaaactgtcaaaagcctttaaaatacgcaaatgtgaaactcaagccaagggtctatgtttcatgagttagtagatgtcaccaatgtgtcttcaagttggaaaacagtgatcaaaaaaaatgaaaagcaccacttgctagagagggctcccagtgcagcctctaggtattctttcctacctactgtgtgtgatgccctggctgccagggtcagcggtgttcatgctcacaataatgcagttttcaactgan

SEQ ID NO: 22814 - DNA, 3855 bp, Homo sapiens; identical to SEQ ID NO: 20695
  misc_feature 1, 2, 3854, 3855: n = A,T,C or G

SEQ ID NO: 22815 - DNA, 1013 bp, Homo sapiens; identical to SEQ ID NO: 22649
  misc_feature 174: n = A,T,C or G

SEQ ID NO: 22816 - DNA, 985 bp, Homo sapiens; identical to SEQ ID NO: 21932
  misc_feature 1, 2, 3, 4, 5, 6, 7, 8, 9, 10, 11, 12, 13, 14, 983, 984, 985: n = A,T,C or G

SEQ ID NO: 22817 - DNA, 569 bp, Homo sapiens
  misc_feature 1, 551, 552, 553, 554, 555, 556, 557, 558, 559, 560, 561,562, 563, 564, 565, 566, 567, 568, 569: n = A,T,C or G
ngccaaagcgtagtacccaagatgcaatctggtccaagatgatagttaggagaagatgaccagactatttacaggtttttttgttttttgtttttttgtttttcatttcccctggggacactaagtgatgcctcttcggattatctgaaaatgtgggcactctgtatggcaagatggaactggctgtctttaaggaaatagtttcaactgttcatgcctctgtttctcccttcataaagttggttactgagcctgcattctaaagtgcctgttgtggccgggcatggtcccctgtaatcccagcactttgagaggccaaagtgggcagatcacttgaggtcaggagttcgagaccagcctggccaacatagtgaaaccccgtctctactaaaaatacaaaaaattaaccgggcatggtggcgtgtgcctataatcccagctactcaggaggctgaggtgaaagaatcgcttgaacccaggaggcagaggttgcagtgagccgagatcgtgccactgcactccagcctgggtgacagaacaaaacttcatcnnnnnnnnnnnnnnnnnnn

SEQ ID NO: 22818 - DNA, 453 bp, Homo sapiens
  misc_feature 445, 446, 447, 448, 449, 450, 451, 452, 453: n = A,T,C or G
acaaataaatgttaagacatgatccctgttgaaatccaaaagataaaaagcccttaagttttcttattttatattataaatggacaaggcagcaaatggtattaaggatacttttggtaagagaatagtttttatcaagagccagggctgcaggtagaatatttctcaattactatttacagctgagtaactgttttcctatggacataaaaatatacactctgcaaatgattttttaatgaaaaatgacagcctattttctgcaacttggttttttacataataatcatggacatacatctaagattgcatatgtagatctcctgttttgatgatcacctagaattctgttttgtggttgtgcctttaattgaccaatgtcttgctatttactgtaaatggtgcaagagtgaacatcttgaaaagggcggcagagtggtcttannnnnnnnn

SEQ ID NO: 22819 - DNA, 1662 bp, Homo sapiens
ctaccccacgaaaactaatatattctattttagtcttcgtaggttgactaataaaaaggtctaataattcaggcacacactttggccaagtttagctttatcacatctaaaaaaaatttatgtataaaacaagtatcagttcaaaaatatagattactttttaagaagaacctgcaggaagtataaaaatattaaatctggtggaaaggaactgttacacctgcctgaaattgagaggctgtaatgttaatgtacattacagtattgttaggtacagctgctctccaggcagcttgttttaccgtttagatcagaggtactcgacacagatttccaattcatgttactaacaggcgcccttaaagtgctccattccccttgcttggtactccaaaaaaccatcctggtcccattatcatgtcctttcaaagaagcataatggctagccattttggacttctagagagagctcttcggagatttttcttctagaagattaagaagtcttttaagaattacaggttcagacatacactcatcacaacagtctagattgcttcgaaatacgaaatgaagctgaaattaatttttacatttaattttataccttaaatttctttatcattgaggtgccaatgttttaatggaaaagtagaaaacagtataaaattcagtatcacctatttgtctcaaatacgagtacagtgaatattaaacaggaatgacaacagagtagcaaaaacagaactggtagatttgcccaaattaactgtttctccaaatttgaggtttatggcaagttgaatgtttgatctctcagcaattgttaattacattatcagcttaacgctttcaaacactacgggaggcatttctctgttcacatagacttaagtacacatatactaagctgtaaatagtctgccttccattagtttggtctctaagcactataaatatgtcgacttcatatcagtctatgagacccagtgacccccttttcagaggcatcggtaatacatttggcaaatgtcttgaaacatgaattgtaaattaacataggtagaaccttgataataagagtcccaaatatgtatttttaaaaatgttaacattaggaaaaaaatattataatcatcagctctatttcctgaaaaagttcagttgaggtaacctctgcaagtcacagctccacatttacatactgttctgaccctctttttggctgggctgtggtcaatagaatctgaagatatatctccagaacctttcatttgataatcaaaagtcagctcttctccagcatttatggttcttgtggaaaacaatgctattcggggaagacgagtatcgaggttatcaatgaaaacattgaacacctgaagatttgggtcacagctgtgattcacaaaatgagacacattgccgtatcgagccgcatccactgtgaattcatcagactcatagtccagatcaaagagatacgtgattcccttgttgtcatagaactgtcctcgtctttcagcttcttcacttgtgattacctctccaacatattccatgacaaaactcattcttttaatcttcacaagggtctttacaccccagccacgtccattgctagttcgaaagatgcaaagcgaatactgtgtgcctttttgt

SEQ ID NO: 22820 - DNA, 5145 bp, Homo sapiens; identical to SEQ ID NO: 20824
  misc_feature 1, 5144, 5145: n = A,T,C or G

SEQ ID NO: 22821 - DNA, 437 bp, Homo sapiens
aggcggagtttcacctgaccttaggtgatctgcccaccttggcctcccaaagtgctgagattacaggcgtaagccactgcgcctggcctcaaattctttttaaattctttttaatgtaaaacaatagaattaggaatccaaaaaagaataaagaaaactggactgacataacaaagacaggaagaaaacaaacagaatgcataattatcagtataaaagatggcttaaaatcaaatgtagcagttattacaaaagagagtcaaattcccctactaaaaggtaaaaactctagagttaaaagacaaaagctatttgagacaatgtacctgcccaaaagggtatacccagacaaacccaaattatctcctttgagcaataaatctcatctgcaaaaagagataacattcatacctgaaatgattcccactttaattaat

SEQ ID NO: 22822 - DNA, 2556 bp, Homo sapiens
cgcgtccggtttatcggttaagtaatttgctattatattgtaaaatagtacatttgaggctcacttataaaaattggaaaacatcgaaatataagaggtccaagagggtgtttgaaacacattttgctaagttgacaggaaattaatagactttttatgggccattaactaataatacactcaaaaaaaaggtacagttaaataaaggttttaaatagtctataccgtatactaaaactaaattaatatttaggactgaaataacatattgattaagtaccagctatgtacccaaaaaatgctgggcacagaagttagagtaagatgttttacttaaagggcctttgagtgagagttggcaattcattctgaactaaccactaatatcattaagaattagtgctgagttggtagcaggaaataggtaattctgtctaaaggaatcatgaaatggaaaataaataagcttttaataaggagaaggaagagctgaagaaatggcacagtgttcttagaatgacagatagtcctatggggactgcagcataaaagtgaaaaatgtataagataaacctttagatggtaagcaaggcaagattctcaaattctgtatgaatcagctccacctccgccccatggacagtagatgaccgttaatggcttttaaggaaagatgcaacctggaaaaaaagaaaaaaaacttgttttagaatggtaaccactggcaatatgaagaataattagactaaagaagagaggtaggataatcatgggcattggcagtggaattgaaagagtaatttcagaagcagaatggtcagatgttggaggtgattggttatagagtttaagaattgtactgattttctattgtgtaacaaactaccccaaaacttaatggcttaaagcaactattatttctcctgattctgtggttgactggatggtcgtctgctgctcttgcttagacttaggcatctgcatttagctgagggttcagccagggctggacatcctttaatggcctcattcccatgtctggggcctcaggtcagatagctgggactaccgggtctcactccagaagaggcttcttcagagcatggtagtcttggggttctaagagaatgagagtagaagctgcaaaacctcttgaaactggggcttgggagtcacacatgactttctccacattctgttcgtcaaaagcgaatcataaggacagcacagactcaagggataagaaaggagattccatctcttgatgagaagagctgcaaaggccatatttaatcagtcacaggagtctaatgctacaaagtagttttttaaaaagatgactagattggcaagttcaaggttaatctttttatttgttttatttatatatcacttagctggtattcagtaaaagcttgctttgtaaaatttagttaatatctttttggttcagcacagacattgcatcatcttagcagctctttttcaaacagatttgaagctgcttcaaataacaatctggtttataaaatgaaaatagaaaattatgatcttagaatgaagaagtgaatttctaagccatgataattattacggttgctgtgattagacagacttttctgtggagcttcctgacaaccaagaaaaaaggggaaatcaaggaactgttcttatcagaaagtaggaacccagcaattctttcattttctcattgggaacttaatagtcactgaattacaaagtagacagtgaccttgattatacaacatatgcggaagtgtttcctgtaacttacgtgagtattttatcaaatacttatatatttgataaaagctaagtacataaagcataactcagtagatagaattctctagtagtaagctaaagtgcttcaagtattagttgtcatattaatccaagagaaaattagatctgagactacctcgaggagtaaacgaacaacttctttaaaccaatactagtcaaaatgcagtccacggaccaatgctggttcatgccctatttgatccaagtccacattaagtacagaaatgaagagtaagcatttagaaacttggggcaatttgacattgcctcaacatccaagtttcagtgtcctttataaactattgatccatgacagatcatgaaactttctaaaaattgatccttttatcacatagtctttcaaaatattatttgcttctttgaagctttggatagaaacttgataatgtgaagttctctgctatgtggacctggtgtgcttatcttctttgttgctgatttgagagctgagctatgtactatatctggaatgcacacagcaggcatcctgctgtgcagttctgtgtctagttaatagtatggaagttcacattatcaagtttctatccaaagcttcaaagaagcaaataatattttgaaagactatgtgataaaaggatcaatttttagaaagtttcatgatctgtcatggatcaatagtttataaaggacactgaaacttggatgttgaggcaatgtcaaattgccccaagtttctaaatgcttact

SEQ ID NO: 22823 - DNA, 1132 bp, Homo sapiens
  misc_feature 1, 2, 1120, 1121, 1122, 1123, 1124, 1125, 1126, 1127, 1128,1129, 1130, 1131, 1132: n = A,T,C or G
nngcgtccgtacaggttcagagaacaatagaggattcctgcaatcttttaatgccttgattttgaaaatggttttacagaattcatctcccaaagtaaatatcagtatatagagcctgttcaacccttcagttagcatttcctgccaagaatgtaggttaaagcaataaggttaattgcatcaatctttgtttttggcttctttagagtgaagaaaggacatgaattcagctttttattgaattcctaatatatgctaggcatggtgcttctttgcttccaccacatcttcttgtttgatccttatagcaaccttgtaggaaatttggatgccagagattttaagtgacttctgcgttacacagttactaagttgcaaagctaggagttctctgggacaggcaaatctggaggagagccaataacttgattctgatataagatttctataaaagaattaacatctaattgattgtaaagtgtatagaacttgataacaaaacttgatatgtaattaaacttgttaaattgtgaatcatcccagtcaaagataactaaaaaaaaatcagtcttctaatatcagtctctaagggtatagtcatatatgcaaaaataatagcccttaggaaatatatttaggcctaaatctctaagctaaggatggatttgatagtaaaaatacattaaaattataaatagctccaaggcccacacactgcccatgactttataaaatgttcttgcattcaggttatacagccagagtcttaattcagaaagccagagtgttcctctagtgtgtggatttgattttgtgtctttgtgcttcctgttgcctcctggtgaacgcagttctgacctttcctttgtttgcaggtatgcttcagaagtgtccttctgttgatgacttcgtaagtgccctcgtttccgacttggatctggacttcgaaactttcctcatggattctgaataaaagaaacactctacacctcttaaatcaaggtcatgtagataatgactttgttataaatgctacagctgtgagagcttgtttctgatttcattgttcgcttctgtaattctgaaaaactttaaactggtagaacttggaataaataannnnnnnnnnnnn

SEQ ID NO: 22824 - DNA, 877 bp, Homo sapiens
acgcggggacagctgtgtttggctgcagggccaagagcgctgtcaagaagacccacacgcccccctccagcagctgaattcctgcagctcagcagccgccgccagagcaggacgaaccgccaatcgcaaggcacctctgagaacttcaggtaggagaaaagcaaactccctccaacctcttacttcgggcttaaggcagagaactcgcctccccagaatctcctccctccatgatcccccgctattcctctattttcttttcctcggacctgcagccttgggtcgaccctgccctaggggtgactgcaggagagcagggaggatggtcaggcgtcaccaacaaccccatcacccagtaacaagaaccttgactctctcagtccctctgcatcaagacacttacccatttcccacctcatgcctgctaacttgaatgaaacaatcgctgggaaagcattaagagaattaaggctgggcactgtggctcatgcctgtaatcccagcactttgtgaggctgaggcaggcagataacttgagcccaggagtttgagaccagcctgggcaacatggcaaaaccctgctctcccaaaaaaatacaaaaattagctgggcgtgctggtgtgcctgtattccagctactgtgggaggctgaggtgggaggttgttcagctggggaggcggaggctgcaggcagccaagactgagccattgcaccagctgggtgacagagcacgacctgtctctaaaatgatcacacaacagcaacacaaaaaaactttgcggcccggcccacaaaagttaaacactgtggggggggccagggaatgaaagggcaaggtgccagaaccgggacagggggtcccacaaaccgggcaa

SEQ ID NO: 22825 - DNA, 504 bp, Homo sapiens; identical to SEQ ID NO: 22504
  misc_feature 1, 2, 3, 4, 5, 503, 504: n = A,T,C or G

SEQ ID NO: 22826 - DNA, 552 bp, Homo sapiens
  misc_feature 548, 549, 550, 551, 552: n = A,T,C or G
acgcgggggctcagtttgggcttggatggccgcgtttattttccttggcagagaagctgatcgtcgaagggcatctaaccaaagcggtagaagaaacaaagctttcaaaagaaaatcagacaagagcaaaagaatctgatttttcagatactctgagtccaagcaaggaaaaaagcagtgacgacactacagacgcccaaatggatgagcaagacctaaatgagcctcttgccaaagtgtcccttttaaaagatgacttgcagggtgcacagtcagaaattgaggcaaagcaagaaatacagcatcttcgaaaggaattgatcgaagcccaggagctagctagaacaagtaaacaaaaatgctttgaacttcaagctcttttggaagaagaaagaaaagcctatcgaaatcaagttgaggaatccactaaacaaatacaggttcttcaagcccaattgcagaggttacacatcgatactgagaatctccgggaggagaaggacagtgaaatcacaaggacttgagatgaattgcttagtgcccgagannnnn

SEQ ID NO: 22827 - DNA, 479 bp, Homo sapiens
  misc_feature 477, 478, 479: n = A,T,C or G
acgcggggatatgaggggttccgtgactgaggttctgagctgctgttgatgtgctatacctccttcaattctcagctctcaaaggggaaaacaactgcagaggatgggaaatgctatactgccatgcctggaaacacccacaggaaaattaccagttttgagcttgctcaactgcaagaaaaactgaaggagacagaagcagccatggaaaaattaatcaacagagtgggacctaatggtgagagagcacagactgtgacttctgaccaagagaaacggttgctacatcagctccgagaaatcaccagggtcatgaaagaaggaaaattcattgacagattttctccagagaaagaagctgaggaggccccttacatggaggactgggaaggttaccctgaagagacttacccaatttatgacctttcagactgtatcaagcgtaggcaagacacaatcttggtggattaccctgannn

SEQ ID NO: 22828 - DNA, 1746 bp, Homo sapiens; identical to SEQ ID NO: 22657
  misc_feature 1741, 1744, 1745, 1746: n = A,T,C or G

SEQ ID NO: 22829 - DNA, 455 bp, Homo sapiens; identical to SEQ ID NO: 22019
  misc_feature 1, 454, 455: n = A,T,C or G

SEQ ID NO: 22830 - DNA, 624 bp, Homo sapiens
  misc_feature 1: n = A,T,C or G
nactacctgtattgttgggtatgactatcaaaggatttccggtgattcatgtttgtgaattggagtttaaatgtttgcaggattactgtacttccatagacccactagaatgtcagctgtactctgtactctccactgagaaaatgaacaaaatcctatgtcttaacagttatgctctaactttttgaaagctttttgatgtaaataataggttagaaactaaaagccttttaatcttacaaaatacaatttgaacgatggaaggttgttcagatactggctttctgtaaaaacatcattgtgttagattgtttgtaatgtactatcaataaaattggctgcttgggcggttttagttaccaccttagcctggttttctgctactgttatttatcatcgtaggttctgagttgctcattgtggttgctctttggaccaataaaaatggcaagtatgagatgaacatgataaaagtatgtttatataacaggaagaagctgggcgcggtgctcatacctgtaatcccagcactttgggaggctgagttgggtggatcacgaggtcaggagttcgagaccagcctgaccaacatggtgaaactaaaaattcaaaaattagctgggc

SEQ ID NO: 22831 - DNA, 4237 bp, Homo sapiens
ggacgcacgcttcccgccattttgttcagcttgccgggcaaccggcccctgctggggactacaagtcccgtaagcctccgcggcggcacgtcctaccctacactgtccagccggctccctttttccccctccccgggggccaagggctccggctgctgcctggcggccaacgggccaggtaggatttccgggagaggctgctgtggaggctgaggaggcggcggcggagatctggaaacagtatctcacctccctaaactggttaatagtggcatggaagatccatttgtgacactgaaagaggaccgcatgtcccctctttatgtggatttatcttttatgaaaagtttgcttttgtccggcacagtttgttgtcgtgagatacatcagacagtataatcatgggacaagctgatgtctccagaccggtaaatccagatgcagttgacttctccagagaaccttggaacaaggaagcagaccagcccactacagagccaggcatggtcctggacagtgtggaagcaggagacacaacacctcctaccaaaaggaagagcaagttctcaggctttggcaagatcttcaagccctggaaatggaggaaaaaaaaaagtagtgataaatttaaagagacttcagaagttttagaacggaaaatatctatgcgaaagccaagagaagagctggttaaaagaggggttctgttggaagaccctgagcaaggtggtgaggatccaggaaagccaagcgatgccatgttaaagaatggccataccacccccatagggaatgccagatcatctagtccagtccaagtagaggaagagccagtaagattagcaagtcttaggaaagctattccagaagaggacctaaagaaacgactaggctcaactggaagccagcctaattctgaagcagagtctgttcctgagaatgtacccaaaccacctttacttcctcccaaaagacccttgtcctcttctcatgaagcaagtgaagggcaagcaaaggatgccacttcctctggcggcacggcaaggttcatcatctccacctccatcaccacagcacccgctgccaccactgctgccacaagccttgcaaagactgttaatctctctgtcaccccttccccagcacccaggactctgcctgctgctcctgccagcactaacactactgctaccccaagcctcactcatatggtccctgccaagcagccccctatccctccccctaaaccagctcacagaaatagcaaccctgtcattgctgaactgtcccaagcaataaacagtggtacattgttatcaaaaccgtccccacccttaccacctaagagaggcattccatcaacctcagtacccaccttggagtctgctgctgccatcaccacaaaaacaccaagtgatgaaagagagaagagcacgtgttctatgggctcggaactactaccaatgatctcacctcgctctccgtcccccccactgcctactcatatacctccagagcctccacgcacccctccattccctgctaagacttttcaagttgtgccagaaattgagtttccaccatccttagatatacaccaggagattccccagcaggaagatcagaaaaaggaagtccccaagaggatactggaccagaactttggggagccccatataccctctaggctgcctccactcccactgcatattcgaatccagcaggccctcaccagcccacttcccatgactcctattctggagggttctcacagagctcattcgttgctttttgaaaacagtgacagcttttctgaggacagcagtacgctgggtcggaccaggtctcttcccatcactattgaaatgctaaaagttccagacgatgaagaagaagaggagcaaacctgtccatccacattcagtgaagaaatgacacctacctcagtcattcctaaattaccacagtgtctacgggaggaagaagagaaggagagcgactctgattcagaaggtcccattcagtaccgagatgaagaagatgaagatgaaagctatcagagtgctctcgccaacaaagtgaagaggaaagacacactggcaatgaagttgaaccacagacccagtgaaccagagttgaacctgaattcttggccttgtaaaagcaaggaggagtggaatgaaatacggcaccagattggaaacacactgatccggcgactgagtcaaagaccaacaccagaagaactagaacaacgcaatatattgcaacctaaaaatgaagctgatcgtcaggcagaaaaacgagaaattaaacgtcggctcactagaaagctcagtcaaaggccaactgtcgctgaactccttgccaggaagattctgaggtttaatgaatatgtagaggtaacagatgctcaagattatgaccggcgagccgacaaaccttggaccaaactgacccctgctgacaaggctgccataagaaaagaattaaatgaatttaaaagctccgagatggaggttcatgaagagagcaaacattttacacgctaccatcgtccatgatgccaaaggttgagagaggaatcaacatggctgctttgctgcttccttctccaaagtgacatatggagggaactttagcacttcccagcacagccagaattgcatcctctgggatcttctgaggtggacagcactttgaatgtagcatttcactggaacagagtcttatgtgctgcaccgggggcaaaacaacactttgtcagtgcttttgaacctttcaatattgtagcatgcttgaggagtttttcccttactggccaccaaagttctgaaccacttgcaggttccaggttttactggctgcaccacaccccttcccctagatgactgcctgtgcagagacacagtttgcaccattagccttacctgccctgccctgattgtgagacccaaatgtgtaggctctaaattccagccatcaaatccaattcctggtggggaaaaccttctggagacccccaaccttctgataaaagagtctctacctccagggaaagccttcttaccacactggcatatcagatgaaagcattgcactgtacctctcgtaacacagcaatacagtcctcttgaggcactcaagcctgagaggaagctcaggatctgacacgttcttccttttcctcacaagtcatcatgattttttattttaaaataatctggaagtaatgggaacttagtttttcctgaactccaaccagaatccaaattggttagatgaggccaggcgcggtggctcacgcctgtaatcccagcactttgggaggccgaggtgggtggatcacctgaggtcaggagttcaagaccagcctggccaacatggtgaaaccccatctctactaaaaatacaaaaaattagccaggtgtggtggcttgtgcttgtagtcccacttcagtctaagtagctgggactacaggcacgtgccaccaggcccagctaatttttgtgttttgttagagatgaggttttgccatgttgcccaggctcgtcttgaacaccggggctcaaggaatctgcccatcttcgcctcccaaagttctgagatagcaggtgtgagtcatcatgcccagcctccttgaagtttactaacaattgggataactgagggaagagaagtgacaattccactcagtctattagaggtctggatataaggtagccacacaataactctaacttgacttctaaccattctatcttattgatttggaggctgtcttctgccagattttttgtggcttgagatgatattttcgaacccttctttcactacctttcttacccttaatgtgccaagcttgaaacaggatttgatttcctgagctacttgttcgccttctgcgcgtcaccaagtaatctggttcatctttcatctcattcatgttattttcgagtgaaacaagacattttgggggtcaagtctctttgggtgttttgtttttatgtatataaaaatggattttgtgttccctttccatgtaagtacccaacttatatgggaactcccaatcgttagttcagcaggaacggaaagcctggggatggacactaagatggcgtcccgatttagaactcccggaaaaaaaatgcgttggaattagtccggcaattaatttaatttgaattatccccttaaaaaaaaaggggggtaaaacacaggcacttagacaca

SEQ ID NO: 22832 - DNA, 3983 bp, Homo sapiens; identical to SEQ ID NO: 21101

SEQ ID NO: 22833 - DNA, 2200 bp, Homo sapiens
agccagctgttcttggaggtcctgcccctgggacttgtccggctcatccagagtgaggagggcctggagatgctcattcaatgagcgggaggcatctctcccttcccgtaacttctcctttaactgcgtcagctctcgttcctgagagtgaaccaggactttatattgcctgagctcctcagcttgcttgagctgctctgcaagcttctcctccttgaactgtcgctcattcctcagcataaatcttatgaggtctttacactcttcatacttgtatttcttctgtcggttggccaggaagccggccagttgagttagaaaacatctctttgaggtttacgaactgctgtttgttctctgccaactgggggcgcaatttctcgttgatttctagaatgttcatctctgccttctcgctggaccaagggccggctgatacccccatgctgacgtttgtggcagaagaggtggagtcagggactggggagaagaaactcaaacatatgatgggttaaaaactggtgaaatcaaataggtttaatcaggactgagggatgtcagtaactgaaattcttaccttaccgagagtgaatgctgaaggaatgatccccattggtggtgaccctcaggtgagactagggtgcctgtgtttcagcaaagcctgggcaattggaatgcagggctcctaagattccatgacacccctaccttctaattctgttattgcaactgcagacggttacctggcacgctggccacaatctacctcactcttatcagagtctgagcagtgctttcagctctgagttgaggcacctcgaaccttgtttttgtggtgaaggatcctaaagtgctgtggggagtgatcacatttttcacaacattaagttaagaatttcagttactgacatccctcagttctgattaaacctatttgatttcaccagtttttaacccatcatatgtttgagtttcttctccccagtccctgactccacctcttctgccacaaacgtcagcatggtggtatcagccggcccttggtccagcgagaaggcagagatgaacattctagaaatcaacgagaaattgcgcccccagttggcagagaacaaacagcagttcgtaaacctcaaagagatgttttttaactcaactggccggcttcctggccaaccgacagaagaaatacagcaatataaagtcctggttcactctcaggaacgagagctgacgcagttaaaggagaagttacgggaagggagagatgcctcccgctcattgaatgagcatctccaggccctcctcactctggatgagccggacaagtcccaggggcaggacctccaagaacagctggctgaggggtgtagactggcacagcaccttgtccaaaagctcagcccagggaggtgcagaaggctgaagagagcaaagtccctgaggactcactggaggaatgtgccatcacttgttcaaatagccacggcccttgtgactccaaccagcctcacaagaacatcaaaatcacatttgaggaagacgaagtcaactcaactctggttgtagacagagaatcctctcatgatgaatgtcaggatgctctaaacattctctcagtccctggccccacctcttctgccacaaacgtcagcatggtggtatcagccggccctttgtccagcgagaaggcagagatgaacattctagaaatcaatgagaaattgcacccccagctggcagagaagaaacagcagttcagaaacctcaaagagaaatgttttctaactcaactggccggcttcctggccaaccagcagaacaaatacaaatatgaagagtgcaaagatctcataaaatctatgctgaggaatgagcgacagttcaaggaggagaagcttgcagagcagctcaagcaagctgaggagctcaggcaatataaagtcctggttcactctcaggaacgagagctgacccagttaagggagaagttacgggaagggagagatgcctcccgctcattgaatcagcatctccaggccctcctcactccggataagccagacaagtcccaggggcaggacctccaagaacagctggctgaggggtgtagactggcacagcaacttttccagaagctcagcccagaaaatgacgaagatgaggatgaagatgttcaagttgaggaggctgagaaagt

SEQ ID NO: 22834 - DNA, 928 bp, Homo sapiens
  misc_feature 928: n = A,T,C or G
cgaagcacctgacatgagggcggggaccccgaaatgcacacgaagtccggaactggtcttctgtgattttcattcgccctggtctctgttccctttcgtactcaaagctcgtgcatccagggaggggaaaccggagatagggtcttcgggccccgggcagaccctctgtgccgctgcaaaccgttgcagcctgaggctgtcaggtcctcccccagacacctgcggaccctccctctcctggcttcccgtctggtcatggcgagattctgggtctgcgtagccggtgctggcttctttcttgcatttttggttttgcattcgcgtttttgtggctctccagttttgaggaactttacttttgcagtttcctggagaactgagaaaattctttaccggctggatgtgggttggcctaagcacccagaatattttaccggaacaacattttgtgttgcagttgactccctcaatggattggtttacataggtcaaagaggggataacatcccaaagatattagtgttcacagaggatggatatttcctacgagcctggaattatacagttgacacacctcatggtatatttgcagcagtactctatatgaacatccgtctggatcacggatgtggaagtggattcttggtcatactggtacccaatacgctccttgggaactggtcacagtctgggctactccagcaaaagggctaatttgatccttgcaggttgataaccagcgaatttgtggagggcccgcgaacttcctcgtgccgggacgcggcgcctaccatgtcaccggccatcgcagccgggctggaaggacggggcacaaacaccacggacacacgcgcggggggccacaacacacaaaccggcggtataaacacctcacacaacacccagcgcacacacacagtcctgtccn

SEQ ID NO: 22835 - DNA, 1092 bp, Homo sapiens
  misc_feature 1, 2, 3, 4, 1092: n = A,T,C or G
nnnnacgctgcgcctgtccagacgcctctttcgggtcttaccagcgtgcctgtgcttgccttgacgtccaaacgcggtccgccgatccggaatctccaccgtcgcagagtttcgccatggcccggggccccaagaagcacttaaagcgtgttgcagcgccgaagcattggatgcttgacaaactaacgggtgtatttgcacctcgtccatcgacaggtccccacaagctgagggaatgtcttcctctgatcgtcttcctcaggaatagactcaagtatgcgttgactggagatgaggtaaagaagatatgtatgcaacgtttcatcaaaattgatggcaaggttcgagtggatgtcacataccctgctggattcatggatgtcatcagcatcgagaagacaggtgaacatttccgcctggtctatgacaccaagggccgttttgctgttcaccgcatcacagtggaagaggcaaagtacaagttgtgcaaagtgaggaagattactgtgggagtgaagggaatccctcacctggtgactcatgatgctcgaaccatccgctacccagatcctgtcatcaaggtgaacgatactgtgcagattgatttagggactggcaagataatcaactttatcaaatttgatacaggcaatttgtgtatggtgattggtggagccaacctcggtcgtgttggtgtgatcaccaacagggaaagacatcctggttcttttgatgtggtgcatgtgaaggatgccaatggcaacagctttgccacgaggctttccaacatttttgtcattggcaatggcaataaaccttggatttccctgcccaggggaaagggcattcgacttactgttgctgaagagagagataagaggctggccaccaaacagagcagtggctaaattgcagtagcagcatatctttttttctttgcacaaataaacagtgaattctcaggagcaacacgaagacccccccagaaccgggaacatcggggcggaagaagagtaagaggcggtccacgtgccgaccatcttttaagggaacacggccccaggagcgaatcgagacgccgacagatcggan

SEQ ID NO: 22836 - DNA, 207 bp, Homo sapiens; identical to SEQ ID NO: 20333
  misc_feature 1, 2, 205, 206, 207: n = A,T,C or G

SEQ ID NO: 22837 - DNA, 1698 bp, Homo sapiens
  misc_feature 1, 2: n = A,T,C or G
nngcgtccggccgccccagcccgcccagacatgacccaggcaggccggcggggtcctggcacacccgagccgcgtccgcgaacacagcccatggcctccccgcgcctagggaccttctgctgccccacgcgggacgcagccacgcagctcgtgctgagcttccagccgcgggccttccacgcgctctgcctgggcagcggcgggctccgcttggcgctgggccttctgcagctgctgcccggccgccggcccgcgggccccgggtcccccgcgacgtccccgccggcctcggtccgcatcctgcgcgctgccgctgcctgcgaccttctcggctgcctgggtatggtgatccggtccaccgtgtggttaggattcccaaattttgttgacagcgtctcggatatgaaccacacggaaatttggcctgctgctttctgcgtggggagtgcgatgtggatccagctgttgtacagtgcctgcttctggtggctgttttgctatgcagtggatgcttatctggtgatccggagatcggcaggactgagcaccatcctgctgtatcacatcatggcgtggggcctggccaccctgctctgtgtggagggagccgccatgctctactacccttccgtgtccaggtgtgagcggggcctggaccacgccatcccccactatgtcaccatgtacctgcccctgctgctggttctcgtggcgaaccccatcctgttccaaaagacagtgactgcagtggcctctttacttaaaggaagacaaggcatttacacggagaacgagaggaggatgggagccgtgatcaagatccgatttttcaaaatcatgctggttttaattatttgttggttgtcgaatatcatcaatgaaagccttttattctatcttgagatgcaaacagatatcaatggaggttctttgaaacctgtcagaactgcagccaagaccacatggtttattatgggaatcctgaatccagcccagggatttctcttgtctttggccttctacggctggacaggatgcagcctgggttttcagtctcccaggaaggagatccagtgggaatcactgaccacctcggctgctgagggggctcacccatccccactgatgccccatgaaaaccctgcttccgggaaggtgtctcaagtgggtgggcagacttctgacgaagccctgagcatgctgtctgaaggttctgatgccagcacaattgaaattcacactgcaagtgaatcctgcaacaaaaatgagggtgaccctgctctcccaacccatggagacctatgaaggggatgtgctgggggtccagaccccatattcctcagactcaacaattcttgttctttagaactgtgttctcaccttcccaacactgcactgccgaagtgtagcggcccccaaaccttgctctcatcaccagctagagcttcttcccgaagggcctttaggataggagaaagggttcatgcacacacgtgtgagaatggaagagccccctccagaccactctacagctgctctagccttagttgccactaggaagttttctgaggctggctgtaaagtaagtgtaaggtccacatccttggggaagtagttaaataaaatagttatgactgagctctcagcctgacttggattctgtcttaacacttctagcaaaagaaaataaatatatgt

SEQ ID NO: 22838 - DNA, 853 bp, Homo sapiens; identical to SEQ ID NO: 22576
  misc_feature 1, 850, 851, 852, 853: n = A,T,C or G

SEQ ID NO: 22839 - DNA, 531 bp, Homo sapiens
acgcgggggcagcagagcgaaaggtggtggagtcctgaaggagggcctgatgtcttcatcattctcaaattcttaggacggtcgggccctggaaggaacgctctcggaattggccgcggaaaccgatctgcccgttgtgtttgtgaaacagagaaagataggcggccatggtccaaccttgaaggcttatcaggagggcagacttcaaaagctactaaaaatgaacggccctgaagatcttcccaagtcctatgactatgaccttatcatcattggaggtggctcaggaggtctggcagctgctaaggaggcagcccaatatggcaagaaggtgatggtcctggactttgtcactcccacccctcttggaactagatggggtcttggaggaacatgtgtgaatgtgggttgcatacctaaaaaactgatgcatcaagcagctttgttaggacaagccctgcaagactctcgaaattatggatggaaagtcgaggagacagttaagcatgattgggacagaatgatagaagc

SEQ ID NO: 22840 - DNA, 531 bp, Homo sapiens
agggagtcgacccacgcgtccgtgatgggggctctgtagcacatttgtggcagggttcttttcaccctccacaaagttgtatgagctctgactcttgcctgggctgaaaatgcggtctaaaattatatatgtacgtagtacttcttaggtttttttaagatcctcactggactaaatggaagagaattctaaattctcaacgtgttctaattattctgaactattctccctctcccaaaaacacatacagatacacacaaatttattttgtgtgtaacccttgactttcagaaagtttgggttattctatgcataatttttttaaaaaaccatttggtttaaaataatttcaaacttaaagaatttgcaagaagagtataaagcattcccatatattctttacccagattctccaaatattaacatcttatcacattatttaaccctccttttgtgtgtgtgcgtgtgtggttttccccccacatgaaccatttgagagtaagttgcggacctgttgcccctttattccta

SEQ ID NO: 22841 - DNA, 1189 bp, Homo sapiens; identical to SEQ ID NO: 20185
  misc_feature 1179, 1180, 1181, 1182, 1183, 1184, 1185, 1186, 1187, 1188,1189: n = A,T,C or G

SEQ ID NO: 22842 - DNA, 384 bp, Homo sapiens
acgggaggagcagggagctggaatgtagctgttcccaggacggattctgaaacattctatgagtttgggaaactcacagaattttcagaattcgtggatactaacattttatacacagtgggcactcaataattagttgagtatttttcttttcaatgcccgcgtaccatttcttcttggatccttcctggcactgtgctaactgctttctacaaatttagcttacataaacccttgatacacccttgaggtgagtaggtattatctatagtttacataagatgaaatagagcctcccagcagttaagtaacttgtgtgaagatgggacccttgttcctgatggttctagaaccttcatccttaatgataatgctaaagtaagt

SEQ ID NO: 22843 - DNA, 652 bp, Homo sapiens
  misc_feature 1, 651, 652: n = A,T,C or G
nactcatggcctgattgagggtgggtggctggacccactgtccctttgcacacagagcagatacttctaagccatatcgactgcagggccgaggaatcgcgcgcgctgactcaggaggtgaggactggaaacagggggggagagtgttggccaggctgctctcgaactcctgatgatctcaggtgatccacccacctggcctcccaaagtgctgggattacaggtgtgagacaccgcgcccagcccgcagcttcaaatattttgtttgtagttctcttttatcgtgtaaaatctgtggtttataattacccccgagaatgctctcaaattacagttttagcctccatttgttttctcaaatctcctcaatggttcacacactctaggggctctgaaaagaggtgtgtacttttccttttatttatatcctctgcccattttatattaacgtacttaacccttgtttttaatatgagttacagatttttttttctggtatgtcatttgtcttttgaccttggtgttttgttatggatttttttttttctcagacttatcttttatggcttctgcattttaagtcatacttagaaaaggccttttccatgttcagattttaaggaatttactaggccaggcatggtagctcann

SEQ ID NO: 22844 - DNA, 381 bp, Homo sapiens
aaattattcttattaaggatgtgttaagggggaggtataaagcaacatcaaagttttcccaaatgggagtctgatgcaaaatcacagtgcaaactttgtgaacaagtgaagaaaactgtcgttttttttatcatctgtcatgctgggtgttacccatccaaaccttgcaagtcaacaaagtgtgaacagaaaatcttttgagaaagaagcttgtctgtgatatccagagggaatgttttaattgacttaattttcattttctagctctcgtctatgtccacaactgggaagttaacagtgttcagggacctaatcaagtgagtgtgggagtgtaatctaaacttaaacgcctccaggggcccccgcgtacctgcccgggcg

SEQ ID NO: 22845 - DNA, 889 bp, Homo sapiens; identical to SEQ ID NO: 22805

SEQ ID NO: 22846 - DNA, 669 bp, Homo sapiens
  misc_feature 1, 2, 3, 4, 5, 6, 7, 8, 9, 10, 11, 12, 13: n = A,T,C or G
nnnnnnnnnnnnncgaggtacttctagaattaattaacctaagcgatgaaatccaaaggtgaatcttttggttggtgattttgatgatagccacaaagcaagcaggctgtatggtagccttgaaaaccaacaggccacaatcacagtgaaaacctcaggttggcagccactggaggatacaaaatgagtttggatctccttcaatgccccattcccagagaactgtcattatttgacctgctggtagttccctaaaggacgtgcaaggatgtttttatttgactggacacttgaagcttgccctgtatgaacagcccccatcttcccatgcttgtcaaaaatcagaggcaactaacactgcggcttcctgagagtctcactctgtcacccaggctggagagcaattgcacaaacacttggctcactgcagcctcaacttcttgtcctcaagtgatcctcccaccttagcctcctaagtagctgggaccacagtagagacggggtttcaccatgttggccagtctgctttcctcctaacctcaagtgagccgcctgcctcgaagatgctttatttataagcgctttggacacactttaataaatgctctattgtatacagttgaactctatataacattttgaataatattgttaatgcttaccctaagt

SEQ ID NO: 22847 - DNA, 1512 bp, Homo sapiens
  misc_feature 1492, 1493, 1494, 1495, 1496, 1497, 1498, 1499, 1500, 1501,1502, 1503, 1504, 1505, 1506, 1507, 1508, 1509, 1510, 1511,1512: n = A,T,C or G
ggttggggtatgattttgatctgggcactaacggggacactgattgcttttgccagtaagtcaagaccagcagataaaaaataatttttaaaaacctcgtgagactgatttgccgcatgaccgggaggaggaagaagcaagcgtggaaggtgctaacggaggaacctaaacctccatcctctttccctgggaggttaagaactacagggagaggcgagagagactatgaccgccctacggctagagtagccacgaagagaacacttccggggcggggctatctggccctttcctttccgcgtgtagaatgtggggcgcctgtaaagttaaggttcacgattccttggccaccatttccatcactctgagacggtacctgagattgggggcgaccatggcaaaaagcaagttcgagtacgtgagggacttcgaggctgacgacacctgcctggcacactgctgggtggtagtgcggctggacggccggaatttccatcggtttgctgagaagcacaactttgcaaaacccaatgacagccgtgctctccagctgatgaccaaatgtgcgcagactgtgatggaagaactagaggatattgtgatcgcgtatggacagagtgatgagtacagctttgtgttcaagcggaaaaccaattggtttaaaagaagagccagtaagttcatgactcacgtggcctcccagtttgcctccagctatgtgttttattggcgggattactttgaggaccagccccttctgtatcccccaggctttgacggaagagtcgtggtgtatcccagcaaccagactttaaaggactacctcagctggcgacaagcagattgtcacatcaataatctttataatacagttttctgggcacttatacaacaatctggactaacaccagtacaagcccaagggagattacagggaactcttgcagcagacaagaatgagattttgttttctgaattcaacatcaactataataatgagccgccgatgtataggaaagggactgtgttgatatggcagaaggtggatgaagtgatgacaaaagaaattaagctgccaacagaaatggaaggaaaaaagatggcagtgacccggaccaggacaaagccagtgcccttgcactgcgatatcatcggggatgctttctggaaggaacatccagagattctagatgaagacagctgacccttttgcgcttcagttctggtgtgcttaaccatgcaagccctcccacctcccagggctccttgccttaggtggctgtagcatccctaccacccaggacactggtgcgaatgacacaactcaagttgggaggggaacagggaaggaagggatggatgggggtggtgtatcttactctgtttaagcagaacaccttgtttgcggtgttggaacatggttcctttggcagaagtgctttttttttaatcgcagtactatttttataaagcaagaactattccatgcccnnnnnnnnnnnnnnnnnnnnn

SEQ ID NO: 22848 - DNA, 892 bp, Homo sapiens; identical to SEQ ID NO: 21529
  misc_feature 892: n = A,T,C or G

SEQ ID NO: 22849 - DNA, 4219 bp, Homo sapiens; identical to SEQ ID NO: 21865
  misc_feature 1, 2, 4211, 4212, 4213, 4214, 4215, 4216, 4217, 4218, 4219: n = A,T,C or G

SEQ ID NO: 22850 - DNA, 886 bp, Homo sapiens; identical to SEQ ID NO: 21881
  misc_feature 1, 2, 3, 4, 5, 6, 886: n = A,T,C or G

SEQ ID NO: 22851 - DNA, 629 bp, Homo sapiens; identical to SEQ ID NO: 20404
  misc_feature 618, 619, 620, 621, 622, 623, 624, 625, 626, 627, 628, 629: n = A,T,C or G

SEQ ID NO: 22852 - DNA, 1157 bp, Homo sapiens
  misc_feature 1, 2, 1143, 1144, 1145, 1146, 1147, 1148, 1149, 1150, 1151,1152, 1153, 1154, 1155, 1156, 1157: n = A,T,C or G
nngaatattgaaaatataacattaactaatttataaaaaatattctatgtaatgcaaaatacttgaagctgcagtagcttggttttaaacaaaaacaaaaaaaaactgagagaaaacctatcagaaggactctatgcagagccaccttttggattgcatggttggactgagatctattgggagaaattatatatgtatatatatttatacaacttatgtatacatatatatatgtatacacacagacacacacacacaccaccaacaaccaccactacaccacacatgcttataacaggcactagaataaagagggacaacaaaatacacagccagagcagcaagccttagcattaagaatatacaatatgccggaattggggttcgtgcctcctagcctaggaaacttaaaagaaatatccttttgacacaaaacacaaaatgttttccaaaacaattgacataatgatacattacgcctttgcagtgagctaataataagctaacctttgtgcacaaataacattatatatattatatatctattctgcataggtattttgactttgtgcaggacagaaagttgtgtaggtatgactgttctacttttcagttttctttttttttaatatattttattttctctagaaattactcaaacaaaagcagccttctatcttgccttgtcttaatgctttaaaataaccaaactggagatctaactaccaaactgttcattatattattaaataccaactttggttacagtatagtgtctttactttagctgatggttctgtaaccttgtgctttttaaagcaatttttatgttttggtgcaaaagttgtccagtgtctcttgttcccttcactagagaacatgcttagaggtatgtttgtaggtatttttgtttagaagaactatttcatgcgctccattttatttattataataggtaaaaagaaaaaaaaaggttgtaattcatcacccatgtaaacatgctcatgaagttgaaagtaattaagatttgatacactgatatcaatttatttatgtaactaaatcactgttttataaacttgttaatgatcaacaatttttgttttgattaaaattagttttttgaaagtttatacaaaaaannnnnnnnnnnnnnn

SEQ ID NO: 22853 - DNA, 2538 bp, Homo sapiens; identical to SEQ ID NO: 20316
  misc_feature 2538: n = A,T,C or G

SEQ ID NO: 22854 - DNA, 381 bp, Homo sapiens
actaaagatatacaataaaagggaagaagattttcctagtttaagagagtataatgattttctggaagaagtggaggaaatcgttttcaatttgaccaacaatgtggatttggagaacactaaaaagaaaatggaaatatatcaaaaagaaaacaaagatgtcattcagaaaaacaaattaaagctgacgcgggagcaggaggagttggaggaagcattggaggtagaacgccaagaacatgagcagcgacggctgttcatacaaaaggaagaagagctgcagcaggctctgaaaaggaagaacaagcaggcctttttagatgagctggagagctccgacctccctgttgctctgctcctggcgcagcataaagacagatc

SEQ ID NO: 22855 - DNA, 561 bp, Homo sapiens
  misc_feature 1, 2, 3, 4, 5, 6, 7, 8, 9, 10, 561: n = A,T,C or G
nnnnnnnnnncatgaactatgaaagctcaagggtcatggctattggcccccagaaaatcctgataccctggtttttcagtcactggccaatgagttagacttatgaaaccaattcagcatactttggaccttgtgttttcttacagtaccctttagcagtgtcatctggctgtgttctgtagtgtagatgagccattttccaaacgttgacattttttggaccagaagtgagctggatcttttctctggctaaggctacagtggaggatggaggaaaaggggatggtctaatggtcttttaggaagtggcatgacgtgggctctgaacgtgaagtggaaggaacacaaaacattctgttgattaggaccaataaaaaaacatgggaaattgcttgggacatgatatttaacatttattaatttttgtgggaaccagtaaaatgttcccttggtgccctatcaaacagatcctttgttgaatctgtcactattctaaccctgtaatgatctgttcttaaattcatcacaggaagtttgtatgtgtgtgcaaccagttctaan

SEQ ID NO: 22856 - DNA, 1329 bp, Homo sapiens; identical to SEQ ID NO: 22577

SEQ ID NO: 22857 - DNA, 1033 bp, Homo sapiens
cccacgcgtccgagccggcgggacaggctggccagctggggcggcccggagtctgagcctagagcctggcgccgcgaggtgcgcactgcagccgcgccagttcccggagagcagccggcctggacctgcctgcactgatcttttccggggctcacgaccccagaactcgtagagtcccacgaactggctgggtatacagaaaagtccagaggccggagagcgtttcagatcacatgtaccggatggcagttatggctatggcgatcaaagatgaccgttttaacaaagaccgatgtgtacgcctagccctggttcatgatatggcagaatgcatcgttggggacatagcaccagcagataacatccccaaagaagaaaaacataggcgagaagaggaagctatgaagcagataacccagctcctaccagaggacctcagaaaggagctctatgaactttgggaaagagtacaaggctaagcattttaactttatactggaaaaaaaatcaaacaaaggggagggataaaggacttagtcatctttgcactggaaaacaaaatatgtaattaaattcccatagctgcatgtaacattgaattcttccaggttaaaaaaaaaagttaatcctgtgatattaatggaatgacattttgaggtcttgagaatgggcacaaaagtgggaaatgaatttcagtatgggcaaagacactgaggatgatgttgattagataattcactccgtaatgatcatgctgtgtgctagtaagtataaccctggaaagatcttgagatgcttcccagcctgttcacagatcccctgggccagaacactccttaggaaaaacagtcagctacatattaggcagcaacacgaagggtctttgaacaaaatgagtaatgttattctacagtgtagaaaggtcacagtacctgcccggcccgctcgacagcgcaatgaggaaaaaagctagaattctgggcacaccgatggcccatgcatctggccgttcttttacacacaggaaacagct

SEQ ID NO: 22858 - DNA, 815 bp, Homo sapiens
  misc_feature 1, 2, 3, 4, 5, 6, 7, 8, 9, 10, 811, 812, 813, 814, 815: n = A,T,C or G
nnnnnnnnnnatggttttctgtgccattcaagtacatgttcccgttttttttttttttttcttttttttgtttgaaatattgactttattaggaaaacatttgatagttctattcggtcatataatcaatcacctaattttaaaactatgtggccagaggacatcaattacaatatggatttttcattcattcaacgaatatttgagcacctacaagtgccagacattggaggtacagggtaaacaggaggatccttgctctcacggagcttacattctagcaggaggacaatattaatgtttataggaaaatgatgagtttatgacaaaggaagtagatagtgttttacaagagcatagagtagggaagctaatccagcacagggaggtcacagagacatccctaaggaagtggagtttaaactgagagaagcaagtgcttaaactgaaggatgtgttgaagaagaagggagagtagaacaatttgggcagagggaaccttatagaccctaaggtgggaaggttcaaagaactgaaagagagctagaacagctggagccgttctccggtgtaaagaggagtcaaagagataagattaaagatgtgaagattaagatcttggtggcattcagggattggcacttctacaagaaatcactgaagggagtaatgtgacattacttttcacttcaggatggccattctaactccagggggtagactggactaggtaagactggaggcaggtagacctcttctaaggcctgcgatagtgaaagacaaaaataagtggggaaattcaggtgatagnnnnn

SEQ ID NO: 22859 - DNA, 2274 bp, Homo sapiens
  misc_feature 1, 2, 2248, 2249, 2250, 2251, 2252, 2253, 2254, 2255, 2256,2257, 2258, 2259, 2260, 2261, 2262, 2263, 2264, 2265, 2266,2267, 2268, 2269, 2270, 2271, 2272, 2273, 2274: n = A,T,C or G
nncgcttctcggccttttggctaagatcaagtgtagtatctgttcttatcagtttaatatctgatacgtcctctatccgaggacaatatattaaatggatttttggagcagggagatggaataggagcttgctccgtccactccacgcatcgacctggtattgcagtacctccaggaacggtgcaccaagtcgcggtctccggcgccagctacgccgctgccgctgtcactatggcccattacaaagccgccgactcgaagcgtgagcagttccggaggtacttggagaagtcgggggtgctggacacgctgaccaaggtgttggtagccttatatgaagaaccagagaaacctaacagtgctttggattttttaaagcatcacttaggagctgctactccagaaaatccagaaatagagctgcttcgcctagaactggccgaaatgaaagagaagtatgaagctattgtagaagaaaataaaaaactgaaagcaaagcttgctcagtatgaaccacctcaggaggagaagcgtgctgaataggattcttctcagtttgaaagacaatgaaaaatggttttgtatgacttgaatagtttgtatagtatataatcttttctgaacagatgctatagaactcttttaatatgtttaattcacctatcacactctgttaaaaacacatagaatcatcaataaaaactcaatataactttctttgggtcttaaagcaggagaatccaaagtaaatcctgaacaaaacctaaacacagccatctaactcattaccttaaaagacattctgtttattagtctgattaggaatgatggcactggttgtattttagccaagacagtttagcatggagctattccttggtgcagttcaggatatgaacacaggtacagtcattctttgaaggtgacactgttctgtatattccctataggcagctggagagatctgtgtgacacaagatgcttttgtacgggttcccatgaatcttctgctcttgtttgtgtgacatggaacaaataacttctttgccaccactttgccttagataactgtgtgtgtgtgtgccagtttgaactctgacaccacattttccttctatgcaatcatgcctgtctgataatcttgcattgctttcctctgagctttagtgggtcctagttgcacactggcctttctgtgctgtttttcaatttgcctaataatagcagttaccctgattgtaatttatgtaactttaaacaggatcacactgtaccccctgcctgccttatttgcttactgagcacaggacagaggcaatatacaactctgggttcacacacaagctgagatgagaagaggaatgagccatatattggggaaaatcatagtttgtaggtataattatatagtgcttttctccctcaaagtatttttctagccttgaattcattttatcttcattatccctgtgaagtaggtgggacaagtataaggggaagaggggtgctgaatttttaggccaaagactgatattaatacaaatcactcactaactgtagagccttgggcattatcagtgaactactctgagatttactgtcttcatctgtttaatgagtagaatgtccgtgatgcctacctcacagggttgttgtgagggtcaaatgagaatgtatgtgaaagatttgtaaatggtaaagcactatattcttgtttgttagtcctttttcctttctttgggtagacctacagtcagatgttttgttttatggatcacttattttccttactggtagactgtcgttttatagacatattcctatttcatatattctctccctgttgttagagaacctatctttgtttttggtcaaaacacacatagaaaacaaaatgatccaatgaaaactggtttaactagcaaaagccttggcacctgttggagactatgaccaagccaataaaaagggcatttaaatcagccctgttagtaggaatgtggctatggctggtgcctcttctagtcacaagtttgtttttggagggggtccagaagatcattcccttgcatagatttctcttttaccaatttgagtgcctcctacatgggcagcagtggactaagtgctgggtgtgataaagaggaatgacttaattatgagactgtatataatcaaatacagtgtgggttaggacctgtggcagaccattataataaagcatggccccgtgagggttttgaaagannnnnnnnnnnnnnnnnnnnnnnnnnn

SEQ ID NO: 22860 - DNA, 587 bp, Homo sapiens
  misc_feature 541, 578, 579, 580, 581, 582, 583, 584, 585, 586, 587: n = A,T,C or G
ttttttttttttttttgccttatagagttaggtcaatttccaaaagtgctggagtttatgccaagaattaagtgactccctggttgcagtggccaaatagcctgaaattttcaaagtaatactaattttgcaaaacttttcatgtaaactcctttgcctgaccatgccctaatttttgtgattaggaaaatctggctcttatcccactggaggaaaagtgtctagttcatattctaatggaaatcatcacttgggaggtgttttgacaaacatctctcagttttgtttaaaaattatgttagaaattaagaaaaataacgaatggaaaacaaaatctaatttttggtatattttcctgctaacatttgtgggcaaattagttaaattatgattgtttcatgcatacttactcctccaacagcatcctagctctcttaggagttccttttaattatcctaaaaacagttaagagtatactgagccaaaatataattaggttgagaaacaatgaactcctaaatgaccaatcaagttttttcncaacacccgcgttaattaattctagaagacttccgannnnnnnnnn

SEQ ID NO: 22861 - DNA, 2142 bp, Homo sapiens
  misc_feature 1, 2140, 2141, 2142: n = A,T,C or G
nccgctgtcgctttgttacactgccggggatttccgtgtggcccgccccccagtggatcggtgcccccccgcccattgttacttacccgttaggggccatttactcccggggagaggtctgattcaatggtgagcaaattgttgtgtcccagcgggcccattggcccatctcgagtcacgcaacgtggcctcctgggttcaagccatctccgctcagtctcccaagtacctggatccacaggcacccccgacacactcagcctgatttttttatctttagtagagacggggttcaccatgttgccacgctggtctcgaactcctgacctcaggtgatctgcccgcctcggcctcccaaagtgctgggattacaggtgtgagccaccgtgcctggcggaactaagattaaagcaaagaccacgatcaattacttaacaagaacaccacattttgatgctctctgtagggtcatttttttttgtcaggaaaatatctgatctgattcttcccagcttgcttcccctacaacttaataagcccttcactaacccctgtatgtattaactgcaattgcctagcccggcatttacactctcaaaagatttaacgcaattacaatcaaaaaacacttgtcatatataacactttttcacatggaaataaattggtggtttaaggtttacaattcctttgaataaaatttcagttattagttacaaaatgctaagacagattgaggtctcaaagaaagaacttgagaaaattatgttttaaaggacttcacaaatatgaagcataattgttagaatcctgatacaaagtaacttttcctaggtttaaggttcaagtctgaattcttgaattgtccagcatcaacgagacctcatttatattttttatttttatcattactttcagatacagggtctctcactattttgcccaggttggactgctgggctcaatggatcctccccgcctcagcctcctgagtggctgggattacaggcatgcaccacgcccagtgctacaattttttttttaaaaaagcccggaaacacaatgggcttgcatcgtgttggcagcaggtgcctctcagctggtgctggacagaaggggcttgcagtatttgcactgaatccaaacccggtacattgtcagttgctttcctcggttcacctgcagtcggcgatccaccaggttctgaactttttccagtccagcagtggtgaaaagcgtgtccagttcctcttgtgtgaagaagtaaactctggttccatcacctctcacgtagaaatttccagatagacactgaccttttttaaaccgaagctgagccatgtcatagcggccgtaatctcgcagaagcatcatcccgccaggtttcagaagcctgctcagcctgttgatagccttctgcatcttgtctggaacaattgctgaaagaacaaatatgagaatgataatatcaagactgcccttgggcactgggtaactcttctcttcatcacacaggtcgtgaacaaaggcaaaacaccgagaaggatcatattctgaatttgtctggaccagttctatagctgtggaagaaaaatcacagcaataaacaaagagtcctgggtcattgttcgtttgtaaaattggaaagactgtgtttcccacaccacagccaacctccagtattcggtaggtggctgaggatccaggaaactcatcagcacaaatttccaggtcactaattttctgagttacattctcctccacaggaggtgtctgtgttttatgttcaaggctcttcgaagaacacttgtgctgttcttccattattaaaccaggtccatcctcattgtttctacattcacatacttcactcttgttctccaagaaccaatccttcaaatgattttgattttggctaggtgccagctcagggaattcggtaaaaagccaatgtctatccttgaaaaacccattttcgtggattttgtagaagtcattccagtatttgtgggcattgatctcataatcaacaggcattgtggtggaagacccgcgccggatcgctcaggaaccggcttccgaactgctgcctcttatcggcgaggattgcaggtgcaccttcagggtaggagccggccannn

SEQ ID NO: 22862 - DNA, 2296 bp, Homo sapiens
  misc_feature 1, 2, 14, 2295, 2296: n = A,T,C or G
nnagagtgaactgnacctgtgcatttgtagacgtaaagggcgttgtataaaactcagggtctcattattaaaataaatatgtaaatttagtatacactctggtataactcaaaaaactaaggtagatctcaaaagatgtgtgacattcagcattatactgtaaatcaataatatagatattgtacatagcaccattattacaatagccaaaagcaacccaagtgtccactaaaaaaggaaggaaattctgacatatgctacaacatagacgcatctcgaggacactgtgctcagagaaataagccagtcacagacagacaaatacttcatgatttaactgatatgaagtgcttggaatagtcaaactcacagaaacagaaagtagaatggggttgctgaggctggagggaatggaatgtttaatgttatttaatgggtacagagtttgttttgcaagatgaaaaagttctggagattggttgtacaacaatggcgacatacttaacactactgaatgtatacttaaaaatgattcagatagtcaacttctattatatgtatttcaccacaaaaatttcttaaagtagcaagaaataaataaaattgtaaaaacctgatgttagtggctatgtagggaaatggatatcatatactcacaacaggaagtgtagctttctggagtcatttgagtctgtgaagagagttataaaaccataagtgctcactgccgaggcaatgccactccaggggatacatgtgtacactaaatttacagagatgctcacagctgcacgatttaaagtagtcaaaacagtttaacagctcaagagatgggctacatatcctttagtataagcacaatggcataaaatcatgcaatcattcattcatgatcttttttgagcacgaacaagcagatgaaagttatgctttccacagaaaaatacaatttcagagcatttatagacttctagaaacccatccatgggacttcctttgggaaggttaagaatcctgagaaaaagcctcttcaaatgtgtttgtgaactctgccggtacagggaaatactactggaaacaaaattaagtgtagaaacagaccagaccagaatatacatgctgattcccgttacatgaaaggtccagcgccaggcgggcaggcagccagccacagaaaagggagaggggcccaggaggaagtggctagacctgacgctaggcaccaggggaggcggggaaggagggcagaggcaggagagttcactgtgagagctcaacaaggagtagctgctgccaaacatctacattcatttacccgcatttcacagacacaggcttggggaggttaagtaacttgctcccagacataaagttgccaagtagtccagtcaggattcgaaccagctccagtgccctattaggtccaaatccactcagatggggaaatggagagtcagggacaagcaacaaccaggggcccattcaggaaacatcagcctgccctcaaggtcttctgaattgaaccctgccactgtgataaccaccctcacaggacagggctctctggccacaggaggtgggttctgagagcaccatgcccctcctcacacaaacacagattccacaacacacaccacggggaagaaggtttaaatgtaaaaaacgaaaccatacaagttccataagaaagtatggattaatatttatgtactcttggggtggaaaagatctacacataacaagttcagaaaccacagtgataaactaacctaagaaaatcgtttaacttttatctacctgaaacacaaaattaaaaggcaacctataaactggacaaaaatatttgcatcaaatataacaaaagattatcaatatccttaagatgtaaatggctttggcaaaacaatcaatagaaaaatgactaggaattagaaaatcatacacacacacacacacacacacacacacacacacaattaataaaactatagaaacaaggaaagcaaagcttgaaggtctcagtgaagctgtatagtggtaaagagtatagactctggagtaaaaagtgccaggatttgaatctcagctccttgacttagtggctacacatccttacgcaagtaatttaacttcgtgtgcttcagtttactcaaatgaaagtcaggattaagggtacttgtgtcatattgttgtcacggggattaaataagtaatccatgagagagcatatagaatagtgcgtgacatatagtaaatatttagcatgtataaattattatagattataatacttann

SEQ ID NO: 22863 - DNA, 654 bp, Homo sapiens
  misc_feature 1, 2, 3, 4, 650, 651, 652, 653, 654: n = A,T,C or G
nnnncgcggtggcggccgaggtacttggaagttctagcattacacagactagcttccatttctctcatagaggtcatttttggcatttaaaacacatacttttagaaaacagatttggatgtatgtaaacacagggttaatccaccacactctggatgctagagctgttgacaaagtcatgctttgcagattttaaaataaactttttgttactcttacagcttggtattttcccctcctattttttttacctcctctaaataaacctctttgttaaataattgatgtttctggatcatagaaaatagtaagtttaaaatacagaatatttccaagctaactacaaatctgatgacagttttttgagtgtgcacttttccttttatttcttaggtcctttttggtcctttgcaaacatagtaagattccatatttgtgtcccaactgtggtaatattgctgacttcttactggaaaacagtcagctctaggtagcatttcttctgtgtggtatttaagttaaattattaccaaaaaaaaaaaaagtcgacgcggccgcgaatttagtagtagtaggcggccgctctagaggatccaagcttacgtacgcgtgcatgcgacgtcatagctcttctatagtgtcacctaaannnnn

SEQ ID NO: 22864 - DNA, 1001 bp, Homo sapiens; identical to SEQ ID NO: 21314
  misc_feature 681, 682, 683, 684, 685, 686, 687, 688, 689, 690, 691, 692,693, 694, 695, 696, 697, 698, 699, 700, 701, 702, 703, 704,705, 706, 707, 708, 709, 710, 711, 712, 713, 714, 715, 716,717, 718: n = A,T,C or G

SEQ ID NO: 22865 - DNA, 1117 bp, Homo sapiens; identical to SEQ ID NO: 21513
  misc_feature 1: n = A,T,C or G

SEQ ID NO: 22866 - DNA, 2884 bp, Homo sapiens
  misc_feature 1, 2, 3, 4, 5, 6, 7, 9, 2879, 2880, 2881, 2882, 2883, 2884: n = A,T,C or G
nnnnnnncnagtggtctgcttttattcagtagagtattgtagagattgtatagaatttcagagttgaataaaagttcctcataattataggagtggagagaggagagtctctttcttcctttcatttttatatttaagcaagagctggacattttccaagaaagtttttttttttaaggcgcctctcaaaaggggccggatttccttctcctggaggcagatgttgcctctctctctcgctcggattggttcagtgcactctagaaacactgctgtggtggagaaactggaccccaggtctggagcgaattccagcctgcagggctgataagcgaggcattagtgagattgagagagactttaccccgccgtggtggttggagggcgcgcagtagagcagcagcacaggcgcgggtcccgggaggccggctctgctcgcgccgagatgtggaatctccttcacgaaaccgactcggctgtggccaccgcgcgccgcccgcgctggctgtgcgctggggcgctggtgctggcgggtggcttctttctcctcggcttcctcttcgggtggtttataaaatcctccaatgaagctactaacattactccaaagcataatatgaaagcatttttggatgaattgaaagctgagaacatcaagaagttcttatataattttacacagataccacatttagcaggaacagaacaaaactttcagcttgcaaagcaaattcaatcccagtggaaagaatttggcctggattctgttgagctagcacattatgatgtcctgttgtcctacccaaataagactcatcccaactacatctcaataattaatgaagatggaaatgagattttcaacacatcattatttgaaccacctcctccaggatatgaaaatgtttcggatattgtaccacctttcagtgctttctctcctcaaggaatgccagagggcgatctagtgtatgttaactatgcacgaactgaagacttctttaaattggaacgggacatgaaaatcaattgctctgggaaaattgtaattgccagatatgggaaagttttcagaggaaataaggttaaaaatgcccagctggcaggggccaaaggagtcattctctactccgaccctgctgactactttgctcctggggtgaagtcctatccagatggttggaatcttcctggaggtggtgtccagcgtggaaatatcctaaatctgaatggtgcaggagaccctctcacaccaggttacccagcaaatgaatatgcttataggcgtggaattgcagaggctgttggtcttccaagtattcctgttcatccaattggatactatgatgcacagaagctcctagaaaaaatgggtggctcagcaccaccagatagcagctggagaggaagtctcaaagtgccctacaatgttggacctggctttactggaaacttttctacacaaaaagtcaagatgcacatccactctaccaatgaagtgacaagaatttacaatgtgataggtactctcagaggagcagtggaaccagacagatatgtcattctgggaggtcaccgggactcatgggtgtttggtggtattgaccctcagagtggagcagctgttgttcatgaaattgtgaggagctttggaacactgaaaaaggaagggtggagacctagaagaacaattttgtttgcaagctgggatgcagaagaatttggtcttcttggttctactgagtgggcagaggagaattcaagactccttcaagagcgtggcgtggcttatattaatgctgactcatctatagaaggaaactacactctgagagttgattgtacaccgctgatgtacagcttggtacacaacctaacaaaagagctgaaaagccctgatgaaggctttgaaggcaaatctctttatgaaagttggactaaaaaaagtccttccccagagttcagtggcatgcccaggataagcaaattgggatctggaaatgattttgaggtgttcttccaacgacttggaattgcttcaggcagagcacggtatactaaaaattgggaaacaaacaaattcagcggctatccactgtatcacagtgtctatgaaacatatgagttggtggaaaagttttatgatccaatgtttaaatatcacctcactgtggcccaggttcgaggagggatggtgtttgagctagccaattccatagtgctcccttttgattgtcgagattatgctgtagttttaagaaagtatgctgacaaaatctacagtatttctatgaaacatccacaggaaatgaagacatacagtgtatcatttgattcacttttttctgcagtaaagaattttacagaaattgcttccaagttcagtgagagactccaggactttgacaaaagcaacccaatagtattaagaatgatgaatgatcaactcatgtttctggaaagagcatttattgatccattagggttaccagacaggcctttttataggcatgtcatctatgctccaagcagccacaacaagtatgcaggggagtcattcccaggaatttatgatgctctgtttgatattgaaagcaaagtggacccttccaaggcctggggagaagtgaagagacagatttatgttgcagccttcacagtgcaggcagctgcagagactttgagtgaagtagcctaagaggattctttagagaatccgtattgaatttgtgtggtatgtcactcagaaagaatcgtaatgggtatattgataaattttaaaattggtatatttgaaataaagttgaatattatatataaaaaaaaaaaaaaaaaaaaaggattttggaatttaaaaaaaaaaaaaaggtacctgcccnnnnnn

SEQ ID NO: 22867 - DNA, 862 bp, Homo sapiens; identical to SEQ ID NO: 21330

SEQ ID NO: 22868 - DNA, 3983 bp, Homo sapiens; identical to SEQ ID NO: 21101

SEQ ID NO: 22869 - DNA, 701 bp, Homo sapiens
ccttccatcatgattgtgaggcctccccagccacatggaactgtaagtccgttaaacctctttcatttgtaaattgccaagtcttgagtatgtcttcatcagcagcatgaaaatggactaatacatccagcctcgggtattcttttatagcagtgaaaattgactttagacagtaatatgttcacaaattctggggagtaggatggtggatatctttgaggggccattattcttcttaccacagagagtgagagataaggagagtttgttgccttaagtggagtcatgaacttcagctgggagtacatctagcctgaggcaacctccacggaagagccagggaaataaatgctctgccttccagtcctgtggggactgttcagtgtgttatggaaggggtcccgaacatcccgcgccatggaccagtgagctgcgggcgaactagcactcactgcctgagtattactgcctgagcttcgcctcctgtcagatcagtggcggcatcagattctcacaaaagtgcaaaccctattgtgaactgtgcatgtgcaggagggatctaggttgcacgctccttatgagaatataactaatgcttgatgatttgaggtgtaacagtttcatccccaaacaatccccccgccgcctcacctactcaatctctgtagcattccacagtctttatagcaacagaatacccc

SEQ ID NO: 22870 - DNA, 2187 bp, Homo sapiens; identical to SEQ ID NO: 21516

SEQ ID NO: 22871 - DNA, 2071 bp, Homo sapiens; identical to SEQ ID NO: 21824

SEQ ID NO: 22872 - DNA, 1147 bp, Homo sapiens; identical to SEQ ID NO: 22487
  misc_feature 1, 2: n = A,T,C or G

SEQ ID NO: 22873 - DNA, 604 bp, Homo sapiens; identical to SEQ ID NO: 20360
  misc_feature 596, 604: n = A,T,C or G

SEQ ID NO: 22874 - DNA, 414 bp, Homo sapiens
  misc_feature 1, 2, 3, 4, 5, 6, 7, 8, 9, 10, 11, 12, 13, 14, 15, 16, 17,18, 19, 20, 21, 22, 23, 24, 25, 26, 27, 409, 410, 411, 412,413, 414: n = A,T,C or G
nnnnnnnnnnnnnnnnnnnnnnnnnnncccttggtataacttggaacaaattttttttcccttggtataacttggaacaaattttatttttaaaaagaaaaaaaaaggaaaataatggtccacagctcctaccctcacccccatgagcccatccccaccacaaggacaagcttacagttcctgaaggtgaggccaacagctgctgaggagcaaggactcgttccagctgcttctaaacaagggggccaggcctctgccagagccttctccttcctgccctgtgtcaagctatccaagcttcctcctcaacctttaccctgccctatgccctgaaactacctgacacgtattttcctcttgtacttaattgatagtagaatttccctcatacatgtcaagtactataaannnnnn

SEQ ID NO: 22875 - DNA, 2367 bp, Homo sapiens; identical to SEQ ID NO: 22718
  misc_feature 1, 8, 9, 2339, 2340, 2341, 2342, 2343, 2344, 2345, 2346,2347, 2348, 2349, 2350, 2351, 2352, 2353, 2354, 2355, 2356,2357, 2358, 2359, 2360, 2361, 2362, 2363, 2364, 2365, 2366,2367: n = A,T,C or G

SEQ ID NO: 22876 - DNA, 353 bp, Homo sapiens
  misc_feature 350, 351, 352, 353: n = A,T,C or G
acagtatgggcaagtgggagttaatttataaccaaggatcagggtggggttggtgggtggaaaaatcacaaagagaaaacatcaagggtaagggggattctggctaaaccaaccaaacaggattcttgctgaagacaggctgggtgatcagacatcacctgtggcacggtggaggctgaggaacccgatcagatatccagagtgatcagataccgagggtgggaggttctggctaaactgactgagcaaggtttttttgctaaaactggattttacaaggaaatgcacagatggcctacaaggttcaggaacttgatataagtttgatcaagcgaagaatctttgtccannnn

SEQ ID NO: 22877 - DNA, 283 bp, Homo sapiens
  misc_feature 1, 2, 3, 4, 5, 6: n = A,T,C or G
nnnnnncaaattcgacgtacaaggaggatactggcaaagatgagctgcctaggaatagccaggcaacccgctgcttctttgagcccccgggtaaaataagcagagacaactggaaggcttgatgtgaaaaaaagctgtttaagtgtacagacccttaaggaatatctggagtctttacagtgtttggagtctgataaaagtgactggcaagcaaccaatacagacttactgctggcctatgctaatcttatgcttcttacgctttcccctagagatgtgcagg

SEQ ID NO: 22878 - DNA, 2843 bp, Homo sapiens; identical to SEQ ID NO: 20339
  misc_feature 1, 2, 3, 4, 2815, 2816, 2817, 2818, 2819, 2820, 2821, 2822,2823, 2824, 2825, 2826, 2827, 2828, 2829, 2830, 2831, 2832,2833, 2834, 2835, 2836, 2837, 2838, 2839, 2840, 2841, 2842,2843: n = A,T,C or G

SEQ ID NO: 22879 - DNA, 995 bp, Homo sapiens
  misc_feature 1, 2, 3, 4, 5, 6, 7, 8, 9, 10, 11, 12, 13, 14, 15, 16, 17,995: n = A,T,C or G
nnnnnnnnnnnnnnnnncatctcacttcattcaccattatttgttaattttattttgatttttaaaaggcattattcagtgtacaattaacaaagaaatcagttttctactctactgtacttaggatgcttcaaaaacatcaggtgaaatgatctatgctttaagagccagaaaactcaggcctcagcaactaaaacagagaattccaaaattgtaattacaaatcagatggtaagcctaatttcatgcccctaatattcagatttgtggacactgcaagaggaaatatcatttgcttccaaatatctggcttgaatattgctgcagttaaaggatctcgctaaggttaaacaacaaacccaaaccacttagagcttcacagtttagctgctttagcaagtgaagaggtagtcggtattcaggatgctgtgggaatgcaaatgatttgattttgaggcatggctgttcctttttcactatgcccctcactctgaacaagctcatgctttcactcaatcaaaacctacttatcacagccgttctccaggttccgaacctccgtatggcagatcaaagtccataatcatttctatttataaatgccaaaatagtcattaagattatctgaggacatcacttccataggtaatttaaaggatttcttttcaggtagagcagcacttaaagcacataccttctccagtctttctgggtcaaagaataatgagcagagtccaccctgcgtttggtggtctttggtcttatgatttggggaggcaccatggatgaacagctttaaatgtaaaggtcaatgtaaacagaaattttggagttttatcttgtgcctggtatagcagcagactcccatgatgaatttcaagttaaatactgttacctaaaatgtgctgtacctcagaaaacggaattccatgtgaaaaacagtagcatacaggtatatacgagaaagcttatgttcttgcattgagacggacgcn

SEQ ID NO: 22880 - DNA, 558 bp, Homo sapiens; identical to SEQ ID NO: 21631
  misc_feature 1, 2, 3, 4, 5, 6, 7, 558: n = A,T,C or G

SEQ ID NO: 22881 - DNA, 886 bp, Homo sapiens; identical to SEQ ID NO: 21943
  misc_feature 1, 2: n = A,T,C or G

SEQ ID NO: 22882 - DNA, 3421 bp, Homo sapiens
  misc_feature 1, 2, 3, 4, 5, 3401, 3402, 3403, 3404, 3405, 3406, 3407,3408, 3409, 3410, 3411, 3412, 3413, 3414, 3415, 3416, 3417,3418, 3419, 3420, 3421: n = A,T,C or G
nnnnncaggtacgcgggggagtttcacgcgcgtatgctttgcccgccatggccgcagtcaaggagcctttggagttccatgccaagcggccttggcgccccgaggaggcagtagaagatccggacgaggaggatgaggataatactagtgaagccgagaatgggttctccctggaggaagtgttacggctcggaggcaccaagcaagattaccttatgctggctactttggatgagaatgaggaagtgatagatggaggcaaaaaaggagcaatcgatgaccttcagcaaggtgaattggaagcatttattcaaaatcttaatttggcgaagtatacaaaagcttccttaattgaagaagatgaaccagctgaaaaagaaaattccagcaaaaaagaagtaaaaatacctaaaataaataataaaaatacagcagaaagtcaaaggacatcagttaataaggtgaaaaataagaataggccagaaccacattctgatgagaatggcagtaccacaccgaaagtaaagaaagataaacagaacatctttgaattttttgagagacagactttgttacttaggcctggaggcaaatggtatgatctggagtacagcaatgaatattctttgaaaccccagcctcaggatgttgtatctaagtacaaaacccttgctcagaagctgtatcagcatgaaatcaacttattcaaaagtaagacgaatagtcaaaagggagcctcttctacctggatgaaggcaattgtgtcatcggggacactaggtgacaggatggcagccatgattcttcttattcaggatgatgccgttcacacacttcagtttgtagaaactcttgtgaaccttgttaaaaagaagggcagcaaacagcagtgccttatggccttggatactttcaaagagttgcttatcacagaccttttgccagacaatcggaagctgaggattttcagccagcgtccttttgacaaactggaacagttgtccagtggcaacaaggactcaagagatagaagactgatattatggtattttgaacaccagctgaaacacttagtggctgaatttgtgcaggtcttagaaactttaagtcatgatacattagtaaccactaaaactcgagcccttaccgtggctcatgagctgctttgtaacaagcctgaggaagaaaaggctcttcttgtgcaagtggtaaataaactgggagatcctcagaacagaattgccacaaaagcatcccatctgttagagacattactttgtaaacatcccaatatgaaaggagttgtgtctggtgaagtagaaaggctactcttccgctcaaatatcagctccaaagctcaatattatgcaatttgctttttaaatcaaatggctctgtcccatgaagaaagtgaattggctaacaaattaataactgtttacttttgcttttttcggacttgtgtcaaaaaaaaagatgttgaatcaaaaatgcttagcgcccttttaacaggtgtgaatagggcatacccttattcccagactggtgatgacaaagtaagggagcagattgacacactgtttaaagtgttgcatattgtgaattttaataccagtgtccaggctttaatgttgcttttccaagtaatgaattctcagcagacaatatcggatcgatattacacagcattatacaggaagatgttggatccagggttgatgacgtgttccaagcaagctatgtttcttaaccttgtctacaaatctctgaaagctgacattgtgttgcgccgggtgaaggcttttgtgaagaggttacttcaagttacttgtcaacagatgccaccatttatatgtggagctttatatcttgtgtctgagatccttaaagcaaaaccaggtttaagaagccaactagatgatcatccggagtctgatgatgaagaaaattttattgatgcaaatgatgatgaagacatggaaaaattcactgatgcagacaaagaaacagagatagtgaaaaaacttgagacagaggaaacagttcctgaaactgatgtagaaaccaaaaaaccagaggttgcttcctgggtgcactttgataatttgaaaggtgggaaacagttaaataaatacgatccattcagtagaaaccctctgttctgtggagctgaaaatacaagtctttgggaactcaaaaagttatctgtgcattttcatccctccgtggccctttttgcaaagaccatccttcagggaaactatattcagtattcaggggacccactgcaggatttcactctaatgagatttttggatcgatttgtataccgaaatccaaagccccataaaggcaaagaaaacacagatagtgttgtgatgcagccgaaaagaaaacattttattaaggatattcgtcatcttcctgtgaacagtaaggagttccttgcaaaagaagaaagccaaataccagtggatgaagtgtttttccacaggtattataaaaaagttgctgttaaagagaaacaaaaacgggatgcagatgaagaaagtatagaagacgtggatgatgaagaatttgaagagctgattgacacatttgaagatgataactgtttcagctctggaaaggatgatatggattttgctggaaacgtgaaaaagagaacaaaaggagctaaggataacacattagatgaagattcagaaggtagtgatgatgaacttggtaacctggatgacgatgaagtttctttaggaagtatggatgatgaagaatttgctgaagttgatgaagatggaggaacattcatggatgtgttagatgatgaaagtgagagcgttccagaacttgaagtccactccaaagtcagtactaagaaaagcaagagaaaaggtacagatgattttgactttgctggctcatttcaagggccaagaaaaaagaaaagaaacttaaatgattccagcctatttgtatctgctgaagagtttggccatctattggatgaaaatatgggatccaagtttgataacattggcatgaatgccatggctaacaaagataatgcaagtctcaaacagcttagatgggaggctgaacgtgatgactggctacacaacagagatgcaaaaagtatcatcaagaaaaagaaacattttaaaaagaagaggattaaaaccactcaaaaaactaaaaaacaaaggaaatgagttattaatgtaaattatagattaaaattctacttacatctaatttttgctgttcaaccatgttttttgatctagctctctgattccatacattccagacttctcagtggatttgtaataaactataaataaaaatagctctcatttataaagtcatgtggaaacattgttaaaattaaatgtattgannnnnnnnnnnnnnnnnnnnn

SEQ ID NO: 22883 - DNA, 1180 bp, Homo sapiens
  misc_feature 1, 2, 1178, 1179, 1180: n = A,T,C or G
nnacccacgcgtccgctagaaagctctgtcttctataagcttaagagtccgagtgtctttacaccactgagtgccatgcagagaagggtcattttccttgtatcttaggaagctggaaatgcaggctggtctccctttcttgcctttgtcactaaccccgagctgtcagccatttggaatcagaactgctttccagtgttctaagtccttatttgattacaaatatttggtgaatcaaagtaaggcactttggtcctaatttttgacctttggtcctaatttttgtttgtaagatgtggagaataaccctgaccttaccaggggtcctgggaatgtgaatccattcgtcaagtggttccacatctagaagaattttgcctatgccgtgtcaggcatcattcaacacaaggccaactatctgctgccagtctggcataagatcagattgaaactgctaagtaatggtacatccaaataaacaaagttcttccaagagagtaaacccaagtccatcttatacacgtatttgttctgggttggtggggacgacagttcagccgagtccgatgttctagagcagaggttctcaaccctggctgtgaattaggatcatctggccagtttttgtttttaaatcagtgcaagggccctcccctcagagattcagattcagtagcttcaggtgggacctggaatccatgctttgtttggaacctcaggagtgttcttgatgtgcagccaggattgacaagagcctttagtctagagctcgcagcagacctctagactatttggaatctgattttaaagaatggcccagcagatgaaggtgtttttttaaattgttagtcatgtgaaacgaactgagtattgatcagtaatacagacagggcagctgtgagagagtttgatgctaatctttgcagaactcaagaacatactccataaagtacagctgaaaagatcacgaaaaccttgagccttcgaggaaagagaagggtgacttggggtatgtatggggagaactaaaaacctgtcatcttggttcccacttgtggggaataaagggaaggtattgtcttaactgagctgctaactaatcaagcatgaaggtttctgggaagctgttttgttttttttttttaatttcacctggaattaaattaatagtcccctcnnn

SEQ ID NO: 22884 - DNA, 430 bp, Homo sapiens
  misc_feature 1: n = A,T,C or G
nagctccccgcggtggcggccgaggtacagcagaactgcatgatcagctgtatggtagccttgaaaaccaacaggccacaatcacagtgaaaacctcaggttggcagccactggaggatataaaatgagtttggatctccttcaatgccccattcccagagaactgtcattatttggacctgctggtagttccctaaaggacgtgcaaggatgtttttatttgactggacacttgaagcttgccctgtatgaacagcccccatcttcccatgcttgtcaaaaatcagaggcaactaacactgcggcttcctgagagtctcactctgtcacccaggctggagagcaattgcacaaacacttggctcactgcagcctcaacttcttgtcctcaagtgatcctcccaccttagcctcctaagtagctgggacc

SEQ ID NO: 22885 - DNA, 300 bp, Homo sapiens
acttttcagttcaaggatttctgttgcatattataattattgtcaagtttccttaaaacgattattttgaattatttttcagagagttaatatatctctatttctttagggtcaatcgctggaaatttttttgtccttttggtgatgtcacgtttctgtaattgttcttgatccttgtagctgtgtattgatatctgtgcatttgaaaaagtagctatttattcaaatctttacagtttggctttgcattggaaagtcatgtggcaggagcaatgatggggtgtgccagaagcccacggt

SEQ ID NO: 22886 - DNA, 3228 bp, Homo sapiens
  misc_feature 1, 2, 3216, 3217, 3218, 3219, 3220, 3221, 3222, 3223, 3224,3225, 3226, 3227, 3228: n = A,T,C or G
nngctcagggttccggagccgcggcccggggaggcgaaagcggagggggccgcgccgccgaccccgtccaagccgctcacgtccttcctcatccaggacatcctgcgggacggcgcgcagcggcaaggcggccgcacgagcagccagagacagcgcgacccggagccggagccagagccagagccagagggaggacgcagccgcgccggggcgcagaacgaccagctgagcaccgggccccgcgccgcgccggaggaggccgagacgctggcagagaccgagccagaaaggcacttggggtcttatctgttggactctgaaaacacttcaggcgcccttccaaggcttccccaaacccctaagcagccgcagaagcgctcccgagctgccttctcccacactcaggtgatcgagttggagaggaagttcagccatcagaagtacctgtcggcccctgaacgggcccacctggccaagaacctcaagctcacggagacccaagtgaagatatggttccagaacagacgctataagactaagcgaaagcagctctcctcggagctgggagacttggagaagcactcctctttgccggccctgaaagaggaggccttctcccgggcctccctggtctccgtgtataacagctatccttactacccatacctgtactgcgtgggcagctggagcccagctttttggtaatgccagctcaggtgacaaccattatgatcaaaaactgccttccccagggtgtctctatgaaaagcacaaggggccaaggtcagggagcaagaggtgtgcacaccaaagctattggagatttgcgtggaaatctcagattcttcactggtgagacaatgaaacaacagagacagtgaaagttttaatacctaagtcattcccccagtgcatactgtaggtcattttttttgcttctggctacctgtttgaaggggagagagggaaaatcaagtggtattttccagcactttgtatgattttggatgagctgtacacccaaggattctgttctgcaactccatcctcctgtgtcactgaatatcaactctgaaagagcaaacctaacaggagaaaggacaaccaggatgaggatgtcaccaactgaattaaacttaagtccagaagcctcctgttggccttggaatatggccaaggctctctctgtccctgtaaaagagaggggcaaatagtctccaagagaacgccctcatgctcagcacatatttgcatgggagggggagatgggtgggaggagatgaaaatatcagcttttcttattcctttttattccttttaaaatggtatgccaacttaagtatttacagggtggcccaaatagaacaagatgcactcgctgtgattttaagacaagctgtataaacagaactccactgcaagagggagggccgggccaggagaatctccgcttgtccaagacaggggcctaaggagggtctccacactgctgctaggggctgttgcatttttttattagtagaaagtggaaaggcctcttctcaacttttttcccttgggctggagaatttagaatcagaagtttcctggagttttcaggctatcatatatactgtatcctgaaaggcaacataattcttccttccctccttttaaaattttgtgttcctttttgcagcaattactcactaaagggcttcattttagtccagatttttagtctggctgcacctaacttatgcctcgcttatttagcccgagatctggtctttttttttttttttttttttttccgtctccccaaagctttatctgtcttgactttttaaaaaagtttgggggcagattctgaattggctaaaagacatgcatttttaaaactagcaactcttatttctttcctttaaaaatacatagcattaaatcccaaatcctatttaaagacctgacagcttgagaaggtcactactgcatttataggaccttctggtggttctgctgttacgtttgaagtctgacaatccttgagaatctttgcatgcagaggaggtaagaggtattggattttcacagaggaagaacacagcgcagaatgaagggccaggcttactgagctgtccagtggagggctcatgggtgggacatggaaaagaaggcagcctaggccctggggagcccagtccactgagcaagcaagggactgagtgagccttttgcaggaaaaggctaagaaaaaggaaaaccattctaaaacacaacaagaaactgtccaaatgctttgggaactgtgtttattgcctataatgggtccccaaaatgggtaacctagacttcagagagaatgagcagagagcaaaggagaaatctggctgtccttccattttcattctgttatctcaggtgagctggtagaggggagacattagaaaaaaatgaaacaacaaaacaattactaatgaggtacgctgaggcctgggagtctcttgactccactacttaattccgtttagtgagaaacctttcaattttcttttattagaagggccagcttactgttggtggcaaaattgccaacataagttaatagaaagttggccaatttcaccccattttctgtggtttgggctccacattgcaatgttcaatgccacgtgctgctgacaccgaccggagtactagccagcacaaaaggcagggtagcctgaattgctttctgctctttacatttcttttaaaataagcatttagtgctcagtccctactgagtactctttctctcccctcctctgaatttaattctttcaacttgcaatttgcaaggattacacatttcactgtgatgtatattgtgttgcaaaaaaaaaaaaaaaagggggcccttttttgtaaaaaaaacctgggtggggaaacccatttggtttttcccccttggaacctggttttaaccccttttttaacggggaaaaaaaactttgaaaaagtttttttttcaccttttaacggggaaatgggtgggttttaaaacccttttcccccaaacgccgggtttttatccggttaaaaaaataattgggggtttttaacaggaaaaaaaaccctggtccaatttggccaaaaaaaatttgggaattggaatttaattcaccccccccacaaattttaattttccaaggggttttttggcaacaaaaaagggtttgaaaaaaaaagcccccnnnnnnnnnnnnn

SEQ ID NO: 22887 - DNA, 779 bp, Homo sapiens; identical to SEQ ID NO: 20149
  misc_feature 1: n = A,T,C or G

SEQ ID NO: 22888 - DNA, 1189 bp, Homo sapiens; identical to SEQ ID NO: 20185
  misc_feature 1179, 1180, 1181, 1182, 1183, 1184, 1185, 1186, 1187, 1188,1189: n = A,T,C or G

SEQ ID NO: 22889 - DNA, 2538 bp, Homo sapiens; identical to SEQ ID NO: 20316
  misc_feature 2538: n = A,T,C or G

SEQ ID NO: 22890 - DNA, 673 bp, Homo sapiens; identical to SEQ ID NO: 21321
  misc_feature 669, 670, 671, 672, 673: n = A,T,C or G

SEQ ID NO: 22891 - DNA, 515 bp, Homo sapiens; identical to SEQ ID NO: 20177

SEQ ID NO: 22892 - DNA, 389 bp, Homo sapiens; identical to SEQ ID NO: 20696

SEQ ID NO: 22893 - DNA, 701 bp, Homo sapiens
  misc_feature 1, 2, 3, 4, 5, 6, 7, 8, 699, 700, 701: n = A,T,C or G
nnnnnnnnagagaacagatgggcaggtccacagcactgccagattctgcacaagctccatttatcgttggttcttgcttttttccttctgtgtttttaattttttaaaaaacattgtatgttctagagaactagcttcacaaaaggtcggtggctgatgatctttcagctaagatttcaaatgtagaagaacaattcaaaatgctatcactgtgtatgtaagaaggatggggcagatttcattttaccctctagtctccctcaatgcatgcacggatttatctgtacgctaagctctctgctctgcatctgtagctccttgtggattatattgtctcagtgatcagaaatgattttctcggatatgaacaccgtttctggctcccctaaagtgcatcctcctaatgggacccggttttacacttttcaagaatttgctgcactgacaaaagaattaaatgcctgcagggaacaacttctagaaaaggaagaagaaatctctgaacttaaagctgaaagaaacaacacaagactattactggagcatttggagtgccttgtgtcacgacatgaaagatcactaagaatgacggtggtaaaacggcaagcccagtctccctcaggagtattcagtgaagttgaagttctcaaggcactgaaatctttgttttgagcaccacaaggccttggatgaaaaggnnn

SEQ ID NO: 22894 - DNA, 686 bp, Homo sapiens; identical to SEQ ID NO: 20656
  misc_feature 1, 2, 3: n = A,T,C or G

SEQ ID NO: 22895 - DNA, 1902 bp, Homo sapiens
  misc_feature 1, 2, 3, 4, 5, 6, 7, 1899, 1900, 1901, 1902: n = A,T,C or G
nnnnnnncactgggtcttttgtctttcttggccgactttcccagcgtccttcttcttcttgtcgtccttaggcggcattgcgaagctcggagaatagcagcagactccgcagcctcgtcaagatgtcggacaaaaaggaagcgctgctcagaaacgggcccaaaaaccaccgtccgctgtgagtacttccggggcaagaggcggagccaggcagaggaagtcccacggcgaagcgctcgccctctagcctgaggcggaagacaggaagcggattctagttcccaagccgcaccgcctaaatactgccggagtctgcgctagttgtgacgcatactatagcgctgttttcctgcactgataaacgaaaagcaatccaccaggtctcggcagctaactttccggcactacttatgcccgagcgtgtcgtcccagtgcgcaagtgcagcaggtggctcacggaggggcgcgggaggaagaggaggaggaggaggaggctggggtggggccggcggcaagtgctgtgatgcggttccggggaggggccgtcgggtagaggctgaataccagtttccgagcggcaaggcagcgatggcgatttttagtgtgtatgtggtgaacaaagctggcggcttgatttaccagttggacagctacgcgccacgggctgaggctgagaaaactttcagttatccgctggatctgctgctcaagctacacgatgagcgtgtgttggttgctttcggccagcgggacggcatccgagtgggtcatgcagtgctggccatcaatggcatggacgtgaatggcaggtacacggccgacgggaaagaggtgctggagtatctgggtaaccctgctaattacccggtgtccattcgatttggccggccccgcctcacttctaatgagaagcttatgctggcctccatgttccactcgctctttgccatcggctcccagctgtctcctgaacagggaagctcaggcattgagatgctggagacagacacattcaaattgcactgctaccagacactgacagggatcaagtttgtggttctagcagatcctaggcaagctggaatagattctcttctccgaaagatttatgagatttactcagactttgccctcaagaatccattctattccttagaaatgcctatcaggtgtgagctctttgaccagaacctgaagctagctctggaggtggcagagaaggctggaacttttggacctgggtcataggctgaacctgttatggacccccaaattctgagagttcctgcaacaagaatactgctgttgacactccagtggaaatcccagcagccttgttagtgcacttgaaagtgggagaatgctgaccctgatgacttgtactgattcctgagccttaacactgtgctctttccttctgtatataccatggtcttactttccaactctgtacagatttatttatggaggagctaggtccataaatgttgtaataaatattcctttgatcttggtgtttgcaaaaaaaaaaaaaaagaaaaaaagaaaaaaaaaaaaaaaaaaaaaaaaaaaaaaaagggggggggggtaaaaaattccccggggggcgcggccccagattgacgctaaccccctatgtctctggtaaaccaaggggggcccccaataggggggccgcaaatagaaaggaggaccacgagccgggcgttaaaacacggccggggcgggaaaaaaacgggccgcccgggaaccgttggggggaaggaacccccctcctcgcgggggggggaccaatcagcggcacccaccaccccacgaaatattaacgcccgcggcgcaacacaaccagcttccagcggtgtcaacgggtgaacccacgcggcaaagcaccgcggctannnn

SEQ ID NO: 22896 - DNA, 2015 bp, Homo sapiens
  misc_feature 1, 2, 3, 4, 5, 6, 7, 8, 9, 10, 12: n = A,T,C or G
nnnnnnnnnngnccgtcccggtccggaattcccgggtcgacccacgcgtccgtcatgagattcccttgatcagccctgcagctgtagtacagcgctgtgccctcacctccacccttcctgttgttcccacgtgggcaataccagggacccatggggaaactcaagaatgacagcttctatattttgtaattctggatgaaagataactgtgttgaacaaacaggtgctccaggctttgattatagatacgacttcaaaaatatgctaagacgcttgacttattaaggactttaacctactcaacagtatttcatatccattgtggttagttactcagttatgttgagaagaatctggagctaaaagcagagatgtttgaggtgacggtaggaatgtgagcaggatggtgatgggggtttttgttaaaatgcatctgagcaagtcagccagccccgaagtcccctcagtgtgtgtgtctcgagtggctacctgttgggcttgtgggcagtgattgtacagagcctgtccattgggtgcagtcatgtagatctgaagccctgaaaagcctcatgtctgcatcccctttccaaggctgcttccctggtgtgtctgttctctcctctgtcccaggtgctgggagcgtcctcttcagcgtcttttcctagagctggtcaccactaggctgtcactataaattccttgaatataagtaacagttattaatgaacttctaaatttctaatttctctctctctctctttttttttttttttgttgttgttaaaaagggcctactacattggcgctattcttaggacttctgcaacttttaaagtcttactggtctttcttgttgcttgtgtattaggagttccccgtgtgggctctagaatccccttttggagtacatgctctcctaggatactcatactaatggccctatctgttctcaggatggagagaacacagaagctactatccatgtcaggatttattctatttatatcttattacaataaaattagtggcactttattcataaatattcatgagcctgttaattgttagttgtcttcctgtagctgaatcaacaagttattttcaactcaattttatgacttgcgaaaaagcttttgccctgttgtgtaccataacatttaaaagaatggaaaatgactgaaatccaatttagattatttttagagtatttttccagcaaattcaatttattctgaaatttaaatccagatcttttctaatatggtattacaatgaaaagaataaagagaagatttgaattttcagtttcattttcaaaaactatttaccaaaacaaatggagaagaaacatccaaaagcacatttcatttctccaaactttgtgttttaaattatagttataaattgtaaggtaattttaaattgtccctcgtattatttctccacgtctgttttagtttaatgtctcctaagcttttctctcatagcgtagacctagggaagggatgggaagattgcccagtccccgatggctgcgcacacaggaggcggcggagcacaaggcaagtgagtttgcactgtcagccccagaccgtaagcttggctacactgatgtttttctttactaaggatactattcaaaaattaacattttcatctcagtaagtttttagaacatcaaaatgttttctgagctccaagtggctaggttgtaaaagttttataataatttgcaattaaaatacatgatacatattaatccattaaagactagtgggaatgtatcagccagagtagcaagtaatttttgttttataaatcatagtatctgtcatcttgcagtattaccaatgctgttgtaaattgaatttaaagtggtattaaaaaaaactgttaaacaatttttatctgtttgtatatcttactatagattatgtacaagtaacatctaaataaaattacacttttaaccctaagaggaaaaaaaaaaagggcggcgctcccgatcggacgcg

SEQ ID NO: 22897 - DNA, 613 bp, Homo sapiens; identical to SEQ ID NO: 20105

SEQ ID NO: 22898 - DNA, 2451 bp, Homo sapiens
ctaggttcgaggctggggttaaatcggccgaggtcagcctaggctataaggtgtattttatcacctacagaccatatgcagactaaatacaacacttgtgcctgattctgaatggtatcttatatcaaaaggctcccttaattttagctcttgcttctcaagcttctctctcaacttatcagaactgcctatagtaaccaaaatggattcatgaagaaaaaaatatattttaggaaaacatgtgcaaaaagcatctaagcatctgttaacattaaaaccagaaggcagtatgtgctgcagagtacataagaagaggctttaaaatttagtaattcacaacatccacttagaagtattatagtaatcttttaaagtaacacaccacaatggtacacgctcttctgctgctgtttgtctacttcctcctgcttccccgccgccgccgccgccatcatgagggaaatcgtgcacttgcaggccgggcagtgcggcaaccaaatcggcgccaagttttgggaggtgatcagcgatgagcacggcatcgaccccacgggcacctaccacggggacagcgacctgcagctggaacgcatcaacgtgtactacaatgaggccaccggcggcaagtacgtgccccgcgccgtgctcgtggatctggagcccggcaccatggactccgtgcgctcggggcccttcgggcagatcttccggccggacaacttcgttttcggtcagagtggtgctgggaacaactgggccaaggggcactacacagaaggcgcggagctggtggactcggtgctggatgttgtgagaaaggaggctgagagctgtgactgcctgcagggtttccagctgacccactccctgggtggggggactgggtctgggatgggtaccctcctcatcagcaagatccgggaggagtacccagacaggatcatgaacacgtttagtgtggtgccttcgcccaaagtgtcagacacagtggtggagccctacaacgccaccctctcagtccaccagctcgtagaaaacacagacgagacctactgcattgataacgaagctctctacgacatttgcttcagaaccctaaagctgaccacgcccacctatggtgacctgaaccacctggtgtctgctaccatgagtggggtcaccacctgcctgcgcttcccaggccagctcaatgctgacctgcggaagctggctgtgaacatggtcccgtttccccggctgcacttcttcatgcccggctttgccccactgaccagccggggcagccagcagtaccgggcgctgaccgtgcccgagctcacccagcagatgtttgatgccaagaacatgatggctgcctgcgacccccgccatggccgctacctgacggttgccgccgtgttcaggggccgcatgtccatgaaggaggtggatgagcaaatgcttaatgtccaaaacaaaaacagcagctattttgttgagtggatccccaacaatgtgaaaacggctgtctgtgacatcccacctcgggggctaaaaatgtccgccaccttcattggcaacagcacggccatccaggagctgttcaagcgcatctccgagcagttcacggccatgttccggcgcaaggccttcctgcactggtacacgggcgagggcatggacgagatggagttcaccgagggccgagagcaacatgaatgacctggtgtccgagtaccagcagtaccaggatgcccacagcggaaggcaggagggccgagttcgaaggcaggaggctgaggaggaggtggcctagagccttcagtcactggggaaagcagggaagcagtgtgaactctttattcactcccagccttgtcctgtggcctgtcccactgtgtgcaccattgctgttttccctgtccacatctcatggctggacagacaccaccagttaaagcattttcatcgtgaaaccccaaaaagaagagaagccgggtggagcccggtcccttgggatgtcttcccttgggtggggcgcacgagcttcccaccgctatcccccacgccttctcccgctttggtccctcccctgctggtctcgcctctcattggcccgagtgctcgcggcgcttaatctacggacgcctcaggtccttggagcccgccaggttgtgactacaccgcgtccgccgaggtggcggcaaaggccctgcgacgtgcgacgagtgcgcgcctgctcgcgtggtagcaatgcgagccccgtgtcctgttcgtggaggcggtggacctttcgatgggagcgccactacgcttacagcaagcttttacttgcgtgtactcgctgccgtttcacgcttgtgacaagtgttcagtggtgttccaagtatcctggcgtatcgcggcggattgcaaaggtgttgggttaccggcgtacggtctttggcctttttgtcggggctctctctg

SEQ ID NO: 22899 - DNA, 1380 bp, Homo sapiens; identical to SEQ ID NO: 20118
  misc_feature 1380: n = A,T,C or G

SEQ ID NO: 22900 - DNA, 585 bp, Homo sapiens; identical to SEQ ID NO: 22537
  misc_feature 1, 582, 583, 584, 585: n = A,T,C or G

SEQ ID NO: 22901 - DNA, 388 bp, Homo sapiens
  misc_feature 252, 253, 259, 388: n = A,T,C or G
acctacatcacgagtgttacttgaatggagatgtataaagtgcattttaaattcatttgtttccttaacattttcccttcatttcttatcttttcagagtttcttcttcaaggtctcaaggtctgaagcatcccacagaatgatcctactgaataactcccataagttgctggccctatacaaatccttggccaggagcatccctgagtccctgaaggtcagggaacagtgggaggtcagggtatgggatgnngggtgntgaaggatgagaaaatagcaggcttgtgattctagtccttcctgactgtttgcagagggttggagctgggaaacaggatgggactgggggcacaggctgcatatcaagagctgctgcttctctttgggn

SEQ ID NO: 22902 - DNA, 843 bp, Homo sapiens
  misc_feature 1, 2, 3, 4, 5, 6, 7, 8, 9, 10, 11, 12, 843: n = A,T,C or G
nnnnnnnnnnnnaaaaatatttcaaataggttagttaggaacaactttactcagaagacgtatttgagcaaagacatgaaagaggtgaataaagcatgtggatatctagagacagagcattccagacagaaggaacagcaactgtaaatagcaggggcagagtgtgcctgccactggtcagggcagagagtgtgaggaaacaaaggtaaagaagtaaaattttttccagctatcctgtttctaagttccaaaagctatttcttcttttgaatatttcattttataggacttattctcatcttttgatgaaataccttccctcatgtctcccagggactggtatctttttaagttttcttcagttcccctgcactgtttctgcttcctttgagttccccttttttctgtttggtttgcttggttatgctctcttttatattacaggccctttcccccaaatacctggctttttgttcacattaaatagttgactggcagttaggtgaggagtgggggcaagataaggaatgaattttttcatttgaggatcacccccacatgacttcatcttccgactgctcagtttacccagaggtatactgccacccccaatttagggagtaggagccaggctgttagtgtttcgagaccaagcagggaaggggcagagagcctcttgctagtgctcctctctgcagttttacagtacggtttctcctgtttgctaaatcagttgtcactagactatctgtttcccagcttctaaaatcttaaaattataaaactttaatgctaataatctgaagttctttggggttagtccttctgtttgttatttgtgcn

SEQ ID NO: 22903 - DNA, 493 bp, Homo sapiens
  misc_feature 490, 491, 492, 493: n = A,T,C or G
agatggagtctcgctctgtcgctcaggctggagtgcagtggtgtgatctcagctcactacaacctccactccctgggttcaagcctcaagcctcccgagtagctgggtttacaggcatgtgccactatgcccggctaacttttgtgtctttggtagagacagggtttcttcatgttggccaggctggtctcgaactcctggccttaggtgatctgcctgtctcagcctcccaaagtgctaggattataggcatgagcaatcacgcccggcctattggtttatttcaataagcagttatgagtaaagaaagataaaatactagctctatgcattattaagtaaaatacatagcttctgacacagctactttttgctctcctgtgaagccttttaaaactttctctgaattcctgattatgttctgaaagataaagctgctaaaactgggctccaaggatagttactgcaggaaaaaaactgaaggctaaannnn

SEQ ID NO: 22904 - DNA, 953 bp, Homo sapiens
  misc_feature 936: n = A,T,C or G
cgtccggcgggatggctgcagcggcggccggggccgggagcgggccctgggcggcccaggagaagcagttcccgccggcgctgctgagtttcttcatctacaacccgcgcttcgggccgcgcgaaggacaggaggaaaataagattttattttatcatccaaatgaggtagaaaagaatgagaagattagaaatgtcggattgtgtgaagctattgtacagtttacaaggtaatacctctaagtgtgcttttagcgttcagtgaattcttaaaactgctgctggagaattgtcccaaacatatttttttaacctttgtaggacatttagcccatcaaaacctgcaaaatctttacatacacagaagaacagacagttcttcaatgaaccagaagaaaatttctggatggtcatggtatttacatacacagtgtatctttctgaaattgtatggtgaagttatgggtgatctttactgttcagaatttaggaaagttctctggctgttgcatccaagtaaaattaaaataaaattggttgcaattttaaaatcaagttcttcctatttgctttattcattcttggggctgttttaagaagctatgtttctgatgctgtagcatgttcaaagtttttaaattaaggcaaaataaacatggtctaatgaattcattgtataatttcagtttatcaaactttgtaggttgttcggaatcctataattgaaaaacagagtaaagatggaaaaccagttattgaatatcaagaggagggagttgttggacaaggtttatagctcggtgctgcggcagtgctacagcatgtacaagctttttaatggtacatttctgaaagccatggaagacggaagcgtcaagcttctgaaagaaagattagagaaattcttcatcggtatttgcaaacgctacttttgcgntcatgtgacctacttga

SEQ ID NO: 22905 - DNA, 488 bp, Homo sapiens
  misc_feature 1, 2, 3, 4, 5, 6, 22, 436, 485, 486, 487, 488: n = A,T,C or G
nnnnnnacctttaaaataggtngaagatgaaagatgccattgaactactaggtttaccctctcatttcctttatcttcaacttattttctttgtgtcatctgaatcctccagatatctaacttttcctttttatgcctttcacatttccactggagatcactttgtccccttccttaaggttctgtcgggagagatttaagagttggttctagctaaaaaatatggctgtagctctgaagatgacataaaagtttttccctatgcctaagatttcaaatatatgtatacatttgaaagaaaaaacagggagagcattatttttttgtccagattatttttgctcattgtaggtaaaaaacaatctgtgtatatatgtgaaataaaacaaaaacagagacaaaaaaaaaacctttcagtccctacataataactcanaaataaagtttcttcagccagctatggggatgggggaaacaattcccannnn

SEQ ID NO: 22906 - DNA, 1147 bp, Homo sapiens; identical to SEQ ID NO: 22487
  misc_feature 1, 2: n = A,T,C or G

SEQ ID NO: 22907 - DNA, 493 bp, Homo sapiens; identical to SEQ ID NO: 22903
  misc_feature 490, 491, 492, 493: n = A,T,C or G

SEQ ID NO: 22908 - DNA, 455 bp, Homo sapiens
  misc_feature 454, 455: n = A,T,C or G
cgtacttcgggaaaacaagaactgtgcttcaatgtctttataaccacactatatggctcattgtaaatgttcaacaaatgcttgatgaatgactcaatgagcaaaattacgcgaaaacacttgctaacctatctctttttcatcaagtatgtagcaaacacatgcccacacctggcaccagaaactataagtgctatctaaatatcaacattttatttggcctgtgcacttatcagctagtggaaagcataaattattccaataaacagacgggaggtgtggacgcaaaatatcacacctaggtctatcagaactaatgactttcaaatcaaagactgccttacctgataaagacttaacttcatgattatttcaacagggactaaaaaaattacaggaaatcttggaaaccagctatctggccaaagacactaattttagagatgaagaaacnn

SEQ ID NO: 22909 - DNA, 642 bp, Homo sapiens; identical to SEQ ID NO: 21674
  misc_feature 1, 2: n = A,T,C or G

SEQ ID NO: 22910 - DNA, 485 bp, Homo sapiens
  misc_feature 1: n = A,T,C or G
nactgacaaaaataaaaagcaaacagcctaacgcttgggtacaagtggcttcatgcctaataatccatagcacccttgtggggctgaaggcggggaagacttgtcttgagcttcaggaagttagagggctgtagtgaagcttacgaacttgagtccacatacactcccagtcttaggcaaacagaagcaaagactcctgtcctcaaaaatcaaataacaaaaatcaaaataacagaatatttgttgccagtgataaagttagaccctaaataaaaattagaactttagaaagcatgcattcaccaccatgaactttaaagcaacccaatatttaaagaccttcctgacgaaatcagtggaattattaacaaatgtctttatttaatactgtatgataaaatgtgtcaacatttagaaaatctgcgtaactcaaagagccagtattttccagaagaccaatgtatgatgaatcaaaatcacacgtg

SEQ ID NO: 22911 - DNA, 7984 bp, Homo sapiens; identical to SEQ ID NO: 22761

SEQ ID NO: 22912 - DNA, 1026 bp, Homo sapiens
  misc_feature 1, 77, 1025, 1026: n = A,T,C or G
ngcatatggctttctaaattccccagtaacacatggcagcttttcaatgcactaaatctccaaagaatctttcttcncaggttgcagcatatcttttgtgtgccttaacagtaatcttttgcttcaggtgacggtggtttgttcatttgcctttcaatgttttcaaagaatgccctctgtatagccacttttctgccttgagaaagtcttgagttaggtgaaagtaaggcaagtgtcttttgtcaggcctgaaggttgtccccagataagtcaaaacagacaaacacagttctttgaaaataagatctgctctgccttctgtagaactggagtcccacgctggaaatgtgggctgccattgtcaagattgccactaaatcagggagggcattggggcaagggcaagtaaaaatgccaccaaaatttcatgtttcctctttcttgagccactatttacttagttgctgtaaacctttgactattttccagcgttcagatgaagttaattctgatagtttcttctcatttttttgtttgtgtgtttttctggagggaagggccattggtactctgctgtctttgctgacattactcccgtgggtgatttttttgaagaataaatttgatagaagagtttctgagtttttgtcttattaggttgaaagctatctcttcttgagaatgctggtgtatgtggctggtaacagcttgccatttttgtttagttgcttttactttcctgctctggtaattggagagctgtttcaaggcagtttatgcctttattggtgatacaacaagcagtgggtaaaatcttcatcctttggacttcttggttgctcattagtggatactgtgtttccctttccacaggcttccaggtctggagttgttctgcgaaccttaccagctttctagagtgaataatgcctcgatttagtctctttattctgttcttactccacgtaggcagggttgatctctccccaactcttcactggggctcccggacgcgtgggtcgacnn

SEQ ID NO: 22913 - DNA, 1146 bp, Homo sapiens
  misc_feature 1, 1146: n = A,T,C or G
naacaagtacatgtaaatgaaaatataggtacccctgagcctggagagcaccaagaggccaagaaatcatgagaactcatcaaatgaggaggaaacgtcaagtgagatatcctcagactccaccaaagagtcaagacctccagatttcattagtatttctgctagcaagaacatttctggtgagacaccagagggtataaaagcagaaccattgacccctatggaagatgcactaccacccagcctatcaggacaggccaagcctgagggcagtgactgtcacagaaaaatagaaacttgtggttccaggaaatccgagaggtcttgcaaaggtgctctttataaaaccctggtgtctgagggcatgctcacctctctgcgagctaatgttgacagaggaaaacgaagctcaggaaaaggaaactcctctgatcatgaagggtgttggaatgaagaaagctggacatttagtcacgagtgggaccacgtggggagcaagaagttcaagaagaccaagccaaaagaagactgtctccttggctccgcaaagctggatgaagaatttgaaaaaaaattcaacagcctccctcaatatagtcctgttacatttgaccggaaatgtgtacctgtcccaagaaaaaagaagaagactggaaatgtgtcctcagaaccgactaaaaccagcaaaggtcctttccagtctcagaaaaagaacttattccacaaaattgtcagcaaatataagcacaaaaaggagaagcccaatgttccggaaaaaggaagtggggataaatggtcaaacaagcaactcttcttggatgccattcaccctacagaagccatattttcagaagacagaaacaccatggagcctgttcataaggttaaaaatatcccatccattttcaacactccagagccaacaacaacgcaagaacctttggtgggcagccaaaagagaaaagcaaggaaaaccaagattacacaccttgtcaggacagcagatggccgggtatcaccagcaggaggtactttggatgacaaaccaaaggaacaactgcagaggagtctccctaaagcaactgagacagactgcaatgacaaatgctcacacaacaccgaggtcggggagacgcggagcagtan

SEQ ID NO: 22914 - DNA, 2475 bp, Homo sapiens; identical to SEQ ID NO: 21595

SEQ ID NO: 22915 - DNA, 2841 bp, Homo sapiens; identical to SEQ ID NO: 21617

SEQ ID NO: 22916 - DNA, 686 bp, Homo sapiens
  misc_feature 1, 2, 3, 4, 5, 6, 7, 8, 686: n = A,T,C or G
nnnnnnnnactcttggagcttggccatgttagtcttaaaaagccccggagaaaggacccttctgattggctttcaggacttatctaacttgctaagtaaagcctctttgaaagtttcttatgtgtacctcctccccactacctagctctagcttctgtccaacctggcctattttccatccttcaaaacaaaccccaatgtgtatggcttactccagctgcttccttaccttcaggtttgtgggcttcatttaagccatgggaatgccagcttaattaatgcagattaagataagaacattaaaccccaaaaatgatgggaaatcactctgtcttcaaaacaatagaaaataataaaatctagttataaagattatataccattgtcactagtaagaagtggcactcttatttacaaaacataaagaaattagggtttaggtctggcatggtggttcacacctataatccccagcactttggaaggccaaggccagaggattggccaggagttcgagaccaacctgggcaacatagacaaaattagcttggtgtagtggtgtgcgcctgtagtcccaactactcaggaggttgaggttggaggattgcttgagcccaagattttgaggttacagtgagctgtgatcacatcactgcgctccacaaggcaacagagtgagactctcn

SEQ ID NO: 22917 - DNA, 558 bp, Homo sapiens
  misc_feature 1, 2, 3, 4, 5, 6, 7, 8: n = A,T,C or G
nnnnnnnncaattagtatattcttcttgtaccttccagtatacactctatttaataccagaacccataagaaacaaatttagtaaaaatccaggctgggattacaggcgtgaaccaccgcgcctggcccgactaattcatttattcagcgagtgttttctgagcacctactatgtacttgccactgttctaggcactggggatacaggaatgaacaaaatcacccaaatctctgccctcccaattttctggtatggagagaaagttcttttgtagatagggatgagaatcccacagaaaactcaggagtgatgtaacaatgcaaatgctcacaaaatctctttcctcatctttcattccctatttggaaggaaaggtttcaaagacattggatgttggtataaatgaccatcttccttccattattttataaacatttgtcctggtgcaggggtaaaaacaactggggactgccattacaaattatacctattgagagttgggtaaagagttaccattggatccagtccaccaacccaaatgtttttctacatgtatt

SEQ ID NO: 22918 - DNA, 2786 bp, Homo sapiens; identical to SEQ ID NO: 21609
  misc_feature 1, 2, 2777, 2778, 2779, 2780, 2781, 2782, 2783, 2784, 2785,2786: n = A,T,C or G

SEQ ID NO: 22919 - DNA, 892 bp, Homo sapiens
  misc_feature 1, 2, 3, 23, 882, 883, 884, 885, 886, 887, 888, 889, 890,891, 892: n = A,T,C or G
nnnacaggagttcaataccagcntggcaagagatagcaagaccctgcctgtacaaaaaaagaaattttaaattatctgggtgtggtggcacacacctgtagtcctagctactcaggaggtttaggtgagaggattgcttgagtccaggagttgaaggctgcagtgagctatggtcataccactgcactccagcctgggcaacaaacaagaccctgcctctcaaaaaaaacaaaacaaaaatctgacaaatagggttgttaactgtgagcctgaggaaaagtatagattttagtgtacttaaacaacttgtctgttttctttaaatcttttcccttaggttagataatgctgctcatgattgtgagagcacagaaagttcttttgttttctagaattaagtctgctcacctggtttgcattctgcatctgcctttctttagtgcagggtagtgtcagtcccactgtggcccaaagtttgcattctgcgttaaccaagtcacaattaatgaggttttactataggcacaaatgcttaaaaaagaaaaaaacgattgttttgtgtggttaaaataaaaacttgtggggattttaatgtatttctttggtgaaaatacattagttgtttgtctctaattggatcactttcccttctagactctgaacaggaagtgcctcctggaaccacagagtcggttcagtctgtggattactactgtgatagtaagttcatacacgatcttttggtcttcatgttaaaaattgacctcagttgtcaggagatggagaccatcctggctaacacggtgaaaccctgtctctactaaaaatacaaaaaattagctgggtgtggtggcacacacctgtaatcccagctatccgtcnnnnnnnnnnn

SEQ ID NO: 22920 - DNA, 1785 bp, Homo sapiens
  misc_feature 1783, 1784, 1785: n = A,T,C or G
acgcgggtctgcgccacgcgtcctggcgacgcggggccatgtgcaggaccctaacgacaggcgcctccggcccatttacgattatcttgacaatggtaataataaaatggcaattcagcaagcagataaactgttgaagaaacataaggatcttcattgtgctaaggttttaaaggcaattggtttacagagaactggaaagcaagaggaagcctttactcttgcacaggaggtggcagcccttgaacccacagatgacaactcactgcaggcactgactatcctttaccgggagatgcaccgaccggagttagttacaaaactttatgaggcagctgtgaagaaagttcccaatagtgaggagtatcactctcacctcttcatggcctatgccagagtgggtgaatacaagaaaatgcaacaggctggcatggctctatataagattgtccccaaaaatccctactacttttggtctgtgatgagcttaattatgcaatctatatcggcacaggatgaaaacctctcaaaaacaatgtttctgccccttgctgagagaatggtcgaaaaaatggtgaaagaggacaagatagaagctgaggctgaagttgaactttattatatgatcctggaacgtttgggaaagtaccaggaggccttggatgtcatcagagggaaattaggagagaagttgacaagtgagattcagagtcgggaaaataaatgcatggctatgtacaagaagctgagcaggtggccagagtgcaatgccctttcccggcgcctcttactaaaaaactcagatgactggcagttctatctgacttatttcgattctgtctttcgactgattgaagaggcctggagtcctcctgctgaaggtgaacactctttagaaggagaagtacattattctgcagaaaaagctgtgaagtttatagaagatcggataacggaagaatctaaaagttctcgccatctccgaggaccacatctagctaaattggagctgattaggcgtttacgaagtcaaggttgtaacgatgagtacaaactgggtgatccagaagaattaatgttccagtattttaaaaagtttggcgataaaccttgttgttttacagaccttaaggtgtttgttgacctcttacctgctacacagtgtacaaaatttattaatcagttacttggagttgttcctttgtcgacaccaacagaggataagctggcactgcctgctgacatcagagctctgcagcaacatttgtgtgtggtgcagctgacgaggttacttggcttgtaccacaccatggataaaaatcagaaattgagtgtggtcagagaattgatgttaaggtaccagcatggactggaatttgggaaaacctgtttgaaaacagaattgcaattttctgactattactgtctccttgctgtccatgcgcttattgatgtatggagggaaacaggtgatgagaccactgtgtggcaggccctgactttgctggaagagggattaacccatagcccttccaatgctcagttcaaattgctgcttgttcgaatctactgtatgctgggtgcatttgaaccagtggtggatctttatcccagctcgatgcttagcatatcaggcatgatacatggttatctttggcccgaatatgtgattctaaggcagaaggtggcggccaaccgtacttcgaccagttttcatccacaaaaaaccgaaaattatacatcaaatggggtggaaccagaatgctcagaaggagacactcannn

SEQ ID NO: 22921 - DNA, 374 bp, Homo sapiens; identical to SEQ ID NO: 21925

SEQ ID NO: 22922 - DNA, 908 bp, Homo sapiens
  misc_feature 824, 888, 898, 908: n = A,T,C or G
acttgaaaagaaagcatctgtggctgtgcccaaaaaaccggaagccccacgtgcaaaagtgcctgaagctgctcaagaagttgtcccagaaaagaaaattcccaaggcaccaatcaaaaaaccagaagcccccgcagttacagtgccagaagttcctcaagaagccacagaaaaagaaattcccgtggctccacccaaaaaaaccagaagctccaattgtcccagtgcctgaagctcaagaagttgtcccagaaaagaaagttcctaaggctcctcccacaaaaccagaagccccacctgccacagtgcctgaagtcccacaagaaattgtgccagaaaagaaaacactggtgcttcctaaaaagccagaagttccacctgttacagtgccagagcctcccaaagaagtagttcctgaaaagaaagcgccagtggctcctcctaaagagcctgaagtcccacctgttaaagtgcctgaggctcccaaagaagttgttcctgaaaagaaagtgccagtgcctcctcctaaaaagcctgaagtgccacccacaaaagtcccagaggtgccaaaggcagctgtcccagaaaagaaggtgcctgaagctattcctcccaaaccggaaagtcctccccctgcaagtgcctcagcgtgctgccaccgaaggaagtggtcccagaaaagaaagtaccggtgcctcctgccaaaaagccagaagctccacctcctaaagttcctgaagctcctaaagaagttgtacttgaaaagaaagtatctgtggctgtgcccgacaaagcctgaagtcccacctgttaaagtgccagangtcccgaaaagaagttgttcctgaaaagaaagttccagcggtccctcctaaaaagcctgaagtnacacctgttnaaagttgccn

SEQ ID NO: 22923 - DNA, 1001 bp, Homo sapiens; identical to SEQ ID NO: 21314
  misc_feature 681, 682, 683, 684, 685, 686, 687, 688, 689, 690, 691, 692,693, 694, 695, 696, 697, 698, 699, 700, 701, 702, 703, 704,705, 706, 707, 708, 709, 710, 711, 712, 713, 714, 715, 716,717, 718: n = A,T,C or G

SEQ ID NO: 22924 - DNA, 405 bp, Homo sapiens
tcaggtgtcattaatgaaaattctgaagaaatgccaccggacatagccaacgcacctacgctgttgttattcatttcctgcttttcacagaaaacaattttgttgcatggaagatcgtgaacttcaaagggcagaggggaaactgtcccttggcctctacccctccaaggccccactttttcatcaacactccttggaagcagcagaagtatgaacataatatggtcctgaatgaggctgagtctttgggcgcagaagacccgggttaataaaaataggaagaggaggctggcctttgccccacggccttggctgcagcaccatcacatgcctccacgcctctccatctcctcatgaagatctctctccagatagagaccatttcctccctagaggaatccttgt

SEQ ID NO: 22925 - DNA, 1710 bp, Homo sapiens
  misc_feature 1, 2, 3, 4, 1706, 1707, 1708, 1709, 1710: n = A,T,C or G
nnnnaatgggggtcccccccggggggggccccccttttttttttttttaaattttttttttttttttttttttttttttttttttttttatgctaatttttttgtttttggtttttttttttattttaatgtcaaatgtttatttctatgccatagttgcctcagcacaatttgtaaaagaaaggaatccaaaaaaatgaattttttttagtcaggatattttctctgcagttataagaaagaaaataaacaccatgataccagaatcaccatttctttcacatcatcactctagtaagttgcatctaaatattttccttggttgccactttttttaggatggagaaatatccacaggaaaaaatgtctgaattcattaaaataaccttgggatagtctttgccagactgtatcgagaacatctttgtttgggtatgctatatcgctaattgccatattcttattatttaatataacaggcatactttattatataaaacaaagtgcactaaagatgaacaatgttacaaacaaactgaaatttggtgtatcttaaatcttcgggtgatgattagatagtagctgaagcgtgggtatacaaatttcttgttaatacaaatgcaactcttttctgtgatgaaaatgcacttagtagcctagtactttttgctttagcagatagatagggcatccaatacaactgaaacaacctgataacaaattaattttatttttcaataaaaaggaatgctctggttttttaactggctccttgaggaagccagaagatggcatctgctctttaaacaggcttctcttatctgatttgagacacaaatccaccaagattctttcttacagtggaagtaggcaccacccctcagatcacgaggcccctaggaagaagcctgtggaaatcagcctgtgatgtgtggtggtgggccagcacctagaagacacatggtggttgtgcacataaatcccttcagcggactcagtggaaggatgagaattctgtaagttcatgcacattttattgagtagtaatataaaatgctttttctttttcattgttacaagtgcatgctttgattgccaacatgtcagaagtcaaattacaaaggcaaggctttaggctgtagtgaattacttgggcacttatacaattgttaaaaaatatgaatggacttttgttgttgttgttttcagaatgaaccagttgtaacccgtaactgatatacaaagggaaaaaagtgaaaaaagtacatattttgtggcacatgacagaacagaacaaaataactaaactgttatgacattaacagttgccatgcatttagagtttcacatgtaactacaaacttattataatttcacaaggtttgctaaacatgctaaccatctacatgtgcattgacaagcttatgttaaaaactttaaagaatactctcccctttagattttttcaaagcttttttttgattacaaaatttcaaaggcattaagcattttagagaatataaagtacgccagtatacatacatttccagtatatgtcagaccactaagcgcattacagtcccatacaggccgatacagccattttttttttcttaaaaaacatgcataggcagatttttgttttttttttacagaatatagatgcttcatcacggtacttaatagggtgtctggtccactatacnnnnn

SEQ ID NO: 22926 - DNA, 1001 bp, Homo sapiens; identical to SEQ ID NO: 21314
  misc_feature 681, 682, 683, 684, 685, 686, 687, 688, 689, 690, 691, 692,693, 694, 695, 696, 697, 698, 699, 700, 701, 702, 703, 704,705, 706, 707, 708, 709, 710, 711, 712, 713, 714, 715, 716,717, 718: n = A,T,C or G

SEQ ID NO: 22927 - DNA, 1001 bp, Homo sapiens; identical to SEQ ID NO: 21314
  misc_feature 681, 682, 683, 684, 685, 686, 687, 688, 689, 690, 691, 692,693, 694, 695, 696, 697, 698, 699, 700, 701, 702, 703, 704,705, 706, 707, 708, 709, 710, 711, 712, 713, 714, 715, 716,717, 718: n = A,T,C or G

SEQ ID NO: 22928 - DNA, 619 bp, Homo sapiens; identical to SEQ ID NO: 20381

SEQ ID NO: 22929 - DNA, 508 bp, Homo sapiens; identical to SEQ ID NO: 21293
  misc_feature 502, 503, 504, 505, 506, 507, 508: n = A,T,C or G

SEQ ID NO: 22930 - DNA, 696 bp, Homo sapiens
gcgtccgaatattaattaaaagtatgtgttgttatttccagtaacccaaaaagttccctccctgattcagtttttactccctggatgaagtgtgcaagcctaactaatcattttactttatctctctcataaactaaagggcaggtttgtaaaatacttctaacaagacttcttagtttgatttaataattaattacatcttctaactcagagattcatttgaactctagtgactaacttcatggttaaataattttcttcattattacaaaaaggaacccatcattgtgaaagtttaagttttttgtcataattcatcctggagaatgatttctattccagggtccctctggttttaagaataccacagtcttacaaatgattattaatttagtttcttgttcatttttgaaataggtataattttttgactcttcttatgaaaaattccaaatttcatctacttttgcatttatattggtaaatatggcttgttttaatgtgcagtgcttagggacaaataccatatctaatgtaatgacataatactgtgaaagatgtgtttaaatttagagaatttgaaggaattaagtagcgtttaaaatcagcagttccagtggaggaagataataataggattccatgttatcaggattataattgaaatattgtattagttaactaggcagtagtagt

SEQ ID NO: 22931 - DNA, 941 bp, Homo sapiens
cgtccgaaaaattagccaagcagtagtggcgggtgcctgtaatcccagcaacttgggaggctgaggcaggggaattgcttgagttcaggaggcggaggttgcagtgagccaggattgcaccactgcatctccagcctgggcgacagagcgagaccctgtctcaaaaaaaaaaaaaaagaaaggaaatggattaaagacctaaatataaaagctaaaactaataagacctagtaagacccacagtgggggaaaaataactaagaagcacttagtgaagcctgaagtagttaccgtgaaggatttgttgcttgttttggtttggttctaggttggtgatgaacaccttaggaaacaacaccgggtgctggcagatcttcattacagcaaggccgcaaagctgtttcagctgctgaaagatgctccctgcgaactgcttagagtacagctagagagagtagcatttgctgaatttcagatgaccagtcagaatagcaatgttggaaagttgaaaacactatctggggctcttgatataatggtgagaactgagcacgcattccagcttatccagaaggagcttatagaagaatttggccagcctaagagtggtgacgccgctgcagctgctgatgcttctcctagtctcaatcgagaagaagtgatgaaactcctcagtatatttgagtctcggttgtcatttcttctccttcagtccattaaactgctatcttcaactaaaaagaaaacaaggtaaattaagtggttatttgtaggaatttctttcctagcaccctacctataaaaattttctctaccaacatcataaagaaaaactaggggccaggcacattggctcacacctgcaatcccagcactttgggaggccaaggcaggcagatcacttgagttcaggagttcgagaccagcccggccaacatggc

SEQ ID NO: 22932 - DNA, 224 bp, Homo sapiens
acgcggggggggcagtttgacagagctctgtgcacacacctcatgtgacccaattcaaacctcttaatctgatgactgaattcttcttcttcttctttttcttcttcttcttcttctgtttttaaactttcttccagatgcctgtggtctctctgatgtagcccatgtggaaagcttgcaggaaaagtctcagtgtgctttggaagaatacgttaggagccagt

SEQ ID NO: 22933 - DNA, 910 bp, Homo sapiens; identical to SEQ ID NO: 22341

SEQ ID NO: 22934 - DNA, 3130 bp, Homo sapiens
  misc_feature 1, 67, 73, 3130: n = A,T,C or G
ncatgagcctgtaaggacaaatggcatatttgggcatacctgcttgactctgtaactacttttttanaatcanaattgaaaaggtattaattgtttctggctttttaattttttttttagagacaaagatgaacccagataggaaatacagtttttatgttttctacttactaaaatattagcttcttctaaatattactttatttgtatttcactaaattccaaagcaaaaatcagatatctgagatgaacaattttgaatgggttaaggtaggagtaataagcattgtgttcactcatacataggtgagggaattttatttatagcgagaaatataaaagtattttgacttactcttttttcaaggagtcgctaggaaagggtagaagaactgagaataagacatctagattccatttctggtttatatgtagctcttttgcctaatttatatataattttgtcataagataagtccagtaactgtcctgtcttagataacgtacagaggctgaagtgaccaaagatccattccttattacttttctaattaaaagaagagttagctagatttctagtagtagtattctagatattgataagacattattcctaatgccaactacaaatattcaactactcagaatgtatttaaaaaattgtttggtacagcattaatgttggtgattcctttctcccatcttatttcccttcccttctattctttcccatgtatttcttttgcctaaaagaatattggtatgattctcatttgctactttgagtatataactccatcagactttccagagttcttcagggatggagctcaaagtttacatttttccatatatgtctttttttttcttgacctttttccaccctgtaatttccccttgacttacccactgccctccccaatctgcaacagtgacagtttgctgcctcaaaacagagcattcaaatgaattcgcttagccaataacttctgtgaagttgccttttctaatggtgttattactcagtgatgcacaaatgtggtatttgccctactggtaggcaaacaaaggtctggttaagaatggtaacctgctgttttctttaaaggagagccaaagacttgtgctttactctgttttggttttgggggaagtagtagccattttgatcatgaaaccttttagtatttgtgagttgattgtactgtgtaagtagatttatctaaagttaactgttaaagttagctagccttataaaatgtaaaagtaatgaaaattcatcagtttctctaagccagtgaatgtcgtcttttgtaatattgtgtataagcatttgtgcccaccccagcttctgctatcactgtggtcaagtcatgggtctgagtaaaagaattcttgagtatgtgactggtgagaaataactaactatagtcagtacatgtacagattgttaaaattcaagacaaaatactttcactaaaaaaaaggattcgtctcagtaaagaagtattcagttgctgtcacttacatacaaatggtggtgggtagcagtctcaccatttttctactctctttttgctcgttttaaataattgagtaaaggttttatttgtaaaatctatctgtaaaaagcacctgtaacgatttatatgtcattgaaaggaatggcccagttactttttaggagagattaataacctacctggaaattaactgcagtgtttacttagattttttccccctaataagagtctaagtgtgttaaatttttaactgatgatatggttacagtgttgcaaggtgatctcttcccctgaaaaatctgcctatccttttaagaaaaattagacctacttaactaaagcaaattttactttcatcattagcacctaaacaagcaagcagtctactactgtcatcattttacctgagtgcccattttgctgatccacattcatacctttctaccttggacagctatgatttttatatttatttgttgcttcagctcaggtttatgaaattttcctgctgaaatgacttattgggagttgtaggttgattatagttactattaaacattttctcaatttagcttttctgagccacttcaagaagaaagctgtttttgtcaaaaggtactattaattgtagcaagtaaatcttaagatttgaatttttaagattttatttctgtgttcactaaagatctttccacaagtaatagattataattgataagtaatactagctatagtgttaataaagagtaagactatcaccaccaggaataagtaacaccttttaataataaatctattcctaataggtatgttttcaatactgcactgaacaaagtgggtaaagagccctttgaaatcttattgtaataaagggacttacctcaccactggaatccttgttttcagagcctctggattttcagccaaacactgaatttctcctaaactttatccctgaaacatccctagagaacgaactttattttcacaagaaaataaggcacaataagggggaagaacttaaacctcaacataatatcgtgtccaaaaatgtgtatttagaaaaataaaatcctgtggagtttgttatcctaatgtttattttatactagataaggtgacttgttttcttgtattgaggtcttactgtttcagatttgtttttgtttctgttctaactctaagcagacagagctcacaagtctttggcatccattttaggttgtacactcagagtcatcttataaccttggaaactggtccggtggtcccccaccccagcgaacgctttgaagagtccagacaaaggaatggaaccaagctatggggtgaattaatgggggggcccaattataaattataagtaataatggcgtttttatatccagtgtattggtgtacatctttctcgaggatggggggtccttaataatttggaatatcccataaaatatttcggggtaaggataaggttggtagggtactccctatactaagaggttgagaatgtttacaaggtgggaaagtagagtccggtaaatacacgggggaaaagaaaaatacgggatatgatatactgtggaggggtgtgacattggtgggcagan

SEQ ID NO: 22935 - DNA, 1002 bp, Homo sapiens; identical to SEQ ID NO: 22660
  misc_feature 1, 2, 983, 984, 985, 986, 987, 988, 989, 990, 991, 992, 993,994, 995, 996, 997, 998, 999, 1000, 1001, 1002: n = A,T,C or G

SEQ ID NO: 22936 - DNA, 1162 bp, Homo sapiens; identical to SEQ ID NO: 22644
  misc_feature 1, 2, 3, 4, 1155, 1156, 1157, 1158, 1159, 1160, 1161, 1162: n = A,T,C or G

SEQ ID NO: 22937 - DNA, 3986 bp, Homo sapiens
ccaggcccagatagaggagtggggcagcctgctggactcgcctcatggcctgtccctacttgcccagctccaggaccacctgactgaaatatgcgcctaagtggtaagacaagctgtgtgaattccatcataaacagacatgttacttgtgtgaatgcccatcttctgcagcatgaaagggtgcaccctttgctcccgggctcatccaccatcatgatccatgacttgtgcctcgtcttcccggccccagccaaggctgtcgtttacgtgtcggacattcaggagctgtacatccgtgtggttgacaaggtggagattgggaagacagtgaaggcatacgtccgcgtgctggacttgcacaagaagcccttccttgccaaatacttcccctttatggacctgaagctccgagcagcctccccgatcattacattggtggcccttgatgaagcccttgacaactacaccatcacattcctcatccgcggtgtggtcatcggccagaccagtctaactgcaagtgtgaccaataaagctggacagagaatcaactcagccccacaacagattgaagtctttcccccgttcaggctgatgcccaggaaggtgacactgcttatcggggccacgatgcaggtcacctccgagggcggcccccagcctcagtccaacatccttttctccatcagcaatgagagcgttgcgctggtgagcgctgctgggctggtacagggcctcgccatcgggaacggcactgtgtctgggctcgtgcaggcagtggatgcagagaccggcaaggtggtcatcatctctcaggacctcgtgcaggtggaagtgctgctgctaagggccgtgaggatccgcgcccccatcatgcggatgaggacgggcacccagatgcccatctatgtcaccggcatcaccaaccaccagaaccctttctcctttggcaatgccgtgccaggcctgaccttccactggtctgtcaccaagcgggacgtcctggacctccgagggcggcaccacgaggcgtcgatccgactcccgtcacagtacaactttgccatgaacgtgctcggccgggtaaaaggccggaccgggctgagggtggtggtcaaggctgtggaccccacatcggggcagctgtatggcctggccagagaactctcggatgagatcctagaccaggtgtttgagaagctgcagctgctcaaccctgaaatagaagcagaacaaatattaatgtcgcccaactcatatataaagctgcagacaaacagggatggtgcagcctctctgagctaccgcgtcctggatggacccgaaaaggttccagttgtgcatgttgatgagaaaggctttctagcatcagggtctatgatcgggacatccaccatcgaagtgattgcacaagagccctttggggccaaccaaaccatcattgttgctgtaaaggtatcccctgtttcctacctgagggtttccatgagccctgtcctgcacacccagaacaaggaggccctggtggccgtgcctttgtgaatgaccgtgaccttcactgtccacttccacgacaactctggagatgtcttccatgctcacagttcggtcctcaactttgccactaacagagacgactttgtgcagatcgggaagggccccaccaacaacacctgtgttgtccgcacagtcagcgtgggcctgacactgctccgtgtgtgggacgcagaccacccgggcctcttggacttcatgcccctgcctgtcctacaggccatctccccagagctgtctggggccatggctggtgggggacgtgctctgtctggccactgttctgaccagcctggaaggcctctcaggaacctggagctcctcggccaacagcatcctccacatcgaccccaagacgggtgtggctgtggcccgggccgtgggatccgtgacggtttactatgaggtcgctgggcacctgaggacctacaaggaggtggtggtcagcgtccctcagaggatcatggcccgtcacctccaccccatccagacaagcttccaggaggctacagcctccaaagtgattgttgccgtgggagacagaagctctaacctgagaggcgagtgcacccccacccagagggaagtcatccaggccttgcacccagagaccctcatcagctgccagtcccagttcaagccggccgtctttgatttcccatctcaagatgtgttcaccgtggagccacagtttgacactgctctcggccagtacttctgctcaatcacaatgcacaggctgacggacaagcagcggaagcacctgagcatgaagaagacagctctggtggtcagtgcctccctctccagcagccacttctccacagagcaggtgggggccgaggtgcccttcagcccaggtctcttcgccgaccaggctgaaatccttttgagcaaccactacaccagttccgagatcagggtctttggtgccccggaggttctggagaacttggaggtgaaatccgggtccccggccgtgctggcattcgcaaaggagaagtcttttgggtggcccagcttcatcacatacacggtcggcgtctcggaccccgcggctggcagccaagggcctctgtccactaccctgaccttctccagccccgtgaccaaccaagccattgccatcccagtgacagtggcttttgtggtggatcgccgtgggcccggtccttatggagccagcctcttccagcacttcctggattcctaccaggtcatgttcttcacgctcttcgccctgttggctgggacagcggtcatgatcatagcctaccacactgtctgcacgccccgggatcttgctgtgcctgcagccctcacgcctcgagccagccctggacacagcccccactatttcgctgcctcatcacccacatctcccaatgcattgcctcctgctcgcaaagccagccctccctcagggctgtggagcccagcctatgcctcccactaggccgcgtgaaggttcccggaggatgggtctcagccgagcctcgtgcacccccaagatggaacatccctgctgcattcacactggaacaagcccctccagatgagtgccccggccccaggccagcttcactgccgtctcttcacacagagctgtagtttcggctctgcccattagctcattttatgtaggagttttaaatgtgtgtttttttcctttcaagtcttacaaagctaagactttttggctcattcctttttgcatggttgtctagggtttctggacaatgtgctgttgcatttttattttcctagccttgctaaaatctttcccttctcaagactttgagcagttagaagtgctctttagaagttgtctgtgggtgatgttactgtagtggtctcagggaaaggattgtccagttactttagggggtttttggtggggtttttccccctgtgaaaacttactttgcccctagtctggctgctgctaggacttctgaggagcaatgggacatgagtgtccctgtatctgcgccactgccgcaagggaagcctcaggaaccagcacctggaggccagggctgctgcccaaccatgggccactgtgaacagacttcagtcctttgtttttgtttcataagccgttgagacatctgatggacttggcttatgccctgctgggacattccacttgtgatccctttcactccatcaggacacccagaactgtccttaggaataatgtccttgagatggcagcaggagtcatattttctgtgtgtgtgtttcggaaagccgctgtgtcctgcctcagcacaaagacccagtgtcatttgctcctcctgttcctgtgccactccagaacctcagcagatctgagccaccgcctgccagtgtgagaggcggccactttcatggcagctcatcaggcgcagggccccagacagcttcccagcaggccctagagcccggcc

SEQ ID NO: 22938 - DNA, 608 bp, Homo sapiens
acgcgggcatgatcaaagagcaacatctgagtgtgtcctgagtgaagttctgtaaagataagaagcaggacttgccaccgcattgcaagagaaagtttaccagcatcaattaattaaaatagaaggcagccaatcggcattgggcacaagggaatgatgcttgtattggagcatgatgaagagatgtcagctttgtctcagcaccaacatcactattaacacttgctatctgtcaccaatcagcaatctgttcctgatgtaatcgagagttccaaagcacagctcaattcttccacctctctgagaagagtggtgtgtaggccttctgacagtgggagaaagttgcactctttgggactcagtttcttctcaaaactcattcagaaatcatcacgtgtcactgttagctaggtccaggatgtttgaataagaattgtggttatattatagtaaattgtgtaaaaaatcagttagttatgggtaataggtatggcagttaccatgtgccaagaatcttataaagttttttacatttagtaattcatttaagtctcacagtaaccctacaaggtatattttccttattttaaagaggacaaaactgaggt

SEQ ID NO: 22939 - DNA, 3855 bp, Homo sapiens
  misc_feature 3844, 3845, 3846, 3847, 3848, 3849, 3850, 3851, 3852, 3853,3854, 3855: n = A,T,C or G
cgacccacgcgtccgcgcgccgggagggcgtccggtcagggggctggggacgcgcgtggggatcgctacccggctcggccactgctgggcggacacctgggcgcgccgccgcgggaggagcccggactcgggccgaggctgcccaggcaatgcgttcactcggcgcaaacatggctgcggccctgcgcgccgcgggcgtcctgctccgcgatccgctggcatccagcagctggagggtctgtcagccatggaggtggaagtcaggtgcagctgcagcggccgtcaccacagaaacagcccagcatgcccagggtgcaaaacctcaagttcaaccgcagaagaggaagccgaaaactggaatattaatgctaaacatgggaggccctgaaactcttggagatgttcacgacttccttctgagactcttcttggaccgagacctcatgacacttcctattcagaataagctggcaccattcatcgccaaacgccgaacccccaagattcaagagcagtaccgcaggattggaggcggatcccccatcaagatatggacttccaagcagggagagggcatggtgaagctgctggatgaattgtcccccaacacagcccctcacaaatactatattggatttcggtacgtccatcctttaacagaagaagcaattgaagagatggagagagatggcctagaaagggctattgctttcacacagtatccacagtacagctgctccaccacaggcagcagcttaaatgccatttacagatactataatcaagtgggacggaagcccacgatgaagtggagcactattgacaggtggcccacacatcacctcctcatccagtgctttgcagatcatattctaaaggaactggaccattttccacttgagaagagaagcgaggtggtcattctgttttctgctcactcactgccgatgtctgtggtcaacagaggcgacccatatcctcaggaggtaagcgccactgtccaaaaagtcatggaaaggctggagtactgcaacccctaccgactggtgtggcaatccaaggttggtccgatgccctggttgggtcctcaaacagacgaatctatcaaagggctttgtgagagggggaggaagaatatcctcttggttccgatagcatttaccagtgaccatattgaaacgctgtatgagctggacatcgagtactctcaagttttagccaaggagtgtggagttgaaaacatcagaagagctgagtctcttaatggaaatccattgttctctaaggccctggccgacttggtgcattcacacatccagtcaaacgagctgtgttccaagcagctgaccctgagctgtccgctctgtgtcaatcctgtctgcagggagactaaatccttcttcaccagccagcagctgtgacccccgccggtggaccccgtggcgttaggcaaatgcccaacctccagatacctccgatgtggagagggtgttatttagagatcaaggaaggaagtcatccttccttgatatatatacagcctttgggtacaaattgtgtggtttcttgaggattggactcttgatggatttctatttttatataactatacagtaagcatttgtattttctctctctaggtataagttactagtttggaatgtccatcaggacctttaataaatgagttaaaaatttgtcttatgagacacacctatttaagtacagattttggctttattgcccaaaaccctcctgaaagggtacggagagtcccctctgtgggctggcagtgtgaatgagatctgtttagtctcgtgcatatagttgctgttttttaaatgaacacagttgagtatttgaagtgaatttgaaaaagaaatgttacttaatctttccctaagcccatgggttacagaatgctagggaggcaatttggttacctgcaatggctgcttttgccagcgaggccaccattcattggtcatcttggtatttgtgtgtgaatctcactttcctcaatgtaaaaaggaatcaagtatggatttcagaggtgctcttagattccccatacacccaagggtaataaacgtgtacaagtacagtgttcatgatacgtgccttggtgggagtccgtggtgccacagggaaggggctcccactgcttctggtctccagggacagtgctgctggaaaggctagtgatgagcttcaccctggagctcctcccgggaccttgcaagcctctccatccagcatcttctctatcttagttgaatgccttctttctgaacatttgttttaagaattattttataaagtcaacaatactttgcttgaattctttcttaatttacgattttttattataaaaatgtatagtgatacaatgggacatgtgaagaatacagaaaagtaaccactttaatgcaataactgttatcataatattgtatttcgtggtagtcctttcctgtagatatttttaatgccatttaatgccattgtcaccttggatttatgagtgaaaagtgtttctaaaaatatagaaataatgtcagatcagagtctgatcttctatgtttgtatttaaatggattaaaagatccccggtggttccatgaagaatttgtaaagatcactttctctttcctccaagccctgaaactttgttcttcaaaagagcgtttcttttttttttttttttttaagccagtttataaagtggaagtattaggagattcataaatcttctatattgagaattggctatgttaataaatattacaacatcattaaggttttagctaagtttgattcatgctgtctgttaaatcaaaactgatctaaatcagaattattaaatgtgaggagcttttttaatacaggaaaagaaacatgtcatccacttgagttaatagttttcctacgttgatgacagccctcatgagtagcatccacatttttaaaatttcaaattggtttttctactagtagattgtgtttctagagaaagatacaaggcataggtgattgtttaggattttcctctagcctttgccattacctttttggggatgaggttcacagtagactttgagtgaccgtcccaccgtgaagtgaattctctgagctggtggtgtggtgctggaaggaaggttatttttggagccactctctccccttaaggatatttcccaagggcctgcttcaattctttgatgactttagaggtgaaaaaatatttttatggagatgatgcagaaaactccaattcaggagcccttgcgagtatatctgaagcacttatttgctaaggaaacctgaattcgcactagcactactgcgctgtctggaactctgtccctgatctgagtgggactagactggcttcctcgctgcctggccaaccggcacttcttgacattcactgctcatggcatttgttgctgtaagaagtgttgcctttgattgttactaaccacggatgggtaacggtcatacattaggctagtgtttggtaggacaaaatctttttagagctttgagaattgtcatcctgttggtcaactttgaaatacaaatgtttgccctggtaattagcaatgaactgctggcagtttcttcagctgtgtatatacggatctggcttttaattgatgaatcaacttctacagaaacttttgcagggacagtgttgatgaggcagtttagcttgccagggtgatgataaagcccaggtccctgcatgtatagtgctcttctaaagaatatgcattcttgaactacttaactttttaaaaatcacaataaatttttgcactcaaaatttgcttcgtatcannnnnnnnnnnn

SEQ ID NO: 22940 - DNA, 1754 bp, Homo sapiens
  misc_feature 1, 2, 3, 10, 1752, 1753, 1754: n = A,T,C or G
nnnacgcgtncgggcacaaggatctgatgaagatgagctgcagaattctgacgatgatgagaaaatgcagaacacagatgatgaggagaggcctcagctttccgagggtgagagacaacagctatctgaggaggaaaaggctaattctgatgatgaacggccggtagcttctgataatgatgatgagaaacagaattctgatgatgaagaacaaccacagctgtctgatgaagagaaaatgcaaaattctgatgatgaaaggccacaggcctcagatgaagaacacaggcattcagatgatgaagaggaacaggatcataaatcagaatctgcaagaggcagtgatagtgaagatgaagttttacgaatgaaacgcaagaatgcgattgcatctgattcagaagcggatagtgacactgaggtgccaaaagataatagtggaaccatggatttatttggaggtgcagatgatatctcttcagggagtgatggagaagacaaaccacctactccaggacagcctgttgatgaaaatggattgcctcaggatcaacaggaagaggagccaattcctgagaccagaatagaagtagaaatacccaaagtaaacactgatttaggaaacgacttatattttgttaaactgcccaactttctcagtgtagagcccagaccttttgatcctcagtattatgaagatgaatttgaagatgaagaaatgctggatgaagaaggtagaaccaggttaaaattaaaggtagaaaatactataagatggaggatacgccgagatgaagaaggaaatgaaattaaagaaagcaatgctcggatagtcaagtggtcagatggaagcatgtccctgcatttaggcaatgaagtgtttgatgtgtacaaagccccactgcagggcgaccacaatcatctttttataagacaaggtactggtctacagggacaagcagtctttaaaacgaaactcaccttcagacctcactctacggacagtgccacacatagaaagatgactctgtcacttgcagataggtgttcaaagacacagaagattagaatcttgccaatggctggtcgtgatcctgaatgccaacgcacagaaatgattaagaaagaagaagaacgtttgagggcttccatacgtagggaatctcagcagcgccgaatgagagagaaacagcaccagcgggggctgagcgccagttacctggaacctgatcgatacgatgaggaggaggaaggcgaggagtccatcagcttggctgccattaaaaaccgatataaagggggcattcgagaggaacgagccagaatctattcatcagacagtgatgagggatcagaagaagataaagctcaaagattactcaaagcaaagaaacttaccagtgatgaggaaggtgaaccttccggaaagagaaaagcagaagatgatgataaagcaaataaaaagcataagaagtatgtgaccacaaacaaacaaaacaaacaaaaactagacgcgcagcatggcagagaagtataagaccaccggtgggccgggcccatagaatgccagtgcaacgtgtcccacgaccccgagatcaggtgggtccacaaaaaacccgcgaccgcggtacacacgtgacgagtcaaggcaacaaacagccggaaaagccacggtggagagaacaacgtatcagacatcacagaaccgagacacaataggaaaaaagaaggagataacggacacaccaacannn

SEQ ID NO: 22941 - DNA, 670 bp, Homo sapiens; identical to SEQ ID NO: 21478
  misc_feature 623, 625, 670: n = A,T,C or G

SEQ ID NO: 22942 - DNA, 492 bp, Homo sapiens; identical to SEQ ID NO: 20509
  misc_feature 488, 489, 490, 491, 492: n = A,T,C or G

SEQ ID NO: 22943 - DNA, 3432 bp, Homo sapiens; identical to SEQ ID NO: 21750
  misc_feature 1, 4, 3412, 3413, 3414, 3415, 3416, 3417, 3418, 3419, 3420,3421, 3422, 3423, 3424, 3425, 3426, 3427, 3428, 3429, 3430,3431, 3432: n = A,T,C or G

SEQ ID NO: 22944 - DNA, 1471 bp, Homo sapiens
  misc_feature 1, 2, 3, 4, 1465, 1466, 1467, 1468, 1469, 1471: n = A,T,C or G
nnnngaaccacagacctctgctggcatctgcgattgcatttttcctgttttaacaacggctgtgctagacgaagtggtgaagcccaaagacttatttttgagctcgctgtaagactgagaaatcacgtagtccttcctgaaaccactaagaggaaaaatgtctgtgacactgcatacagatgtaggtgatattaaaattgcagtgcttctgtgagaggacaccctgaatacatgccagtaccgctttgagcacctggcgacacaaatgaagtggcggctccaggagggacctggtgaggccgtctaccagattggggtagaggacaatgggctgctggtggagctggctgacgaggaaatgctagctttgctcaagaccctgcaccggatggcagataaggatggggcagacataaccgtccttcgagagcgagaagcggattatgatagcgccacatccccctcggggagcagggcggggcctgagcactaggcggcggcggctggcgtggggctgcttagatgcgccacggtttcggtagcgacggtagctctagccgggcctgagctgtgctagcacctcccccaggagaccgttgcagtcggccagcccccttctccacggtaaccatgtgcgaccgaaaggccgtgatcaaaaatgcggacatgtcggaagagatgcaacaggactcggtggagtgcgctactcaggcgctggagaaatacaacatagagaaggacattgcggctcatatcaagaaggaatttgacaagaagtacaatcccacctggcattgcatcgtggggaggaacttcggtagttatgtgacacatgaaaccaaacacttcatctacttctacctgggccaagtggccattcttctgttcaaatctggttaaaagcatggactgtgccacacacccagtgatccatccaaaaacaaggactgcagcctaaattccaaataccagagactgaaattttcagccttgctaagggaacatctcgatgtttgaacctttgttgtgttttgtacagggcattctctgtactagtttgtcgtggttataaaacaattagcagaatagcctacatttgtatttattttctattccatacttctgcccacgttgttttctctcaaaatccattcctttaaaaaataaatctgatgcagatgtgaaaaaaaaaaaacaaaaaaaaaccactgtgtggggccgggccgagaaatctaaacccatcgctgcgggcgcggcccatgttacgaaccgcccacgtcgcaaagaacccggccgaacccgggcgtctctccaaaaaagccgggcgacgagggcgtgaaccacgggggcgggacgggctaagcagcgtacccgccgagcggagcgacgcacacaccagagcaaagagaacaacaccgcagccgaggaacaacacgcgagaaccgtccacactagctcccagagnnnnncn

SEQ ID NO: 22945 - DNA, 830 bp, Homo sapiens; identical to SEQ ID NO: 20532

SEQ ID NO: 22946 - DNA, 965 bp, Homo sapiens; identical to SEQ ID NO: 20600
  misc_feature 964, 965: n = A,T,C or G

SEQ ID NO: 22947 - DNA, 440 bp, Homo sapiens; identical to SEQ ID NO: 21743

SEQ ID NO: 22948 - DNA, 3453 bp, Homo sapiens; identical to SEQ ID NO: 21862

SEQ ID NO: 22949 - DNA, 3918 bp, Homo sapiens
  misc_feature 3915, 3916, 3917, 3918: n = A,T,C or G
ccgcccgggcaggtacgctgtggagtctcctccagatcgcagctgaaggatctgttgagcgcttcaggaaaggcggacaggcgacactaacaggtgaagatctcgggagaccatgactaagaaaagaattgctgtgattgggggaggagtgagcgggctctcttccatcaagtgctgcgtagaagaaggcttggaacctgtctgctttgaaaggactgatgacatcggagggctctggaggttccaggaaaatcctgaagaaggaagggccagtatttacaaatcagtgatcatcaatacttctaaagagatgatgtgcttcagtgactatccaatcccagatcattatcccaacttcatgcataatgcccaggtcctggagtatttcaggatgtatgccaaagaatttgaccttctaaagtatattcgatttaagaccactgtgtgcagtgtgaagaagcagcctgattttgccacttcaggccaatgggaagtggtcactgaatctgaagggaaaaaggagatgaatgtctttgatggagtcatggtttgcactggccatcacaccaatgctcatctacctctggaaagcttccctggaattgagaagttcaaagggcagtacttccacagtcgagactataagaacccagagggattcactggaaagagagtcattataattggcattgggaattctggaggggatctggctgtagagattagccaaacagccaagcaggttttcctcagcaccaggagaggggcttggatcctgaatcgtgtaggggactacggatatcctgctgatgtgttgttctcttctcgacttacacattttatatggaagatctgtggccaatcattagcaaacaaatatttggaaaaaaagataaaccaaaggtttgaccatgaaatgtttggcctgaagcctaaacacagagctctgagtcagcatccaaccttaaatgatgacctgccaaatcgtatcatttctggcttggtgaaagtgaaaggaaatgtgaaggaattcacggagacagctgccatatttgaggatggctccagggaggatgacattgatgctgttatctttgccacaggctatagctttgactttccatttctggaagattccgtcaaagtggtcaaaaacaagatatccctgtataaaaaggtcttccctcctaacctggaaaggccaactcttgcaatcataggcttgattcagcccttaggagccattatgcccatttcagagctccaaggacgctgggccactcaggtatttaaaggtctaaagacattgccctcacagagtgaaatgatggcagaaatatctaaagctcaagaggaaattgacaaaaggtatgtggagagccaacgccataccattcagggagactacatagataccatggaagagcttgctgatttggtgggggtcaggcccaatctgctgtctctggccttcactgaccccaagctggcattacacttattactgggaccctgcactccaatccactatcgtgtacagggccctggaaagtgggatggggctcgaaaagctatcctcaccacagatgatcgcatcaggaagcctctgatgacaagagtagttgaaaggagtagttctatgacttcaacaatgacaataggcaagtttatgctagctcttgccttctttgctataattatagcttacttctagttgtcctattgtcactgccctgtttttcattgggaagcttatctacagatgccttcagaatctgacgagattgactctcagtttcatattgcccagaaatctactttaatgtctctttcgaaagcattaattcactttcctttttcctacaatgaaacctgttttccatttgtattaactcatctcccttccactcatgatccgtcactcttccttgtggtaatccctagactgggagctcaggtactcttttagtcatctttgtatgtctttagcagagttcttgacatgtggtaggtgcttaataaatgtttgttgtttatcaaattttatggtagggagagtaagtcagcatcggtataaaatcgcttactccacgtaactcttcttctgatagggtttgattttctattagaagctcaattttagttttttttcatattataactaaatatgtttcctgagagataagagaaataatgttcctacaatagttgtatgtatctaagataagacatatagatgcttaagacattttgtttcacttgctattcactagtgtacttgaaacatggtcatttttagcccttttccttaggaaccatgtctttattttctcaataaagaaattactttcaactttctaggctcacagtcattcagatcatctaccatctgccaatgagatcaacttggttgagaattttgggattttaaattagctgtcctacctttttaaatctcttttaaatccttcccatattaggatccaacaaaactttatcttaggaaatatgataagtagcttccaattgttgtagtgtggtctacaaatgtgatttgattcatcttcccccactctaattttctccccttttctcctcccttacatggagtctaagtaagtatttgaacaagtcatttatgtattaaattagaactgatattaactaaatgtaggaacattctgcttataccagtttttctcatgtcgtaaagtgtagttctgaaaaacagagcaaatgaaatgcaaagcaggtacttgggtttacatcccagtgccactgatgattctgttttctcatctgtggaagtttcactgttcttgtttcatggagaaattaactaagtgtcagctgtcaggcacactgaactcaggtgatgttcattaatagctgttgtacaatatgtttgtatttggattgctgcttattacttaacaacaggataaacctgaacaatggaaaagaccaacattagagagtattatctttccaaatacacacacctgtaagagaactggaaatgtgagaactacaacttcttcttatttaaacatttgaacaattgccggccctttcaccgaatttacctgtggaatgccttttgagagttagagaactgagaactggtattacttttcaggtcttttgctttccctaatccttgtgatactggagatttatcatctattaaaatggacctagtatttttaaatctgcatatcaaaagcaaattgaatgtctcttgcttccttttaatttcttttaacatataaatttctcttttagcatgtaaatttgttgaattaacagccctttgataatataattcctagttatcagcaataagtacaccagtttcttttttaaattaggagtatgtaattctaaattaattgattctctcattgtacatattatatgcaaggttacaaaaaaaaatcaatggttaatgattttttagctcaaccaagctaaaagatgtgaacaagaaattgaactcaaaacaacttaagatacaaagctcttgttactgataatgtctaataatattcatcaatttaccatatcttgttcttatattaaaatgttctatcattttcctaattattttaaagtcgattacaaaaatatatatatattcttgtagtgccagaaaattgaatacattaataaatggggtagaatagatgaatctcccatgaagaagaattccaaataatttatgaactctgccctcaaggatatggagcagaacttcctacttctctagtgtgagctgaatagtgacttccttccaaaaattacatatggaaagggggaaaataactttgtagtggagaaatctgataaacactatctcggctaggttatcaagattaacactaacagtaataagtcacactgatagtatgtacnnnn

SEQ ID NO: 22950 - DNA, 1392 bp, Homo sapiens
  misc_feature 1, 2, 3, 1391, 1392: n = A,T,C or G
nnncgaccacgcgtccgtaaggccccggccaggacgggattggcgtgctgggcgtgcgcggctgcggtacggcgtgttggtcccagcggttcagctgaggtagggacgtgccgtaggccggaatgttaccggctgttggatctgtggatgaggaagaggatcctgcggaggaggattgtcctgaattggttcccattgagacgacgcaaagcgaggaggaggaaaagtctggcctcggcgccaagatcccagtcacaattatcaccgggtatttaggtgctgggaagacaacacttctgaactatattttgacagagcaacatagtaaaagagtagcggtcattttaaatgaatctggggaaggaagtgcgctggagaaatccttagctgtcagccaaggtggagagctctatgaagagtggctggaacttagaaacggttgcctctgctgttcagtgaagtgaggaatgtgtttactgtgtacatggtttactagaaatgtttattgattatatttccagctttaattttcttgagtaatttaactgaatttacacagtttgcttcattgtattttcaaacaaatagaaaataaacttattaggaagcattttcttaaagtgtttcttgctgtcttttctatctgctctaatgttttggtccttttattgagtttttattgcttttgatgtcagggcttatttaatctctagtgcatgaaagtctcatatgtaaaaaatgattattctgaatttaatctgtcattggtcatacttctaagtgttcaaccttataaaaaataaatgactatcaaaaaaagaaaaaccttacattatgttctagtagttaagtttccaaggacagtgatcactagtctaccatagaccctagaagagttacccaacacatagtagcactcaaatattgttgaatgaattatgaaaatgactacttgtattgttaatttgtgtattctagtgaattaaatctcttcggcatcatttactcccttaagtatttgactttgtgtccactgttttggcagggataaaattataacagactttcttgaacaaacaaatgtatctattacggttttccttccacttttggttagatagaaaaaggattacaacctgcttctaggtacactcgactatttgtgtcactatcggtgtcctttggctatttttaactactatgttaaatcattatcatcttcgtcgtcggttacaattctaggcttaagatactggcgcaaagtcccgtttactacagttttgttcacacaaaaaaaatgtcgggcgccaattatacttggtcgcataaagcgtataatggtggtggtgaaaagggcgctacgtgttcagtctctcgccgaataagatgann

SEQ ID NO: 22951 - DNA, 171 bp, Homo sapiens
  misc_feature 156, 157, 158, 159, 160, 161, 162, 163, 164, 165, 166, 167,168, 169, 170, 171: n = A,T,C or G
aagaaaaagtatccctattggcctcaccaaccaattgagaatttataaaattgagtccaggaggaagctctggcccttgtattacacattctggacattaaaaataataattatccagtagtgtttcggtcaacagaaaaaaaaagtacatgcccnnnnnnnnnnnnnnnn

SEQ ID NO: 22952 - DNA, 3189 bp, Homo sapiens
  misc_feature 3188, 3189: n = A,T,C or G
acgcggggaccgactgtgtggaagcaccaggcatcagagatagagtcttccctggcattgcaggagagaatctgaagggatgatggatgcatcaaaagagctgcaagttctccacattgacttcttgaatcaggacaacgccgtttctcaccacacatgggagttccaaacgagcagtcctgtgttccggcgaggacaggtgtttcacctgcggctggtgctgaaccagcccctacaatcctaccaccaactgaaactggaattcagcacagggccgaatcctagcatcgccaaacacaccctggtggtgctcgacccgaggacgccctcagaccactacaactggcaggcaacccttcaaaatgagtctggcaaagaggtcacagtggctgtcaccagttcccccaatgccatcctgggcaagtaccaactaaacgtgaaaactggaaaccacatccttaagtctgaagaaaacatcctataccttctcttcaacccatggtgtaaagaggacatggttttcatgcctgatgaggacgagcgcaaagagtacatcctcaatgacacgggctgccattacgtgggggctgccagaagtatcaaatgcaaaccctggaactttggtcagtttgagaaaaatgtcctggactgctgcatttccctgctgactgagagctccctcaagcccacagataggagggaccccgtgctggtgtgcagggccatgtgtgctatgatgagctttgagaaaggccagggcgtgctcattgggaattggactggggactacgaaggtggcacagccccatacaagtggacaggcagtgccccgatcctgcagcagtactacaacacgaagcaggctgtgtgctttggccagtgctgggtgtttgctgggatcctgactacagtgctgagagcgttgggcatcccagcacgcagtgtgacaggcttcgattcagctcacgacacagaaaggaacctcacggtggacacctatgtgaatgagaatggcgagaaaatcaccagtatgacccacgactctgtctggaatttccatgtgtggacggatgcctggatgaagcgaccggatctgcccaagggctacgacggctggcaggctgtggacgcaacgccgcaggagcgaagccagggtgtcttctgctgtgggccatcaccactgaccgccatccgcaaaggtgacatctttattgtctatgacaccagattcgtcttctcagaagtgaatggtgacaggctcatctggttggtgaagatggtgaatgggcaggaggagttacacgtaatttcaatggagaccacaagcatcgggaaaaacatcagcaccaaggcagtgggccaagacaggcggagagatatcacctatgagtacaagtatccagaaggctcctctgaggagaggcaggtcatggatcatgccttcctccttctcagttctgagagggagcacagacgacctgtaaaagagaactttcttcacatgtcggtacaatcagatgatgtgctgctgggaaactctgttaatttcaccgtgattcttaaaaggaagaccgctgccctacagaatgtcaacatcttgggctcctttgaactacagttgtacactggcaagaagatggcaaaactgtgtgacctcaataagacctcgcagatccaaggtcaagtatcagaagtgactctgaccttggactccaagacctacatcaacagcctggctatattagatgatgagccagttatcagaggtttcatcattgcggaaattgtggagtctaaggaaatcatggcctctgaagtattcacgtctttccagtaccctgagttctctatagagttgcctaacacaggcagaattggccagctacttgtctgcaattgtatcttcaagaataccctggccatccctttgactgacgtcaagttctctttggaaagcctgggcatctcctcactacagacctctgaccatgggacggtgcagcctggtgagaccatccaatcccaaataaaatgcaccccaataaaaactggacccaagaaatttatcgtcaagttaagttccaaacaagtgaaagagattaatgctcagaagattgttctcatcaccaagtagccttgtctgatgctgtggagccttagttgagatttcagcatttcctaccttgtgcttagctttcagattatggatgattaaatttgatgacttatatgagggcagattcaagagccagcaggtcaaaaaggccaacacaaccataagcagccagacccacaaggccaggtcctgtgctatcacagggtcacctcttttacagttagaaacaccagccgaggccacagaatcccatccctttcctgagtcatggcctcaaaaatcagggccaccattgtctcaattcaaatccatagatttcgaagccacagagtctctccctggagcagcagactatgggcagcccagtgctgccacctgctgacgacccttgagaagctgccatatcttcaggccatgggttcaccagccctgaaggcacctgtcaactggagtgctctctcagcactgggatgggcctgatagaagtgcattctcctcctattgcctccattctcctctctctatccctgaaatccaggaagtccctctcctggtgctccaagcagtttgaagcccaatctgcaaggacatttctcaagggccatgtggttttgcagacaaccctgtcctcaggcctgaactcaccatagagacccatgtcagcaaacggtgaccagcaaatcctcttcccttattctaaagctgccccttgggagactccagggagaaggcattgcttcctccctggtgtgaactctttctttggtattccatccactatcctggcaactcaaggctgcttctgttaactgaagcctgctccttcttgttctgccctccagagatttgctcaaatgatcaataagctttaaattaaactctactttcaggaaaaaaaaaaacaaaccaaaagccacaccacaagaagagaaaacatgatgcggcgcgcccgccagaaaaaaaaacacggggggggggcgcccgaaataaaaacgcggggggcgccaaatgggaagacgggggtccccacaacgagcggggggggggcaaaaacgggggggcggggacacann

SEQ ID NO: 22953 - DNA, 2587 bp, Homo sapiens
  misc_feature 1, 2, 2587: n = A,T,C or G
nnatgtgcattggcccgcacttgggatcccctggtgacggtatttccgagtggtcccaatccccttaggatggttcctgtggtaacgaacaaatttggatttctgctgccattacacgaactcaagtcatatataaacctgagttagcatgtctagtcacatttttctcctggtcatgatgtctctcttctgtggttcctcttctttggcaagtggcttggcagcaaatatacccactagggacctctctgccttctcttagtggcaagttccccatcaacaaccttgagaatttgggcctccctttgctaactacttgcaagagtatgactcgcctgtaaccagcaaatttttactcttagctttcaattcaaattagtgtgtctgaggtcaccagaccaaacagcaactcagacttgtgctgtcacttctggaaatagaagtctgcattcaaagagcacggcaatggaaaatacttttggattctccataggggggccttggaaaccacagacacacttgcccatgtctttatgatgaatttgatgactgcccaacctctgattctttaacaggggcagggaaactgaatattccagacctggctccctaaccatgcacatagattaaaccactgggaagttccaagaatgtatgtgatgttttttcgagtctgcagagtattgatctgctcagaaaagcaccatgccgccagtctaatgctgtcaatgggctgctgggcctgagagggaaaccaccctactggtcccctgtcatacatgttaacattcctgtgctccaattgtcctgtcccactaccacctgctctgcatctgccctctaggcatggccactctggaaatgcattcaaaattaaagttgggccctagtcagggttactttgtatttttatggaatatataaaatatacttgtcgattggtacatttgtgcaaagacagatatgacttccaaacaagacagacattcattatagttgtcttacttcacaataagctactaaaaacagtcttctggaataagattgtattagtgctcactaaacatgcatttcatttaaacaaggcaaaacacttaatttggtctgcattacccaatatgttatatacagccgtctttttattttatcacaataggcaacaagatgggtctggttttggaatatgttaccatttgtgtttaatttccaaagacacgcatattagctcaactagtgtaaacctgtgaaaaaatagctgagccatctttttcctctcctctgttaatttatcttgaaatgttcacagcttagaaactacagcctgctggggaagagaggggagtgggcccccatggggaaatgtcccagctcgctggaatagcctcaccccagagggtaacttgttcttggggaatccagcatccggtgccatccatcacccctacggcacgtgtgacaacagacccaggtggggagttttgtctttcaaacaaaagccccttgaagcttgcaatagaatcacaggactggatgggtttcccttcttttgccccaacccccgagtcttacgttttagaacagagacattagaataaaaaaaaataatagtaacgattaaaaatcatcaaacaatgaacaccacgaagtctgtccatgctctccacaagcacactggggctctgggcattcccacgaagcatccacgacaaaagaagctgaaggcgtcacggaggaaggcgcatcagaccgcacaggggacggcatcaccattgatattgtttggcaaaaaaaaaaaaaattgttaaaaagaagaatcaaaagggaacacaagcagctctacaattcgattggtgggcgcagggctcagaactggccggcactgctcgggtcgcactgcaggaggcgcacaatggacgggtcgcttttggctcctcggatgaactcttccagggagagttttccgtctctattggtgtccatctggcggaagatcttttctgttcttttctctggggttgactcatcttcaggcattttcattacagaggaaaccatcttatagattgcctgcacgatctctagcatctctgccttgctgatatagccatttccgtccaggtcgtacatgctgaaggcccatttcagcttctgctccagcttccccctcgaagttacactcaaggcgatgatgaattctctaaagtctattgtcccatctccatttgcatcgaaggtgcggaagacatgctctgcaaatttggaagcatccccataagggaaaaagttcccatatattttcttaaactcttccattgacaaatgtccactggggcagtctctcaagaagcctttataccattcctggatctcatgctctgtaaagtctgtgctttccagcaagtcctgcatgacctccgggcgcagcttgctgttctgtttccccatcctggcggcaagaattcagctcactcagaagaagtgcaagatttaacagtccatgctctgcagcccctggaaacagcagtagcagcagcagcaaggtccagcatccaccagattctcacaagccattacggacgcgtggtcn

SEQ ID NO: 22954 - DNA, 1245 bp, Homo sapiens
  misc_feature 1, 2, 3, 4, 5, 6, 7, 8, 9, 10, 11, 12, 13, 14, 15, 16, 17,18, 19, 20, 21, 22, 23, 24, 25, 26, 27, 28, 1245: n = A,T,C or G
nnnnnnnnnnnnnnnnnnnnnnnnnnnntgcgacagagtctccctctatcatccaggctggagtgcagtggcacgatctcggctcactgcaacctacgccttctgggaaaaagcgattctcctgcctcagcctcccgattagctgggattacaggcacgtgccaccatgcctggctaatttttttatttttaatagagacagggtttcactgtgttagccaggatggtctcaatctcctgacctcatgatccgcccgcctcggcctcccaaagtgctgggattacaggcgtgagccaccgtgcccggccctcttgtgtagttttcattgtgtctagtgcaatgccgtaaaccttaacaccatgagacccatatgaagtgccaacagtgatgatggaagcgctttcaaagagagaagtcatagacattataagaataaagtgacttgcttgatatgtacagtagataggtacagctgtagctgctggccatttcagacagatgcttcatcttgtaaacagcaacataaatgtatggtaccaataaatacagtacagtactgtaaatgtgttttctcttccttatgattttcttgatacatgttcttttctctagtttactttattgttaagaatatactatataatacacatacaaaatatgtgttattgcctgtttatgttgtgggtagggcttctggtcaacagtgggctacattatcgaacggtcaactgtatccttaactttttttcctcaaatacaactttcaacaattctggctttagctaaaaaactttagctaaactaaagaacttcagccattactctttcagctcctttatgttcacagaccaggaggtagacctcagaagtatatttagtgttcctcctaatattccttccagccccctttcctacagctttgcctatttcaaacccctatcactcaataactcttctggtatacactttttaaactcttgaccacaacgattttagcactttgttctcccaacctctctcttgatcctgaccaacacatcaccttcgatgaattcagctcctgctttactgggaaccctgaggtcatccaatacaaacactcaaaattcccttctcccatcttaaaatctccttatacttgacgtctcttcctgttcaacaagtttctattttggacaagtgctttattaattatctcctatctggcatgtgcctttattctctcggacgcgtgagcggacgcn

SEQ ID NO: 22955 - DNA, 412 bp, Homo sapiens
  misc_feature 1, 2, 3, 4, 407, 408, 409, 410, 411, 412: n = A,T,C or G
nnnnagaaaaccatcgccaactcctgcgatcagcttgtggcttacaaaccttgtttaaaagctgcttacatggacttctgtcctttaaaagcttccccttggctgtggccctctgtgtatgcctgggatccttccaagcactcatagcccagataggaatcctctgctcctcccaaataaattcatctgttctggagagcctatctttctgaggttgacacttatcttgcagaatggggttcccacccatctttgatcatgaaggaaatctcagatttagaactatgttgcccaggctgctcttgaactcctggggtcaagcagtctacctcggcctcccagaatgctgggattacaggcgtgagccaccattcccagcccacatttcttaaaaatggtatttcagnnnnnn

SEQ ID NO: 22956 - DNA, 3540 bp, Homo sapiens
tcctgggggggttatttttttgggtgtgtgtgtgtgtgtattgtgccttagaaaggttgcagatttcatcttcacctaccaagaggcggccgcctccttggacaagccgctcatggaccattagacttgagaagacgacccacgtggtgactgcaaagccctgggtacttgccttcatgttctggtttggttttccctttttctgctgctcttggcagcagcctggtcatcatctgcttgtgggagtgggaaatgggtattttagacccaacacaggttctaaatttaaaacaaataataattggaacaaataaaggttcttgtacccagagtgattctacatgggaaaaacaaaccagcttttttcagagagtgaccgaataggaagaagggattcagaaatatgatgtagtagaacatgccctgcaggaagaaaatgttttctctcctgcgtatgttaagaggaaatcagtttaaaatgcctgctaatcaaatgtcgactcagctaaccatatgtccaggttgctgcagagtttctttcaaatctgagtgttgcctgctgaactcggaggggagtttggagaaattttagacagcagctctgtgttctttttttgccgcagccaataagataatagcagaattagccaatcctaaaaccttctaaagacgatttttgagcatcccactgggattatttaatttttctttttgacgtgtgtttttagtttagaagtgctgtattccacaaggtttaagtcagtgaggttggaagataccctatcttttttattcaaaaagcacaatcaatcttttgtttgaaaatctatataaagtacaacttgcttttagcatgattattttcctaaataaaaagacaaagaatttacttactttatgttaattacgggcatgaagcaaaaggttttctttaaaaaaaaaaaaaagtgcagtgatgtagggctgtggttagttaaccgtactgagttatccatctagcatctgtggcttgctggaagggtagtattaactatttaacatgtaatggtgtacttcactcttacctagcacgctgtcttctcattgctttgggggagggagggtctctctgctggcactgtctaacttgcttacctgctgactttgcagtttgcttgtgctatgacatttattgtaggtgctatttagggtaggcttaaagtgctgggtggtgatttgagttcaaacaataaaaaattgtattttttcaatattgtataaacaatagtgttctaattaccttaaaaaaaaaataatgaccagttaagaattgcttttgatcttgtcaaaaaactgaatagaccccagtttcgggaaggtgtgtgagcagtgccatgactctgccccttacctaatcccacatctctctaatgataagacattggctcgcctctgaccagagccccagcaccagagagcggaagatgcagaattgtcaaatgacctgctgggggaggttgtaggagtttagcagatttgagtgtggctgcagagagagagagagtgtgtgtatgtgtgcacatgtgtgagagtgtgagcgagagtgtgtgtgtgtccatctaagtgtgtgtgatgaaggtgggataaggctcctctgttagtgctggaagctcctgtaattgccgcatggatcccactgtgccctcttgttctgtgcaagtctgtcctgtctgggcactaaccttggtcccatgcatgtttatgttctgggtggggctttgcctctccactgggaaactgacttttgctgggttgaacagagtcccttatgctttttgtcctctccctgcgcctgggagaggtgggagtaggagcccaaacacacaggtacagaaagatctggaagaaggcctggcagtgaatccaaggactctgggcccccaacaatagatggtagcgtaagtctggagcagcggtgttttcaccaccaaatgcctttccaggctgcccttccaacactcaggagagcatccagatccctgggcagaggctctacattcttggctttagaggtggtggcagcggcagcaggtcagagccacttctggcggtttccctcccctttttagtgcccatagtttttggatcctcccttgagttttaccagcacaagccattctttgcccctgttcacataactgagctcaagctcttgccaaacaccaacaagcaagatggttgcaacctggcaacattgaatccaccacccttgggctccctctggaagccccagcaccggggggcttttgggcacagggtcagtggtagccatcttagacactgacatttggctttgtcgtcaatttcatcaccctccttgaggttactgtgcagtttcaaccagcattttatcctagtgaggtcattatcaggagttgccatatcatctctccagtacctaacatttctcatccacttcaaaagctgttctgactgccagctggctgatctaagctcctgaggaatgtctcctctcaaaggaatttttccctccaaaggccccctgaagtcctagttggcattggcctggcacatgctttatgttaggcctcccgttgggatggctgagaatcatgaaagacagatcctccgctagcctctgtgggtcaagtttctggacaccaagtctctgggaactagtgtttgattttaaatggcatgtggcccttccttgtttcagtgacttagaaaagtaaaagccatttaaaaaagttagcaagattttttatcgacttcccaactgggcttccagccttgttgaatgaaatcatctatctctgattgggcgcaacgaactgcatttctttggacttctgaatccatgtttgtgctttctctggcccgtgaacacctcggcgattctgttagggatgggatgagtgggaggaagccctttgagaagggggagccggccctgtcatgcgcaggttttccactcatctgaggaagagccagggctctgaatttagcctaacactcatcttggctgtgggcttgggaagaaatggccattatttacagattgtatttggtacatattgtgtgatacttgaaaagataaaagggactgccagcccctaactgaaatctgaagctttttatcgcttatttttcctcgccctgtctcctcccttccacctttctccttgcattgtgatgatctagtaggcacgtctgtcaacaggacacatgcctcctctgactataacctcttaatagttgtgtataatgaaaactgtaaagaggttatttacagattgtatttggtacatattgtgtgatacttgaaaagataaaagggactgccagcccctaactgaaatctgaagctttttatcgcttatttttcctcgccctgtctcctcccttccacctttctccttgcattgtgatgatctagtaggcacgtctgtcaacaggacacatgcctcctctgactataacctcttaatagttgtgtataatgaaaactgtaaacttttttaaataaacgtgtatata

SEQ ID NO: 22957 - DNA, 498 bp, Homo sapiens; identical to SEQ ID NO: 21110

SEQ ID NO: 22958 - DNA, 568 bp, Homo sapiens
  misc_feature 560, 561, 562, 563, 564, 565, 566, 567, 568: n = A,T,C or G
acgcgggaaagtgcttaattagtgtccatagctaaggaaagagagaagaagccagcaagtgcatgcagggaatgccaatctatggtccgtagctgaagcagctggacaacaggtgacaagaaatagtgagggaagccagatgaagtgactgagttgtttactaatgatctccatttgtcttttgggaagatacagggtcatatttcttatctactcaaataaaatgttatttaacaccagaagcaatagtatctgtggtgggcagaacaataccccactaaagatgtctacgtcctgggccaggcgcagtggctcacgcctgtaatcccagcactttgggaggccaaggtgggcagatcacgaggtcaggagttcgagaccagcctgatcaacatggtgaaaccccgtctctactaaaaatacaaaaattagctaggcatggtggcgtgcgtctataatcccagctactcaggaggctgaggcaggagaatcacttgaacccgggaggcagacgttgcagtgagccaagattgtgccactgcactccagcctgggcaaannnnnnnnn

SEQ ID NO: 22959 - DNA, 2924 bp, Homo sapiens
  misc_feature 1, 57, 2923, 2924: n = A,T,C or G
ncttaccattaagaagagttaatggaaggtgatactctgattctttggcattggaantacattcaatccgcggtatcctcggattagttctaggacccccttctccataccaaaacctgaggatgctcaagtccctgatagaaaatggtgtcatatttgtatgtgcatattctcttgtataatttaagtgatctctggattacttaatacaatgtaaacaatatgtaaatagttgttatagactgtattttaaaaattttgtattctttataaatttttctgaatattttcaatccatggctggtgaagtcctcggatgcagaccgtgtggatacagagtgccgattttatacaggagttcacctgtaactccctgtacctatcaacagctgactccaaattagaaagaaatagagtaagggagcctcagggagagtcctagcaaaacggattcgattaaacttcagttccttgtatagtttctttagttgtttatggtccattttctattttagcatttattattctatgtagtctatccaaagacgattaagggagttccacatgttttccggaacattttgaaaagagagcttatccagtgtacagatcctaataaagtgcacattcagtgtaattttatttttttaatatcttttttaatcctatttttcttcctcttttgctcagtaaattttgtatgaaactttaaaaggacttatggcatgtaaacattatttataaagtaagtcatggttataattatttttctcctgcctccttatgtatttatttcagaaatgagccgtcagactgctacagcattacctaccggtacctcgaagtgtccaccatcccagagggtgcctgccctgactggcacaactgcatccaacaatgacttggcgagtctttttgagtgtccagtctgctttgactatgtgttaccgcccattcttcaatgtcagagtggccatcttgtttgtagcaactgtcgcccaaagctcacatgttgtccaacttgccggggccctttgggatccattcgcaacttggctatggagaaagtggctaattcagtacttttcccctgtaaatatgcgtcttctggatgtgaaataactctgccacacacagaaaaagcagaccatgaagagctctgtgagtttaggccttattcctgtccgtgccctggtgcttcctgtaaatggcaaggctctctggatgctgtaatgccccatctgatgcatcagcataagtccattacaaccctacagggagaggatatagtttttcttgctacagacattaatcttcctggtgctgttgactgggtgatgatgcagtcctgttttggctttcacttcatgttagtcttagagaaacaggaaaaatacgatggtcaccagcagttcttcgcaatcgtacagctgataggaacacgcaagcaagctgaaaattttgcttaccgacttgagctaaatggtcataggcgacgattgacttgggaagcgactcctcgatctattcatgaaggaattgcaacagccattatgaatagcgactgtctagtctttgacaccagcattgcacagctttttgcagaaaatggcaatttaggcatcaatgtaactatttccatgtgttgaaatggcaatcaaacattttctggccagtgtttaaaacttcagtttcacagaaaataaggcacccatctgtctgccaacctaaaactctttcggtaggtggaagcatatttgcctgttgtctattcagacctttttgatatttccttcctctttcagcatttttgttttttaagtgcagttttcattgtggtatccaccaaatgtttgtaaaacaaacaaaaaaaatgagcattagtgttggaccataaatcatcaaattggataatgactaactgtagtcttttttttttttttttttttcagctgctggatacaattttcatggcaataggaactgaagtacttcaaataatgtgagcttaaacatgttacttcattgaaacaaccaaaactacttgatgtttacatctaaaatcctggttaaaataaattttagatttggaaagggaattggcaaaactaacattctttgtagcaaaatgtcccttagtaatagtcaagttgacctcatttcagtagttcataaaggaaaatccaaagccctcagcagtgaattacctggccacatagctgattttggtcactgtgaatgcagaccaatcacctagtactggaagctcacagtggtagacatcactatcacagtactttacggtcatggatttctcgtgaactatttcaggaacaatcacaaagatgacattcttcactgtatttgcatttgtaaccaccaagcaagtaaggatctctgccccagatgcatggtttgaggtaaggttcacagggaccactaaaggggcagagccaagtaaaaacatggatgtctccagtggacagtgtaggatttcttgataagcaaagcacctaaagcttttagttttaatacttgagaagttttaaaaacccatgcataaaacgtggaataccggtaaaatacacatatccctaagtctagtttaaactaaaatttctagagttaataattttcaataaaaaaatccagcttattttgatacaaggggtctttgggtaacatcttaaaaatcaatgctagaaaatgctcaacatcactagtcattagggacatagaatcaaaatacgtcacacccatttggagggctattataaaaaacccagaaaatgagtgctggcaaggatgtggagaaactggaacatttgtgcattgctggaaggaatgtcaaatggagcagctgcggtggaaaagtttggcagttctcaaaaagttaaacagaggtatcctgttgtatagtccnn

SEQ ID NO: 22960 - DNA, 414 bp, Homo sapiens; identical to SEQ ID NO: 21407

SEQ ID NO: 22961 - DNA, 429 bp, Homo sapiens; identical to SEQ ID NO: 20100
  misc_feature 424, 425, 426, 427, 428, 429: n = A,T,C or G

SEQ ID NO: 22962 - DNA, 549 bp, Homo sapiens; identical to SEQ ID NO: 21395
  misc_feature 1, 549: n = A,T,C or G

SEQ ID NO: 22963 - DNA, 1180 bp, Homo sapiens
  misc_feature 1, 2, 3, 4, 5, 6, 7, 8, 1179, 1180: n = A,T,C or G
nnnnnnnnaccagcccactgtgtttcacccccccggctttgtgaaaaccccttccccgcccttgaaccttaccttcctttccgcccgcccacacatgtttaaactttccgcccgagcccccacacttttttttttttgtttgaccaattgtaaactagtttatttaaaggaaggggataaatgggatgaaagaaatctttatactatacttacatattcacaaagaacattttacgtttaaaatactttttcattcatagtatctttgcccaactaatttctaccagaaatacattttactcatttgtctagaacattaagaagtactcatctgttttaaacaaaaatcaaaccgaaactattcttatctgtcaggtttacagttatgtagaaactacaatatagatgacaaaagatgcatctaaccatgtaactgtaatttatctttgatttatccaagcagaaacatcattgtctaacaataaaccattattctactgaaatcagagacaatgataaagcttgtctcttaaaaaacatcaacttttcaactttgatcagatggagcaccaaagggattatatctgtcaaagcatctttgcaattttttccacataactagcataatttagttacctgatataaaataggaaaatatactcaatttttatttaaaagaaagctgaaaatatgacatccctcaatcttatataatatacaatatgctaataaatgccatacatgttaacaatacgtgaaatgctgctgagagttccacaatcagctaattcatgtcaccaggctaagtaaatctgacaatttcacctcaatatgtcaccctttgtaccctgaagaatttatagaataataaagcttctcagaattttatttgtaagatttttgagactgttgaatcatggtgactactagaaagactgtatcaaggtgtagtgacttcaaggacagaaaaaaataaattaagtattgatcataatttcaaaacaatcaatatcccgctaagtatgaaacaaaagagaatgcacattttgtgttaattttcatgataaaagggacacgggtaaaaacctgatatttcacttatattgcataacaagctaaccaaactggacatggtggataaattataaaacaacatcatttctacttattatctatgann

SEQ ID NO: 22964 - DNA, 867 bp, Homo sapiens
  misc_feature 1, 2, 3, 4, 5, 6, 851, 852, 853, 854, 855, 856, 857, 858,859, 860, 861, 862, 863, 864, 865, 866, 867: n = A,T,C or G
nnnnnngtagttttactagagatggggtttcaccatggccaggctgatctcgaaatcctgacctcaagtgatccgcctgcctcggcctcccaaagtgctaggaatacaggtgtgaaccactgcaccaggcctgcagtcttacttttaatcttacacaggcctactttttctcatggttctcttctcatctctgaaataggaatcactacctggcacataatggactggtacttaacaagcagaccatgtgtagaccacccatcctgaaccaagattcctgggcaaggctcttaattcatctgttactgaacaaaagcaaaactgctccacacatgggccacataatatagccacttgtttatttaaatttttgacctatgtgataaatcctgatgctcagttgtctaaaaatgtctttgtaagcatctgaatatacctaatactgaaataagagtttaaaaagctgacaacacaatccaagttttacatttatttactcataattaactcaataaacatactagattttacatttaatatatgttaaaatggctgaacaaaaatatttagcgtaattttcttttttttggagatggagtttcactcttgtcgcccatggtggagtacaatggcacaatcttggctcactgcaacctctgcctcctgggttcaagtgattctcctgcctcagccttccgagtaactggaactagagatgtgcgccaccacacccggctaattttggtatataagtagagacgggttcagttatgataccgcgaaggtacgactcgaatcgtatcaggcatagctgttctgtgtgaagcaccccgaaaaaaaaacacacacannnnnnnnnnnnnnnnn

SEQ ID NO: 22965 - DNA, 4406 bp, Homo sapiens
  misc_feature 4392, 4393, 4394, 4395, 4396, 4397, 4398, 4399, 4400, 4401,4402, 4403, 4404, 4405, 4406: n = A,T,C or G
cgcggggtccggcggtgtccaagcggacctgaggagtcgcggctgcgagcaggttagagttacttgttattggtaaatagccactatggaggctaaggaccagaagaaacacagaaagaaaaacagtggacccaaagctgcaaagaaaaagaagcggcttctgcaggatctccagctaggagacgaagaagatgcccggaagagaaatcccaaagcttttgcagttcagtctgctgtgcggatggctcgatcctttcacaggactcaggatttgaagacaaaaaagcatcatattccagtggttgatcgaactccactagagcccccaccaatagtggtagtggtgatgggacctccaaaagttggaaagagcactttgatacaatgcctcattcggaactttacccggcagaagttgaccgagatcagaggccctgtgacgattgtgtcaggtaaaaagcgcagactcaccattattgaatgtgggtgtgacattaacatgatgattgatctggctaaagtagcagatctggtactgatgcttatagatgccagctttgggtttgaaatggaaacgtttgagtttctaaacatctgtcaagtacatggctttcctaaaattatgggagttctcacccacctcgactccttcaagcataataagcaactgaagaagacaaagaagcgattaaaacacaggttctggacggaagtttacccgggtgccaagctgttctacctttctggaatggtgcatggagaatatcaaaaccaagaaatccacaatctgggccgttttattacagttatgaagtttaggcctctcacatggcaaacttctcacccttatatcctggcagacaggatggaagatttgacaaacccagaggatatccgaacaaacatcaaatgtgaccggaaggtgtcactttatggttatttaagaggagcacacttgaaaaataaaagccaaattcacatgccaggggtaggagattttgccgtgagtgacatcagtttcctcccagacccttgcgctcttcctgaacaacaaaagaagcgctgtttaaatgagaaggagaagctggtttatgcgcctctttctggagttgggggtgtgctgtatgacaaagacgctgtctatgttgaccttggtggcagccacgtttttcaggatgaagtggggcccacccatgagctggtccagagtctcatctctacccactccaccattgatgccaagatggcttcaagtcgagtgacgctgttttctgattccaagccacttgggtcagaggatatagataatcaagggctaatgatgccaaaggaggaaaaacaaatggacttgaacactggtcgaatgcgtcggaaagccattttcggagatgaagatgaatctggagatagtgatgatgaagaagatgatgaaatgtctgaagatgacgggttggaaaacggctctagtgatgaggaagcagaagaggaggaaaatgctgagatgactgatcagtatatggctgttaagggcatcaaacgacggaaacttgagttggaagaagacagtgaaatggatttgccagcatttgctgacagtgacgatgaccttgagaggagctcagcggaagaaggggaagcggaggaagctgatgaaagcagtgaagaagaggactgcactgcaggagagaagggcatttcaggatcaaaggctgctggagaaggtagtaaagcagggctgtcaccagctaattgccagagtgaccgtgtgaatctggagaagtctttgctgatgaagaaagcagctctccccactttcgattctgggcattgcacagctgaagaggtgtttgcatctgaagatgaatctgaagaaagctcctcactcagtgcagaggaagaagactcagaaaatgaagaggctattagaaaaaagctttcaaagccttctcaagtgagcagtggtcagaaactggggccacagaacttcattgatgagaccagtgatatagaaaatttactcaaagaggaagaagattacaaggaagaaaataatgattccaaagaaacgtcaggtgccctcaagtggaaggaagacctttccagaaaggcagctgaggcctttctgaggcagcagcaagcagctccaaacctccgaaagcttatttatgggacagtgacagaagataatgaagaagaagatgatgatactctagaagagcttggagggttgtttcgtgtcaaccagcctgacagagagtgtaagcacaaggctgactctttggactgctccagatttcttgtggaggccccccatgactgggatttagaggaggttatgaacagtatcagagattgcttcgtgactggaaagtgggaagatgataaagatgcagccaaggtcttagcagaagatgaggagctctacggtgactttgaagacttggaaacaggggacgtgcacaagggaaaatcaggccccaatactcagaatgaagatatagagaaagaagttaaggaagaaattgaccccgacgaagaagaaagtgccaagaaaaagcatttggataagaagagaaaattgaaggagatgtttgatgcagaatatgatgaaggagaaagcacatattttgatgatcttaaaggagaaatgcagaaacaagcacagctgaatcgcgcagaatttgaagatcaagatgatgaagccagagttcagtatgagggttttcgacctgggatgtacgtccgcattgagattgaaaatgttccctgtgaatttgtgcagaactttgacccccattaccccattatcctgggtggcttgggcaacagtgagggaaatgttggctacgtgcagatgcgtctgaagaaacatcgctggtataagaaaatcctcaagtcccgagatccaatcatattttctgtagggtggaggaggtttcagaccatcccactgtattatatcgaagaccacaatggaagacaaaggcttctaaagtataccccacagcacatgcattgcggagcagccttttggggccctatcactccacagggaactggtttcttggcaatacagtctgtcagtggcataatgcctgattttcggatagctgctacaggagttgtccttgatctggataaatccataaaaattgtgaagaaattaaagctaactggttttccatataaaattttcaagaacacttcatttattaagggaatgtttaattctgccttggaagtggccaaatttgaaggtgctgtgattcgaacagtcagtgggataagggggcagatcaagaaagcactccgagctccagaaggagctttcagggccagctttgaggataagctgctgatgagcgatattgtcttcatgcgaacttggtatcctgtttccatcccagcgttctataacccagtaacatctttgttgaaaccagtgggtgagaaagacacctggtcaggaatgcggaccacgggccaactcaggctcgcccatggcgtcagactaaaggcgaacaaggactctctgtataagccaatcctgaggcaaaagaaacattttaattcactgcacattccaaaagccttgcagaaggccctgccatttaagaacaagcccaagacccaagcaaaggcaggcaaggtgccaaaggacaggcggagaccggccgtcatacgcgagcctcatgaaagaaagatccttgcactgctggatgctctgagtacggtgcatagtcagaagatgaagaaggccaaggagcagcggcacctgcacaataaagagcacttcagagccaagcagaaggaggaggaggagaagctgaagcggcagaaggacctcaggaagaagctcttcagaattcaggggcagaaggaaagaagaaaccagaagtccagtttgaagggggctgagggccaattgcagtgagcctttggactggagggactgtccctggatctgcggaggtagacagtttcaaacatcacagtttgaatgcctgtgaatgacaagtcagtgggaaagagctcaagagatgtctctactcaaactgtgcctgcaggaggaggaacagagaagcctgggctgctgggactgggttcattctcatgacttggggctgtcgagatttaaagtgatgtaagctgtggttatgtggattctcttactttcctctgcctgcctcagtttaattattttgtcctacagaaatatcattaaaatatttttttgtttaaaaagaaaaaagaaagaaaaaaaaaaaaaaaggggagggcagataaaaaataccagagggggagcaaaatagaggacaacagattttgtaaaaagggcgcacaatagacagagttaaaacaaaaagaagcgcggagataaaaactagatannnnnnnnnnnnnnn

SEQ ID NO: 22966 - DNA, 408 bp, Homo sapiens
  misc_feature 402, 403, 404, 405, 406, 407, 408: n = A,T,C or G
acgcggggacattggagtggggtgggaagcctgagtcctgtattcacatgaacgaattcaggacacccaccatacactcagctcctttctgaaagtgtcctcccttaggcctctagaaacgccatggactttaggaagggccaagtgacaccttccatgatgtttggttctggtccagatggatctggaagacaaagatttggggagagtgaccacatggctggtagcaataacaaggcctctggctctgaattgcttcctatggtcccggtagaaactgcatagttcagagccaaggggagatgagaagccttaacgtggaagagggacaagagagatgaattggtccctctgcaacccaactcttcaaagtaagaatggttgagagcaatagtcaccaannnnnnn

SEQ ID NO: 22967 - DNA, 466 bp, Homo sapiens
  misc_feature 1, 462, 463, 464, 465, 466: n = A,T,C or G
ngcagctgcaggcatacccccaggtctgcttttagcttccctatcttagtgcacctgaagggaaagaatgtgcttattaaggcccactgttatactggggcccaatgtatgagggtgaagtttggcaattacccaagagactttccccccacctccctctgtgcctgagctgtctcatctatgttttactgtctgctctttctgtctgcttgttgttagaagagaagtgattttcttgaaatgcatgaggctggaaagggagctggcacttaaagtggcggtgtttgtccgagaggatggtgctcctgctctgtcacagtgggcatggggattcaggccactgccaccgaatttcaagagcccaagcacagagcccagaactaaattgtgagggtttaaaaaaaaaaaaagctttattgaagtataattgacatacaataaacttgaatatttaaagtgtannnnn

SEQ ID NO: 22968 - DNA, 856 bp, Homo sapiens; identical to SEQ ID NO: 20855
  misc_feature 779, 810, 856: n = A,T,C or G

SEQ ID NO: 22969 - DNA, 377 bp, Homo sapiens
  misc_feature 1, 374, 375, 376, 377: n = A,T,C or G
ngatccaatcacatctggactttgcaactagatgatacctaagtggagggaccagatgagtgctggactgcattaagtaccgtcactgctcgtccgctaggcttggtggtgtgaggattttcttctgttcctatcgtggactctctctcccctttctctctttttttttattattttctccattttactctgacattattgagtgtctccctctagttctcatctttctctgccttcactgtgggcaatgactcttttccctcctacttgttgactttttcatctccagcttttctgccttcctgcctgagttcactttatttttaatagagtttctcccctggttctcttttttctcctcctactctccatgnnnn

SEQ ID NO: 22970 - DNA, 768 bp, Homo sapiens; identical to SEQ ID NO: 22428
  misc_feature 756, 757, 758, 759, 760, 761, 762, 763, 764, 765, 766, 767,768: n = A,T,C or G

SEQ ID NO: 22971 - DNA, 504 bp, Homo sapiens; identical to SEQ ID NO: 22504
  misc_feature 1, 2, 3, 4, 5, 503, 504: n = A,T,C or G

SEQ ID NO: 22972 - DNA, 1929 bp, Homo sapiens
  misc_feature 1, 2, 3, 4, 5, 6, 7, 8, 9, 10, 11, 12, 13: n = A,T,C or G
nnnnnnnnnnnnngccccccctttttattttgggcccccccaatttttttttttataatttgtgttgtttgtttttgttgttttaaaacaattttactccttattcataaaacagtacatttctattacataggtttcatcccctaggcatgcacaaccatttgaactatttaaacagtttataacaaaacaaatgagaagataagggaaaaagagctctcctggggacttacatagctgtttggtttttcaacttgattgaagaaagttattcgggggatctgtccaattcacaccttctgttccctgatcaaatactttagggtcaaacataaggttttattgatttttgctcaagcaaagaattaacatttttgataaggaactgtaatggcaattataaggtaatatggtgtatggtaatattatgctgccagaggaaacatttgactatgattaaattcaagcccagtactgggtagctctagataattaaagataattttatccattcaagtcccctctgttaagctgcacattgacacatatttgttccctgtcttgtaaataaatatagaaagcaaattagagtgagtcctgcagatttctgagaatttaattatacccttaaacttgtgcaacaccagaatatccggttagatttctgacgagtaatacctgaataacttcgttttacaatgcttaatttattttgtactaaggaaggcttttaactatttaagataaaccaacctaattttgattttttacttgcttcaacgtgtttcagttcattaatgtttcaataataaggaatgaattctcttgtcttgacaaaccaagcatggaaatttccccataagagaaaagaagaaattaaaatgatttccatattcaagtcacagcacgctgaaaagagaactttgagttcttaggaaaggcatctgttacctccaaaggagggccactcattacagttttgtgtaatattacagtaaggtctgccaagaaggaattcaaggaaattgggaatgacgacactgtgatcccaggccactctcttgagcagaggtttccttcccttatgtgttctgccctcgccaagctctttctgaaatcagaggccactgacatgcataacaaaccatgctaaaatccaaacatgacaccaacagcaaacaattacactgtgatcccattgtggtccccaagatatatcttgagatacttcagagagaagctatattcttcataaatcaaaatacagagggtttttatgattcttgctttttataaaatgaaatacacttctatagtattaaaataagtgaacaaaagaactacagcacttactcccctacccccaaatgtttgcttctttgcatttcacaattcatatgcatatctggacgacagttaacctccagtggcaaagataagaaaatgtgaaagaaaaatcatacagattgttcccagacctttcttgtttatggacattaaaataacctcaacaccaatctattaagatgccatctgaaagcacatggaagtggcttagaatctatgccgctgagaaagttaggaaattcaaagttataacattaatcaaatcatatcaatgacttctccaagcattggagtcacagggacttgaatataatttggggtactacgcaagtggttgaagaacttgttctttttgactaacaatactgacactgtttcagactttcagatgccaaattattaagatcattaagaatgtcaaaacaggccgggtgcggtggctctcacctgtaatcccagcactttgggaggccgaggcgggcggatcacgagtcaggagatcgagaccaccctggccaacacggtgaaaacccgtttctgctaaaaaaaaaaaaaaaaaaaaagatctttaattaagcggcc

SEQ ID NO: 22973 - DNA, 556 bp, Homo sapiens
  misc_feature 1, 2, 3, 11, 20, 54, 65, 553, 554, 555, 556: n = A,T,C or G
nnnatcttaanggctatatnggaggaatatccactcacccataatttaaataangattaaaaatncatgtattttatggtggccaaatgtttggtagaactgtaattagaaaaatccaagtatatttgcgtgatggttacactagaagcccagactttacgactacacaatatattcatgtatctaaactgtacttgtaccccctaaatttatttttaaaaaaggaaaaataaaagtatcatgaaaaaacctatttttttttccactgtccttccactactcccataacaaacttatccatggttggtaaaattttacatatttctatccttgaaatgaaggcttcttttaaattccaaagaagtcatggaggcctgtgcatttgaattgtatatgctagtgaggaaaagatttagacatttcaagagcagggttggccaggcgcggtggctcacacctgtaatcccagcactttgggaggccgaggagggcggatcacgaggtcaggagatcgagaccatcctggctaacacagtgaaaccccatctctacnnnn

SEQ ID NO: 22974 - DNA, 1549 bp, Homo sapiens
  misc_feature 1542, 1543, 1544, 1545, 1546, 1547, 1548, 1549: n = A,T,C or G
gaattgcttaaaatcacaaggtggaggttgcagtgagctgagatcgtgtcactgcactccagcctgggcaaaagagcgaaactccatctcaaataaacaaacaaataaataacaaaaaacaaaaatgttgcattaaacttagttcttgtctctcctttccactcttattcttaaatctgaagctcatcgactaagtgaaatatttaaagaatatgataggccagcaagaagaagtattatgtagtaccatagttagtaaattcgtaaaaccttggaagccattatttggtcccacttgcaatttagtgtttttgaagtgtgtagcttcattcagatagctctttaaataattaaaatataaaagcaaacaacccaaactacctgactataaacaggaaaagttaaccctcaaagagagttcttgtgaattctctttatgctggcaaatagctctaggattaaaggcacattagggtttccttcagtttgtttattctaagcttttactgtgctttttactgaacaagtttctgatgtataaaacttgcatctgatttctttggaaatattttcacaaaagttattttaatcagtatttttacattgcctttccagtgtccagaagtgtttctaaacttagaaagtgacctatagttttttaaaattatgttttcctagaacgtgccaaattttgatttactctaacaatcagtacttttcttcagatgctttgttctgtttagaacaaaaatgcactatagtttttaaagaatcatgcatctttgggttggcccaggatcaaatttgatattgaataatttattccagggcagctttcataaacatacttcatagatgttgttttgaaatgtttctaaatatctaaaatcatttcaacagcagaaatgatttttattttaacaaaagattatgatagcccttgtagtgtttaaaagtggtcatatttattactgactttgagtcaggtgttaaaatagcagtgccacagctcgtctcttgccttagtgtgctgctgtgagagtcacagtggaaactgcagggaggaggtgtgttcctaagaaccaaaatccagcacagcatcctgtgaagccacgtgtaatgatggtcccataaggaaagtatgtgaatatggctcttgtaaaggattaactattgtaattttagcttatgctctgtattctgttttctatggaattatttaagcccttttagtgacctttgtcctggcccatttaaaaactaaaatgtagtatatattgtataaaatggaaatatcattattgcttcattaggggaaactgtacataggcattgaaagaagggtaaaagcaagcagttttatcaggcagttgtaaaacaccaaaaatatagattcgtctttgacgtgtaacacactaaatgtattttgtacagcatctggtttaaaaggtgccttaagagtttaccattacttgctttgttctatatacagattatgtccaatgtatcattttgaagtaaataaccttattttagtatacnnnnnnnn

SEQ ID NO: 22975 - DNA, 14452 bp, Homo sapiens
ccttagttgctggctttgaccttttatgttgctgagttttacacatctattttctcaactgccatatcctagggggcttggagtacccataatacagtgagcccaccttcctggtccccagacatttcagaaggtcgggaaatttttaaacccaggcagcttcctggcagtgccatttggagcatcaaagtgggccgtgggtctggatttccaggaaagcggagacctcgaggtgcaggactgtcggggcgaggtggccgaggcaggtcaaagctgaaaagtggaatcggagctgttgtattacctggggtgtctactgcagatatttcatcaaataaggatgatgaagaaaactctatgcacaatacagttgtgttgttttctagcagtgacaagttcactttgaatcaggatatgtgtgtagtttgtggcagttttggccaaggagcagaaggaagattacttgcctgttctcagtgtggtcagtgttaccatccatactgtgtcagtattaagatcactaaagtggttcttagcaaaggttggaggtgtcttgagtgcactgtgtgtgaggcctgtgggaaggcaactgacccaggaagactcctgctgtgtgatgactgtgacataagttatcacacctactgcctagaccctccattgcagacagttcccaaaggaggctggaagtgcaaatggtgtgtttggtgcagacactgtggagcaacatctgcaggtctaagatgtgaatggcagaacaattacacacagtgcgctccttgtgcaagcttatcttcctgtccagtctgctatcgaaactatagagaagaagatcttattctgcaatgtagacaatgtgatagatggatgcatgcagtttgtcagaacttaaatactgaggaagaagtggaaaatgtagcagacattggttttgattgtagcatgtgcagaccctatatgcctgcgtctaatgtgccttcctcagactgctgtgaatcttcacttgtagcacaaattgtcacaaaagtaaaagagctagacccacccaagacttatacccaggatggtgtgtgtttgactgaatcagggatgactcagttacagagcctcacagttacagttccaagaagaaaacggtcaaaaccaaaattgaaattgaagattataaatcagaatagcgtggccgtccttcagacccctccagacatccaatcagagcattcaagggatggtgaaatggatgatagtcgagaaggagaacttatggattgtgatggaaaatcagaatctagtcctgagcgggaagctgtggatgatgaaactaagggagtggaaggaacagatggtgtcaaaaagagaaaaaggaaaccatacagaccaggtattggtggatttatggtgcggcaaagaagtcgaactgggcaagggaaaaccaaaagatctgtgatcagaaaagattcctcaggctctatttccgagcagttaccttgcagagatgatggctggagtgagcagttaccagatactttagttgatgaatctgtttctgttactgaaagcactgaaaaaataaagaagagataccgaaaaaggaaaaataagcttgaagaaactttccctgcctatttacaagaagctttctttggaaaagatcttctagatacaagtagacaaagcaagataagtttagataatctgtcagaagatggagctcagcttttatataaaacaaacatgaacacaggtttcttggatccttccttagatccactacttagttcatcctcggctccaacaaaatctggaactcacggtcctgctgatgacccattagctgatatttctgaagttttaaacacagatgatgacattcttggaataatttcagatgatctagcaaaatcagttgatcattcagatattggtcctgtcactgatgatccttcctctttgcctcagccaaatgtcaatcagagttcacgaccattaagtgaagaacagctagatgggatcctcagtcctgaactagacaaaatggtcacagatggagcaattcttgggaaaattatataaaattccagagcttggcggaaaagatgttgaagacttatttacagctgtacttagtcctgcgaacactcagccaactccattgccacagcctcccccaccaacacagctgttgccaatacacaatcaggatgctttttcacggatgcctctcatgaatggccttattggatccagtcctcatctcccacataattctttgccacctggaagcggactgggaactttctctgcaattgcacaatcctcttatcctgatgccagggataaaaattcagcctttaatccaatggcaagtgatcctaacaactcttggacatcatcagctcccactgtggaaggagaaaatgacacaatgtcgaatgcccagagaagcacgcttaagtgggagaaagaggaggctctgggtgaaatggcaactgttgccccagttctctacaccaatattaatttccccaacttaaaggaagaattccctgattggactactagagtgaagcaaattgccaaattgtggagaaaagcaagctcacaagagcaccatatgtgcaaaagccagagataacagagctgctttacgcattaataaagtacagatgtcaaatgattccatgaaaaggcagcaacagcaagatagcattgatcccagctctcgtattgattcggagctttttaaagatcctttaaagcaaagagaatcagaacatgaacaggaatggaaatttagacagcaaatgcgttagtaaaagtaagcagcaagctaaaattgaagccacacagaaacttgaacaggtgaaaaatgagcagcagcagcagcaacaacagcaatttggttctcagcatcttctggtgcaatctggttcagatacaccaagtagtgggatacagagtcccttgacacctcagcctggcaatggaaatatgtctcctgcacagtcattccataaagaactgtttacaaaacagccacccagtacccctacgtctacatcttcagatgatgtgtttgtaaagccacaagctccacctcctcctccagccccatcccggattcccatccaggatagtctttctcaggctcagacttctcagccaccctcaccgcaagtgttttcacctgggtcctctaactcacgaccaccatctccaatggatccatatgcaaaaatggttggtacccctcgaccacctcctgtgggccatagtttttccagaagaaattctgctgcaccagtggaaaactgtacacctttatcatcggtatctaggccccttcaaatgaatgagacaacagcaaataggccatcccctgtcagagatttatgttcttcttccacgacaaataatgacccctatgcaaaacctccagacacacctaggcctgtgatgacagatcaatttcccaaatccttgggcctatcccggtctcctgtagtttcagaacaaactgcaaaaggccctatagcagctggaaccagtgatcactttactaaaccatctcctagggcagatgtgtttcaaagacaaaggatacctgactcatatgcacgacccttgttgacacctgcacctcttgatagtggtcctggaccttttaagactccaatgcaacctcctccatcctctcaggatccttatggatcagtgtcacaggcatcaaggcgattgtctgttgacccttatgaaaggcctgctttgacaccaagacctatagataatttttctcataatcagtcaaatgatccatatagtcagcctccccttaccccacatccagcagtgaatgaatcttttgcccatccttcaagggctttttcccagcctggaaccatatcaaggccaacatctcaggacccatactcccaacccccaggaactccacgacctgttgtagattcttattcccaatcttcaggaacagctaggtccaatacagacccttactctcaacctcctggaactccccggcctactactgttgacccatatagtcagcagccccaaaccccaagaccatctacacaaactgacttgtttgttacacctgtaacaaatcagaggcattctgatccatatgctcatcctcctggaacaccaagacctggaatttctgtcccttactctcagccaccagcaacaccaaggccaaggatttcagagggttttactaggtcctcaatgacaagaccagtcctcatgccaaatcaggatcctttcctgcaagcagcacaaaaccgaggaccagctttacctggcccgttggtaaggccacctgatacatgttcccagacacctaggccccctggacctggtctttcagacacatttagccgtgtttccccatctgctgcccgtgatccctatgatcagtctccaatgactccaagatctcagtctgactcttttggaacaagtcaaactgcccatgatgttgctgatcagccaaggcctggatcagaggggagcttctgtgcatcttcaaactctccaatgcactcccaaggccagcagttctctggtgtctcccaacttcctggacctgtgccaacttcaggagtaactgatacacagaatactgtaaatatggcccaagtagatacagagaaattgagacagcggcagaagttacgtgaaatcattctccagcagcaacagcagaagaagattgcaggtcgacaggagaaggggtcacaggactcacccgcagtgcctcatccagggcctcttcaacactgacaaccagagaatgttaaccaggctttcaccagacccccacctccctatcctgggaacattaggtctcctgttgcccctcctttaggacctagatatgctgttttcccaaaagatcagcgtggaccctatcctcctgatgttgctagtatggggatgagacctcatggatttagatttggatttccaggaggtagtcatggtaccatgccgagtcaagagcgcttccttgtgcctcctcagcaaatacagggatctggagtttctccacagctaagaagatcagtatctgtagatatgcctaggcctttaaataactcacaaatgaataatccagttggacttcctcagcatttttcaccacagagcttgccagttcagcagcacaacatactgggccaagcatatattgaactgagacatagggctcctgacggaaggcaacggctgcctttcagtgctccacctggcagcgttgtagaggcatcttctaatctgagacatggaaacttcattccccggccagactttccgggccctagacacacagaccccatgcgacgacctccccagggtctacctaatcagctacctgtgcacccagatttgggaacaagtgccaccatctcaacaagagcaaggtcattctgtccattcatcttctatggtcatgaggactctgaaccatccactaggtggtgaattttcagaagctcctttgtcaacatctgtaccgtctgaaacaacgtctgataatttacagataaccacccaaccttctgatggtctagaggaaaaacttgattctgatgacccttctgtgaaggaactggatgttaaagaccttgagggggttgaagtcaaagacttagatgatgaagatcttgaaaacttaaatttagatacagaggatggcaaggtagttgaattggatactttagataatttggaaactaatgatcccaacctggatgacctcttaaggtcaggagagtttgatatcattgcatatacagatccagaacttgacatgggagataagaaaagcatgtttaatgaggaactagaccttccaattgatgataagttagataatcagtgtgtatctgttgaaccaaaaaaaaaggaacaagaaaacaaaactctggttctctctgataaacattcaccacagaaaaaatccactgttaccaatgaggtaaaaacggaagtactgtctccaaattctaaggtggaatccaaatgtgaaactgaaaaaaatgatgagaataaagataatgttgacactccttgctcacaggcttctgctcactcagacctaaatgatggagaaaagacttctttgcatccttgtgatccagatctatttgagaaaagaaccaatcgagaaactgctggccccagtgcaaatgtcattcaggcatccactcaactacctgctcaagatgtaataaactcttgtggcataactggatcaactccagttctctcaagtttacttgctaatgagaaatctgataattcagacattaggccatcggggtctccaccaccaccaactctgccggcctccccatccaatcatgtgtcaagtttgcctcctttcatagcaccgcctggccgtgttttggataatgccatgaattctaatgtgacagtagtctctagggtaaaccatgttttttctcagggtgtgcaggtaaacccagggctcattccaggtcaatcaacagttaaccacagtctggggacaggaaaacctgcaactcaaactgggcctcaaacaagtcagtctggtaccagtagcatgtctggaccccaacagctaatgattcctcaaacattagcacagcagaatagagagaggccccttcttctagaagaacagcctctacttctacaggatcttttggatcaagaaaggcaagaacagcagcagcaaagacagatgcaagccatgattcgtcagcgatcagaaccgttcttccctaatattgattttgatgcaattacagatcctataatgaaagccaaaatggtggcccttaaaggtataaataaagtgatggcacaaaacaatctgggcatgccaccaatggtgatgagcaggttcccttttatgggccaggtggtaactggaacacagaacagtgaaggacagaaccttggaccacaggccattcctcaggatggcagtataacacatcagatttctaggcctaatcctccaaattttggtccaggctttgtcaatgattcacagcgtaagcagtatgaagagtggctccaggagacccaacagctgcttcaaatgcagcagaagtatcttgaagaacaaattggtgctcacagaaaatctaagaaggccctttcagctaaacaacgtactgccaagaaagctgggcgtgaatttccagaggaagatgcagaacaactcaagcatgttactgaacagcaaagcatggttcagaaacagctagaacagattcgtaaacaacagaaagaacatgctgaattgattgaagattatcggatcaaacagcagcagcaatgtgcaatggccccacctaccatgatgcccagtgtccagccccagccacccctaattccaggtgccactccacccaccatgagccaacccacctttcccatggtgccacagcagcttcagcaccagcagcacacaacagttatttctggccatactagccctgttagaatgcccagtttacctggatggcaacccaacagtgctcctgcccacctgcccctcaatcctcctagaattcagcccccaattgcccagttaccaataaaaacttgtacaccagccccagggacagtctcaaatgcaaatccacagagtggaccaccacctcgggtagaatttgatgacaacaatccctttagtgaaagttttcaagaacgggaacgtaaggaacgtttacgagaacagcaagagagacaacgggtccaactcatgcaggaggtagatagacaaagagctttgcagcagaggatggaaatggagcagcatggtatggtgggctctgagataagtagtagtaggacatctgtgtcccagattcccttctacagttccgacttaccttgtgattttatgcaacctctaggaccccttcagcagtctccacaacaccaacagcaaatggggcaggttttacagcagcagaatatacaacaaggatcaattaattcaccctccacccaaactttcatgcagactaatgagcgaaggcaggtaggccctccttcatttgttcctgattcaccatcaatccctgttggaagcccaaatttttcttctgtgaagcagggacatggaaatctttctgggaccagcttccagcagtccccagtgaggccttcttttacacctgctttaccagcagcacctccagtagctaatagcagtctcccatgtggccaagattctactataacccatggacacagttatccgggatcaacccaatcgctcattcagttgtattctgatataatcccagaggaaaaagggaaaaagaaaagaacaagaaagaagaaaagagatgatgatgcagaatccaccaaggctccatcaactccccattcagatataactgccccaccgactccaggcatctcagaaactacctctactcctgcagtgagcacacccagtgagcttcctcaacaagccgaccaagagtcggtggaaccagtcggcccatccactcccaatatggcagcaggccagctatgtacagaattagagaacaaactgcccaatagtgatttctcacaagcaactccaaatcaacagacgtatgcaaattcagaagtagacaagctctccatggaaacccctgccaaaacagaagagataaaactggaaaaggctgagacagagtcctgcccaggccaagaggagcctaaattggaggaacagaatggtagtaaggtagaaggaaacgctgtagcctgtcctgtctcctcagcacagagtcctccccattctgctggggcccctgctgccaaaggagactcagggaatgaacttctgaaacacttgttgaaaaataaaaagtcatcttctcttttgaatcaaaaacctgagggcagtatttgttcagaagatgactgtacaaaggataataaactagttgagaagcagaacccagctgaaggactgcaaactttgggggctcaaatgcaaggtggttttggatgtggcaaccagttgccaaaaacagatggaggaagtgaaaccaagaaacagcgaagcaaacggactcagaagacgggtgagaaagcagcacctcgctcaaagaaaaggaaaaaggacgaagaggagaaacaagctatgtactctagcactgacacgtttacccacttgaaacagctctctctgctccctctaatggaaccaatcattggagtgaactttgcgcactttcttccttatggcagtggccaatttaatagtgggaatcgacttctaggaacttttggcagtgctaccctggaaggggtttcggactactattctcagttgatctacaagcagaataatttaagtaatcctccaacaccccctgcctctcttcctcctacaccacctcctatggcttgtcagaagatggccaatggttttgcaacaactgaagaacttgctggaaaagccggagtgttagtgagccatgaagttaccaaaactctaggacctaaaccatttcagctgcccttcagaccccaggacgacttgttggcccgagctcttgctcagggccccaagacagttgatgtgccagcctccctcccaacaccacctcataacaatcaggaagaattaaggatacaggatcactgtggtgatcgagatactcctgacagttttgttccctcatcctctcctgagagtgtggttggggtagaagtgagcaggtatccagatctgtcattggtcaaggaggagcctccagaaccggtgccgtcccccatcattccaattcttcctagcactgctgggaaaagttcagaatcaagaaggaatgacatcaaaactgagccaggcactttatattttgcgtcaccttttggtccttccccaaatggtcccagatcaggtcttatatctgtagcaattactctgcatcctacagctgctgagaacattagcagtgttgtggctgcattttccgaccttcttcacgtccgaatccctaacagctatgaggttagcagtgctccagatgtcccatccatgggtttggtcagtagccacagaatcaacccgggtttggagtatcgacagcatttacttctccgtgggcctccgccaggatctgcaaaccctcccagattagtgagctcttaccggctgaagcagcctaatgtaccatttcctccaacaagcaatggtctttctggatataaggattctagtcatggtattgcagaaagcgcagcactcagaccacagtggtgttgtcattgtaaagtggttattcttggaagtggtgtgcggaaatctttcaaagatctgacccttttgaacaaggattcccgagaaagcaccaagagggtagagaaggacattgtcttctgtagtaataactgctttattctttattcatcaactgcacaagcgaaaaactcagaaaacaaggaatccattccttcattgccacaatcacctatgagagaaacgccttccaaagcatttcatcagtacagcaacaacatctccactttggatgtgcactgtctcccccagctcccagagaaagcttctccccctgcctcaccacccatcgccttccctcctgcttttgaagcagcccaagtcgaggccaagccagatgagctgaaggtgacagtcaagctgaagcctcggctaagagctgtccatggtgggtttgaagattgcaggccgctcaataaaaaatggagaggaatgaaatggaagaagtggagcattcatattgtaatccctaaggggacatttaaaccaccttgtgaggatgaaatagatgaatttctaaagaaattgggcacttcccttaaacctgatcctgtgcccaaagactatcggaaatgttgcttttgtcatgaagaaggtggtggattgacagatggaccagcaaggctactcaaccttgacttggatctgtgggtccacttgaactgcgctctgtggtccacggaggtctatgagactcaggctggtgccttaataaatgtggagctagctctgaggagaggcctacaaatgaaatgtgtcttctgtcacaagacgggtgccactagtggatgccacagatttcgatgcaccaacatttatcacttcacttgcgccattaaagcacaatgcatgttttttaaggacaaaactatgctttgccccatgcacaaaccaaagggaattcatgagcaagaattaagttactttgcagtcttcaggagggtctatgttcagcgtgatgaggtgcgacagattgctagcatcgtgcaacgaggagaacgggaccatacctttcgcgtgggtagcctcatcttccacacaattggtcagctgcttccacagcagatgcaagcattccattctcctaaagcactcttccctgtgggctatgaagccagccggctgtactggagcactcgctatgccaataggcgctgccgctacctgtgctccattgaggagaaggatgggcgcccagtgtttgtcatcaggattgtggaacaaggccatgaagacctggttctaagtgacatctcacctaaaggtgtctgggataagattttggagcctgtggcatgtgtgagaaaaaagtctgaaatgctccagcttttcccagcgtatttaaaaggagaggatctgtttggcctgaccgtctctgcagtggcacgcatagcggaatcacttcctggggttgaggcatgtgaaaattataccttccgatacggccgaaatcctctcatggaacttcctcttgccgttaaccccacaggttgtgcccgttctgaacctaaaatgagtgcccatgtcaagaggtttgtgttaaggcctcacaccttaaacagcaccagcacctcaaagtcatttcagagcacagtcactggagaactgaacgcaccttatagtaaacagtttgttcactccaagtcatcgcagtaccggaagatgaaaactgaatggaaatccaatgtgtatctggcacggtctcggattcaggggctgggcctgtatgctgctcgagacattgagaaacacaccatggtcattgagtacatcgggactatcattcgaaacgaagtagccaacaggaaagagaagctttatgagtctcagaaccgtggtgtgtacatgttccgcatggataacgaccatgtgattgacgcgacgctcacaggagggcccgcaaggtatatcaaccattcgtgtgcacctaattgtgtggctgaagtggtgacttttgagagaggacacaaaattatcatcagctccagtcggagaatccagaaaggagaagagctctgctatgactataagtttgactttgaagatgaccagcacaagattccgtgtcactgtggagctgtgaactgccggaagtggatgaactgaaatgcattccttgctagctcagcgggcggcttgtccctaggaagaggcgattcaacacaccattggaattttgcagacagaaagagatttttgttttctgttttatgactttttgaaaaagcttctgggagttctgatttcctcagtcctttaggttaaagcagcgccaggaggaagctgacagaagcagcgttcctgaagtggccgaggttaaacggaatcacagaatggtccagcacttttgcttttttttcttttccttttcttttttttttgtttgttttttgttttgtttttcccttgtgggtgggtttcattgttttggttttctagtctcactaaggagaaacttttactggggcaaagagccgatggctgccctgccccgggcaggggccttcctatgaatgtaagactgaaatcaccagcgagggggacagagagtgctggccacggccttattaaaaaggggcaggccctctaacttcaaaatgtttttaaataaagtagacaccactgaacaaggaatgtactgaaatgacttccttagggatagagctaagggataataacttgcactaaatacatttaaatacttgattccatgagtcagtttattgtagtttttgatttctgtaaaataagagaaacttttgtatttattattgaataagtgaatgaagctatttttaaataaagttagaagaaagccaagctgctgctgttacctgcagaactaacaaaccctgttactttgtacagatatgtaaatattttgagaaaaaatacagtataaaaatagttattgaccaaatgctaccaggctctgcagcagctcgggggcttataaaatgttcatagggatgttacaatataattttgtgttataaaatatgccattataattatgtaataaccaaaatttcaacctagagtgttgggggttttttggaaaccgcagtctattagtactcaatggttttatacaccttacttctgacagagcggggcgtatgctacgactacaacttttatagctgttttggtaatttaaactaattttttcatattatattgttgcatccctacttcttcagtcaggtttttttgtgcttacaatttgtgataactgtgaataactgcttaaaaatacacccaaatggaggctgaattttttcttcagcaaaagtagttttgattagaactttgtttcagccacagagaatcatgtaaacgtaataggatcatgtagcagaaacttaaatctaaccctttagccttctatttaacacaaaaatttgaaaaaaaaaaaaaaaaaaaggagatgtgattatgcttacagctgcaggactctggcaatagggtttttggaagatgtaattttaaaatgtgtttgtatgaactgtttgtttacatttctttaataaaaaaaacactgttttgtgtttgcttgtagaaacttaatcagcattttgaaccaggttagctttttattttgtacttaaaattctggtactgacacttcacaggctaagtataaaatgaagttttgtgtgcacaattcaagtggactgtaaactgttggtatattcagtgatgcagttctgaacttgtatatggcatgatgtatttttatcttacagaataaatcaattgtatatatttttctcttgataaatagctgtatgaaatttgtttcctgaatatttttcttctcttgtacaatatcctgacatcctaccagtatttgtcctaccgggtttttgttgttttctgttctgtataatagtatctaatgttggcaaaaattgaattttttgaagtatacagagtgttatgggttttggaatttgtggacacagatttagaagatcaccatttacaaataaaatattttacatctataaaaaaaaccactaccctaaaaaaaaaactcgagggggggccccggaccaaattcgccctttgtggagtcgattacaattaactgggccgcgtttaaaacgtcttgactgg

SEQ ID NO: 22976 - DNA, 3849 bp, Homo sapiens
  misc_feature 3827, 3828, 3829, 3830, 3831, 3832, 3833, 3834, 3835, 3836,3837, 3838, 3839, 3840, 3841, 3842, 3843, 3844, 3845, 3846,3847, 3848, 3849: n = A,T,C or G
gcgtccgcccacgcgtccggggccgcaagcggggcgaggggttcggggagcggcgcggcctgggagacacagagccttcaggcgccggggcgggggcacaggcgaagactaaggcggcgccgggccccacagcagcagccgcagcccaagcgagcgcagcagcgcggcggcagccgcgggagcccctgggcagccgtccgcccgcgcagccgccgccgccgcgggagcccgtcgccgggagcaggagcgggcggaagacaacggaggggccgagcgtccgagccactccgcggggaccgaacgagcagcccgaagcggcggcggccgaggacggggacagcgacgacgcggaggcagagaagggaacgcccggcccagccccgtagcacaggcggagtgcagcggaggcccctgccgctgccgtcatgccgttcccgtttgggaagtctcacaaatctccagcagacattgtgaagaatctgaaggagagcatggctgttctggaaaagcaagacatttctgataaaaaagcagaaaaggctacagaagaagtttccaaaaatctggttgccatgaaagaaattctgtatggcacaaatgaaaaagagcctcagacagaagcagtagctcaacttgctcaagaactctataatagtgggctccttagcaccctggtagctgatttacagctcattgactttgagggcaaaaaagacgtggctcaaattttcaacaatattctcagaagacaaattggtacgagaactcctactgttgaatacatctgcacccaacagaatattttgttcatgttattgaaagggtatgaatctccagaaatagctctaaattgtggaataatgttaagagaatgcatcagacatgaaccacttgcaaaaatcattttgtggtcggaacagttttatgatttcttcagatatgtcgaaatgtcaacatttgacatagcttcagatgcatttgccacattcaaggatttacttacaagacataaattgctcagtgcagaatttttggaacagcattatgatagatttttcagtgaatatgagaagttacttcattcagaaaattatgtgacaaaaagacagtcactgaagcttctcggtgaactactactagatagacacaacttcacaattatgacaaaatacatcagtaaacctgagaacctcaaattaatgatgaacctgctgcgagacaaaagtcgcaacatccagtttgaggcctttcacgtttttaaggtgtttgtagccaatcctaacaagacgcagcccatcctagacatcctcctcaagaaccaggccaaactcatagagttcctcagcaagtttcagaacgacaggacggaggatgagcagtttaacgacgagaagacctatttagttaaacagatcagggatttgaagagaccagctcagcaagaagcttaatctccaataaacatctatgttaaatccaaattcagcatttgctgttagctattcagcatcaggcactcttattgattcatgaggaacattactgctaatctgctgttaagtgaacggtttttcattttacccttttgtttttcagtccaggttggagatcgtagctgctgctgcttgcacactagggcacatgtgggctttctcttgatctttgtgtcatttcagaattcaaagactgtgctacgggagttctgaacatggctgggttcatgaaggcaaatgtatggatgagagtgtggtttaggaaagagggcactgatatcagattagacctatgtgtttgcacccatctttgttggcgatctgagtgcagtgtggcaagtgcacacctggcatccctgcgtcagatcgcgcaccttcaggtcgcgcaccttcgctgaaggaagatgacgcagagctttatctgaaatcagaggggagctatccaaaatgggagtttgggggcagctaaagttgacatgcgaataaattgatactgaaacttagcaacttcttaaaagtgtaaagaagcctcataagatcataaggaaaatgtatatatgcttttcacagctttctagaattttttgacatttgattttcttgagacttgtaaacctggatatgttgaagggtatttgttaattttacttttcaaagatactttaaaacagtagagctagcaatgacaccttgcatttcatttcaacactgcttcaaggtttcttttgtatataattcttagaatgctcatttcttttaaatggtttaatttgtacagcagaggaatgttattgtagtagtatgtaactattacctaatactgagtttttgcaaaaaacaatgaatgctcatatgtaattgaaatacttcagatcacatgaaaatgctgatttaacatttaagtatcacagcattaaaagaaaaagaaagtaaaccagtcctttgtattcagttacctaatggggtgccatcaataagctgcgatacagccctggagctcagtcagccacaccttcctgcatcctattggccttattcattttaaatgagttaatgaatctgccagatctgtgaatgatagagattatgctaaattaatgctgattctttgtgtgtgtgggaaatctctgtagagcaccttttctttcttagactaagtaacccagtacaatagttgtgaactgaataattaaaactttggcttctcttaggaaaagacgacttcctagtcataggtgtcctatggggaaatttattttttttaatgtcctgttccttaatgctgcaaattatcagtatttataaagtaactgattttgcaccacttttttgttactgtgaccacggcagaacaatgtcttctagactatatctatgtaaagttattagaatggtatctgttcattttagtgatatgaagatcacaactaacaactgacaaatcagagtttgccagttcaaattcagcatggctgcagctgattaagaaattgatatgattattctttgctagcctctcttactaatggaattatatactggccagtaaaatgggcctcccaattgctgtttcagcaggttttaaaccttcaggaacaccagttaggaaaatagctccagaaaatatagatatattttatttttattaaaatggcagtctacatcataattggcatttctcaagactgtctttaccagaatctgtgtgaaataaggcaatctagtctccttgaaaaaaaaatctcttggatgtttaggaaggaagacttggccgtgatgtggtgtcctggctttgtggtgtagtgctgtgtgtatggagttagtgtaaaaacatggattacaccaagtggaagaaacgtcttcttgccaagctcattcttagaacttacacatctagaacagcttccactttggcagtgaggtcgtagccttttaggtggaagaagtgagggtgcagcgtgtcagacacaacattcatgttactcttacattggaatctgaaggtagttcagacttcgtgggttttgtttttaagcaaaacaatgtgaaaacatttaagtttgaaatgttgcatttgaagttatgatcatttaatatattcatattaccaagactattatactggaagtggtttttgtgttataaaggtttaattttacataaggcagttacttaatgtgatttttaacccttaaaaaagtggagatgtatacatttgttaacaatgccatgaaagcattttctttctcctaaggaaaagtgaatttcttatcagaatatctggctggccctgtaatttaaattaaaataaaattttggagaaacagcctacannnnnnnnnnnnnnnnnnnnnnn

SEQ ID NO: 22977 - DNA, 5175 bp, Homo sapiens
  misc_feature 1, 2, 5151, 5152, 5153, 5154, 5155, 5156, 5157, 5158, 5159,5160, 5161, 5162, 5163, 5164, 5165, 5166, 5167, 5168, 5169,5170, 5171, 5172, 5173, 5174, 5175: n = A,T,C or G
nnggagtgggtgctcgcggaagcgctgctctcgcagagccgggacccccgggccctgcttggggcgctgtgccaaggggaggcatccgcggagcgcgtggagacgctgcgcttccttctgcagcggctcgaggacgaggaggcgcgcggcagcgggggcgcaggcgcgctcccggaggcggcgcgcgaggtggctgcagggtacctcgtgccactgctgcggagcctgcgcggacgccccgcgggcggcccggaccccagtctgcagcctcgccaccgccggcgcgtgctgagggcggcgggcgcggccctgcgctcgtgcgtccgcctggccgggcgtccgcagctggcggccgcgctggctgaggaggcgctgcgcgatctgctcgccgggtggcgcgcgcctggcgccgaggctgccgtggaagtgctagcagccgtcgggccatgtttgcggccccgcgaggacgggccgctactggagcgggtggcggggaccgccgtcgccctggcgctgggcgggggcggggacggggatgaggccgggcctgccgaggacgcggcggcgctggtggccgggcgactgctgccagtgctggtccaatgtggcggggcggcgctgcgggccgtgtggggcgggctggccgcgcctggggcgtccctggggtccggccgcgtagaggagaagctgctggtcctgagcgccctggccgagaagctgttgcccgagcccggcggcgaccgcgcccgcggcgcgcgcgaggcgggcccggacgcccggcgctgctggcgcttctggaggacggtgcaggcggggctgggccaggcggacgccctgacgcgcaagcgagcgcgctacctgctgcagagggcggtggaggtgtcggcggagctgggggccgactgcacctgcgggccccaggaaggaaacggcccaagtctgttttggtggtctgagaggaaaaaagatgagcttctaaagttttgggaaaattatattttaattatggagactttagaaggaaatcagatacatgttataaagccagttttaccaaagctaaacaatctgtttgaatatgcggtgtcagaggaaaatggatgttggctctttcacccatcctggcatatgtgtatttataaaagaatgtttgaaagtgaaaacaaaatcctgtccaaagaaggtgttatccattttttggagctgtatgaaacaaagattcttccattttcaccagaattttctgagtttattattggaccattaatggatgcgctttcagagagctctctgtatagcaggtccccaggccagccaataggaagctgttctccattgggactgaaattacagaagtttttagtcacttatatttctcttcttccagaagaaataaagagtagcttcctattgaagtttattcggaagatgacaagtaggcattggtgtgctgttcccattttgtttctatctaaggctttggcaaatgtcccaagacataaggccctgggtatagatgggcttcttgctctcagggatgttattcattgcactatgatcacacatcagattctcctgagaggggcagcccaatgctaccttcttcaaacagctatgaatttgctagatgtggagaaagtgtcactttctgatgtctcaacttttctcatgtctctgagacaagaggaatccttaggacgaggaacttcattgtggacagagctgtgtgactggctacgtgttaatgaaagctattttaagccatcccctacgtgtagctccattggacttcacaagacatctttaaatgcttatgtaaagagcattgttcaagagtatgttaagtcatctgcttgggaaacaggagaaaactgctttatgcctgattggtttgaagccaagcttgtttctctgatggtcttgctggctgtggatgtggaaggaatgaagactcagtatagcggaaagcagagaacagagaatgtattgcggatattcttagaccctcttctggatgtgcttatgaagtttagtaccaatgcctacatgcccttgctgaagactgacagatgcctccagctgctgttgaagctgttgaacacatgcaggttgaaaggttccagtgcccaagatgatgaggtgtctactgttcttcagaactttttcatgtctactacagagagcatttctgaatttattctcagaagacttactatgaatgagctaaatagtgtttcagatctggatcgttgccatttatacctgatggtgttaactgagcttataaatctgcatttgaaggttgggtggaaaaggggtaaccctatctggagagttatttctcttttgaaaaatgcatccattcagcatcttcaagagatggacagtggacaggagccaacagttggaagtcagattcagagagtagtgagcatggctgccttggccatggtgtgtgaggccatagaccagaagcctgagctgcagctggactctctccatgctgggcccctggaaagcttcctttcctctcttcagctcaatcagacgctgcagaagccccacgcagaggagcagagcagttatgctcaccccttggagtgcagcagtgttttggaagaatcgtcatcttcccaaggatggggaaaaatagttgcacaatatattcatgatcaatgggtgtgcctctctttcctgttgaaaaaatatcacacccttataccaaccacagggagtgaaattctggaaccgtttctacctgccgttcagatgccaataaggactttgcagtctgcactagaagccctcacagttctttcttctgatcaagttttaccagtgttccattgcttgaaagtgttggttcccaagcttctgacttcctctgaatcactctgcatagagtcttttgacatggcgtggaaaattatatcttctttaagcaacactcagctgatattctgggctaatttaaaagcttttgttcagtttgtttttgataacaaagttcttaccattgctgccaaaatcaagggccaggcatatttcaaaataaaagagattatgtacaagataattgaaatgtctgctataaagactggagtcttcaatacactgataagttactgctgtcagtcttggatagtgtctgcttcaaatgtgtcccaaggatctttatcaagtgctaaaaattatagcgaacttatccttgaggcttgtatatttggaactgtgtttaggcgtgatcaaagacttgttcaggatgtacagaccttcatagaaaaccttggacatgactgtgcggcaaatattgttatggaaaatactaagagagaagaccattatgtgagaatttgtgctgtcaaattcctgtgtttattagatggctccaatatgtcccacaagttgtttattgaggatcttgcaatcaagctattagataaagatgaattagtgtccaagtccaaaaaacgctactatgtgaattctctacagcacagagtgaaaaaccgagtgtggcagactctgctggtacttttccctagacttgaccagaatttcttgaatggaattattgacaggattttccaggctggtttcaccaacaatcaagcatccataaaatattttatagaatggattattatattgattcttcataaattccctcaatttcttccaaagttctgggattgtttttcttatggtgaagaaaatcttaaaacaagcatttgtacgtttttagcagttttatcacatttagacattattactcaaaatattccagaaaagaaactaattctgaagcaagcccttatagttgtgctgcagtggtgtttcaatcacaattttagtgttcgactgtatgctttagttgctcttaagaaactctggactgtgtgtaaagtgttaagtgttgaagaatttgatgccctgactcctgtgattgaatccagcctccatcaagtggaaagcatgcacggagcagggaatgccaagaagaattggcaacgcattcaggagcatttcttttttgcaacatttcacccactcaaggattattgtctagagaccatattttacatccttccacgcctttcaggccttattgaagatgaatggatcaccattgataaatttaccagattcactgatgttcctttagctgcgggatttcagtggtacctttctcaaactcaacttagtaaactaaaaccaggtgactggtctcagcaagacataggtactaatttggttgaagcagataaccaagcagagtggaccgacgttcagaagaagattatcccgtggaacagtcgtgtttccgacttagacctggagctcctgtttcaggatcgtgctgccagacttggaaagtcaattagtagactcatcgttgtggcctcgctcatcgacaaaccgaccaatttaggaggactgtgcaggacctgtgaggtatttggggcttcagtgctcgttgttggcagccttcagtgtatcagcgacaaacagtttcagcacctcagtgtctctgcagaacagtggcttcctctagtggaggtaaaaccacctcagctaattgattatctgcagcagaagaaaacagaaggttataccatcattggagtggaacaaactgccaaaagtttagacctaacccaatattgctttcctgagaaatctctgctcttgttgggaaatgaacgtgagggaattccagcaaatctgatccaacagttggacgtttgtgtggaaattcctcaacagggcattatccgctccctgaatgtccatgtgagtggagccctgctgatctgggagtacaccaggcagcagctgctctcgcacggagataccaagccatgatgtgccttccttagtgaactgctgctgctgttcagacttttttaaaaaaaactatttggactaaagaaacagattctgaaatttattgtgataatttgtatttcttttttcttgcaatttaatgccaaaagtttgccatgtgccttaaacatattactatatattttcccctttaataaacactttttgttaaattgtattcttcctttaataaaatattttaagcaattgtggaaataaaacaatggattttttaagaaaaaaaaaaaaaaaaaaaaaaatgannnnnnnnnnnnnnnnnnnnnnnnn

SEQ ID NO: 22978 - DNA, 843 bp, Homo sapiens; identical to SEQ ID NO: 22902
  misc_feature 1, 2, 3, 4, 5, 6, 7, 8, 9, 10, 11, 12, 843: n = A,T,C or G

SEQ ID NO: 22979 - DNA, 1002 bp, Homo sapiens
  misc_feature 1, 1002: n = A,T,C or G
ngtgtgctgttttttgtcggtgtcgcccgctgcgtgctcccttgttgtgtttctcttgtgtcccataactgtggctttatgcccgagtgcattggggcttacccggctttgtttccactgcagcgccctgttagcgtgtaccatttgaaaattatttatttaataatacagatcgttttaatgtgctgtaaatatttctcgcacagcatcatattgtcagaagtttttcccttttggaggcttcttttttccattcctttccagtaactggcctcccaatgccagcaactcaggtagattcatgcagtcattcctcttctctctgtactggtaagcgctctggaggaagaacagattccaatttctgccagcgctctgggggccacaggatatgtgtggcatgggcatgcagaagtcctagggaaaccggcccaaaagaattactgtcaaaactgtgtccatgatgatcaccttcaacccagatgtgaccacgggggactttgacataccggtttttgtgtcctatggttctgacaatatctccttcaagagcaatcactctcttaatgatcttctgttctgggtttttaggagacaccaatgatacaatgtcaccacggtgtacttcaaaattcctcactttccagtggttcaaaagcaccacatcagatgactggctccccccaggattcaaagaaggctgcatcgatgctccttctactcttgccacacaggcgacccgatccaagaaagtcactgccacaggcaccgccacaaagaagcctttacaaaaggccttgatgtatcttttcacccacccttgtgactgtgccataccctttctcccgctcttcctcggtgagaaggggtaagtggttattttgtgccctcgcccaatttggccaaaccccgctgcgcagcgctcagcccgggggaaagtccccgcggcagaccccccccgcgtaccttggccgctctagaactaatgggatcccccgggcn

SEQ ID NO: 22980 - DNA, 2065 bp, Homo sapiens; identical to SEQ ID NO: 22607
  misc_feature 2064, 2065: n = A,T,C or G

SEQ ID NO: 22981 - DNA, 369 bp, Homo sapiens; identical to SEQ ID NO: 21651
  misc_feature 1, 2, 3, 4, 5, 6, 7, 8: n = A,T,C or G

SEQ ID NO: 22982 - DNA, 2071 bp, Homo sapiens; identical to SEQ ID NO: 21824

SEQ ID NO: 22983 - DNA, 841 bp, Homo sapiens
  misc_feature 203, 204, 205, 206, 207, 208, 209, 210, 211, 212, 213, 214,215, 216, 217, 218, 219, 220, 221, 222, 223, 224, 225, 226,227, 228, 229, 230, 231, 232, 233, 234, 235, 236, 237: n = A,T,C or G
actcttttacattcccaccagcagtgtatgagagttccagatgttcctttctctttagttcttggtattgtcagtctttttaaatttagccattgattagatgtgtatttgtatctcattatgattttaatttgtgttttactgatggatgatgttgagtatcttttcatgggcttattgaccaaaaatgagtgagactccannnnnnnnnnnnnnnnnnnnnnnnnnnnnnnnnnngcgcggggctcttcctgctctccatcatggcgcaggatcaaggtgaaaaggagaaccccatgcgggaacttcgcatccgcaaactctgtctcaacatctgtgttggggagagtggagacagactgacgcgagcagccaaggtgttggagcagctcacagggcagacccctgtgttttccaaagctagatacactgtcagatcctttggcatccggagaaatgaaaagattgctgtccactgcacagttcgaggggccaaggcagaagaaatcttggagaagggtctaaaggtgcgggagtatgagttaagaaaaaacaacttctcagatactggaaactttggttttgggatccaggaacacatcgatctgggcatcaaatatgacccaagcattggtatctacggcctggacttctatgtggtgctgggtaggccaggtttcagcatcgcagacaagaagcgcaggacaggctgcattgggggccaaacacagaatcagcaaagggggggccatgggctggttccagcagaagtatgatgggatcatccttcctggcgaataaattcccgtttttatccaaaagagcaataaaaagttttcag

SEQ ID NO: 22984 - DNA, 618 bp, Homo sapiens
cgcggtggcggccgaggtactgcagccgcctcaatatccccttccccttcattgtcttcgcttacttctacatggtggtgaagaagtgcttcaagtgttgctgcaaggagaaaaacatggagtcttctgtctgctgtttcaaaaatgaagacaatgagactctggcatgggagggtgtcatgaaggaaaactaccttgtcaagatcaacacaaaagccaacgacacctcagaggaaatgaggcatcgatttagacaactggatacaaagcttaatgatctcaagggtcttctgaaagagattgctaataaaatcaaataaaactgtatgaactctaatggagaaaaatctaattatagcaagatcatattaaggaatgctgatgaacaattttgctatcgactactaaatgagagattttcagacccctgggtacccacggcagagttccaagacaggatatcgggtgcatctgagaaagacatcgtgcactctggcttggcatacacaatggagcgttctgccaggcaaattatgcgcacagccatgaagtataacctgggattggacctgagaacagctgcctatgttaatgccattgagaaagtcttcaaagtgt

SEQ ID NO: 22985 - DNA, 4587 bp, Homo sapiens
  misc_feature 1, 2, 3, 4, 5, 4567, 4568, 4569, 4570, 4571, 4572, 4573,4574, 4575, 4576, 4577, 4578, 4579, 4580, 4581, 4582, 4583,4584, 4585, 4586, 4587: n = A,T,C or G
nnnnnccccccctcgaggtacttctagaattaattaacgcgggggccattctggggttcgtttagaggtttgaattttctcggagaaagacaggccggccacgaggaaaacagaaacaagccgcagcaacatctaagcccttgaaaggatcctgagagaggggggaaagggaaaacagcagccaccagcccaaccacttgtgtcttctgccccttcccacctatcttgcccaccccaccagcccacgctgcttgggacttgaaatctgtggccgaaggaccgtcactacataacttcaaaaataatcaaccaccctcccttcccaaaccacccaaattcactcatccagcgtttacttttttgaatccactcagaacttttttctgcgacccccctccctaaatggagttgggtgggggggaaatgaatactgagttggcctttattttttaaaagactttttgatccaatgaggccccctaaataattgagttttgggtcctggttggttgttttattttttttcctccaaaattttaccccctcccccctgagcccgaggtgctgacgtcgcaaaaaaattggataaaaccaccatcatgggttcgggtcccatagaccccaaagaacttctcaagggcctggacagcttccttaaccgagatggggaagtcaaaagtgtggatgggatttccaagatcttcagtttgatgaaggaagcacgaaagatggtgagtcgatgcacttacttgaacattctcctgcagacccgttcaccagaaatattggtcaaatttattgacgttggcggctacaaacttcttaacaattggctgacgtattcaaagacaaccaacaacattcccctcctccagcaaattctactgaccctgcagcatctaccgctcactgtagaccatctcaagcagaacaacacagctaaactggtgaagcagctgagcaagtcaagtgaggatgaagagctccggaaattggcctcagtccttgtcagcgactggatggctgtcatccgctctcagagcagtacccagcctgctgagaaagataagaagaaacgtaaagatgaaggaaaaagtcgaactacccttcctgagcgacctttgacagaggtgaaggctgagacccgggctgaggaggccccagagaagaagagggagaagcccaagtctcttcgcaccacagcacccagtcatgccaagttccgttccactggactagagctggagacaccatccttggtgcctgtgaagaagaatgccagcacagtggtggtttctgacaagtacaaccttaaacccatccccctcaaacgtcagagcaacgtagctgctccaggagatgccactccccctgcagagaagaaatacaagccactcaacacaacacctaatgccaccaaagagatcaaagtgaagatcatcccgccacagcctatggagggcctgggctttctggatgctcttaattcagcccctgttccaggcatcaaaattaagaagaaaaaaaaagtactgtcacctacggctgccaagccaagcccctttgaagggaaaacgagcacagaaccaagcacagccaaaccttcttccccagaaccagcaccaccttctgaggcaatggacgcagaccgtccaggcaccccggttccccctgttgaagtcccggagctcatggatacagcctctttggagccaggagctctggatgccaagccagtggagagtcctggagatcctaaccaactgacccggaaaggcaggaagaggaaaagtgtgacatggcctgaggaaggcaaactgagagaatatttctattttgaattggatgaaactgaacgagtaaatgtgaataagatcaaggactttggtgaggcggctaagcgagagatactgtcagaccgacatgcatttgagacagcgcggcgtctgagccatgataacatggaggagaaggtgccctgggtgtgcccccggcccctggttctgccctcacctcttgtcacccctggaagcaatagtcaggagcgatatatccaggctgagcgggagaagggaatccttcaggagctcttcctgaacaaggagagtcctcatgagcctgatcctgagccctacgagcccataccccctaaactcatccccctagatgaggagtgttccatggatgagactccgtatgttgagactctggaacctggggggtcaggtggctcacctgatggggcaggaggctccaagttgcctccagttctggccaatcttatgggaagcatgggtgctggaaagggcccccaaggccctggaggaggaggcattaatgtccaagagatcctcacctccatcatgggtagcccaaacagtcatccttcagaggaactactgaaacaaccagactattcggacaagatcaagcagatgctggtgccacatggactcctaggccctggcccaatagccaatggtttcccaccagggggtcctgggggccccaagggcatgcagcactttccccctggacctgggggacctatgccaggtccccatggaggccctggtgggccagtgggtccacgtcttctgggtcctccaccccctccccggggaggtgatcccttctgggatggcccgggcgaccctatgcggggtggcccaatgcgggggggtccaggaccaggtcctggaccataccatagaggccgaggtggccgaggaggaaacgaacctcctcctcctcctcctccattccgaggcgccagaggaggtcgctctggaggaggacccccaaatggacgagggggccctggtgggggcatggttggaggtggtgggcatcgtcctcacgaaggccctggtgggggcatgggcaacagcagtggacatcgtccccacgaaggccctggcggtggcatgggaagtgggcatcgcccccatgaaggccctggtggtagcatgggtgggggtggaggacatcgtccccacgaaggccctggcggtggcatcagtggtggcagtggccatcgtccccatgaaggccctggcggaggaatgggtgccggtggtggacatcgcccccacgaaggccctggcggaagcatgggtggaagtggtggacatcgtccccatgaaggccctggacacggggggccccatggccaccggcttcatgatgtccctggtcaccgaggccatgaccatcgagggccgccacctcatgagcaccgtggccatgatggtcctggccacgggggagggggccaccgagggcacgatggaggccacagccatggaggagacatgtcaaaccgccctgtctgccgacatttcatgatgaagggcaactgccgctatgagaacaactgtgccttctaccacccgggtgtcaatgggccccccctgccctagggaccatttgcctgccctgttcacacaacccctgtggactgcagcctcgctctttccaccctgttatggcttctgtgaggcccattttcccttttccccagctgatgaggagccggccccctcagttcccacttgcttgggttcctgggggttttctgatcactggtgcgcattgatgtacatattttcctccagtctggggaggagagagactggaaacgttcctggactgctgaagaggagacccagttggcttcactttttgagaagattcgccctgtaccccaaacccctttccagtattacccttaatgcttgagaacctaaagctggttatcctggcgaacacccctacccttctattgcgggtccccacatgcacacagaactctgacacaggatcagctgcacttaagaaatcatcccagctaagttcattattcctcatggggtggggagatgctgaaaggggtattgtatatcccactgcactgagagggctcaatcagctggatttgagttctggaacacacatcatccccacccctcccccagcgtgggctcaccattcttagtcctttctcaagtgggaccttcaactttctgtgaacacccagtctgcgtcctgggtctgctaggttcgatgatggcgaactcgtatctgcatccggtgcaagttttagctggcagaggtgagaccggtggtgctggtctgcctttgccaactatagccagtctggagacttgataaaatacttcagtgagaccagcttctcatcaacttgggcccggcgtgctgggcctgaaagtcacactacatgcactgcctttgggagtcagctcactccctgctcccacctggaaccttgccagcgtgaaggaggcttccaggtacttcaccctgtcaaccacctctgaatccccaccaggcgccttcctgggtggattcaacaagatgattttgccctttcccagttctctccttcactttggcatcagttgttttctatgaaaacagtggattggttgggttttgtgcagggtcttgggttagagccaaaatggatttgaggatgagtatttttttttttggttttgtatattttgtacattaataataaacagtggaaagagaagcagcttannnnnnnnnnnnnnnnnnnnn

SEQ ID NO: 22986 - DNA, 1251 bp, Homo sapiens
  misc_feature 1, 2, 1225, 1226, 1227, 1228, 1229, 1230, 1231, 1232, 1233,1234, 1235, 1236, 1237, 1238, 1239, 1240, 1241, 1242, 1243,1244, 1245, 1246, 1247, 1248, 1249, 1250, 1251: n = A,T,C or G
nnacccacgtgtccggtcactgcgcccggccaggctaaactgtttcaaaaaaaaaaaaaaaaaaaattaggattccaaagaaaaaaaatacatcacctgcagatggtgaagagagaaaggaagctttttctctaaaaatggtgcagctatcctctgaaccaatttccttcggtttaatgtacctgtatcttggggtttttttccacttaatttatcctggagctctttccataacaacacttggaaagcactctcatccttttttcactgctgaacagaattccactgtgtggatggaacatactctatttcaccagtcccctgtagccagtcacttggtttgtttccaatcttttgctttttcagagtaataaccttgtatgtctatcattttgtatgcatacaggtttatatgtaggaaaaattcctagagtaggattgctggaccaatggataaaagtatattgtggacagacaatgccaaattgcctttcagagactgtggccctgtgcaccccatcaggcatgtgtgactaccaaagctcctgtcagctgttttattttatctcctttccagtctcaggctcaatgcagaactttgaggtaagcttttctaaaatgtaggctcctaaacgccacagccagctctgccacatgaaggagagctcaaatgagacagaaacagcctctgggcaggatttctatcctgcacagatatattttccacattctgggaaaccgtgaagcttccagagccacaattccccagaaacacatccccctgtggtacagccaagccccagaacaagctgtgcttgcctggcaccttaaagccaagcaccatggatgccacttgccatgggtgcctgcaatttcaaataatgagaaataagaaatttcagcttctcagccctctagccacatttcaggtgcatgacagcctcagtggcaagcagctactctgccggacagggcagaagatggaacaccccatccctggggaagatcccgaggtcaggagatcaagaccatcctggctgacacgttgaagccccgtctctactgaaaatacaaaacattggctgggtgtggtggcaggcacctgtagtcccagctactcaggaggctgaggcgggagaatggcgtgaacctgggaggtggaggttgcagtgagccaagattgcgccactgcactccagcctggcaacagagtaagactccatannnnnnnnnnnnnnnnnnnnnnnnnnn

SEQ ID NO: 22987 - DNA, 915 bp, Homo sapiens
  misc_feature 1, 2, 3, 4, 5, 6, 7, 8, 9, 10, 11, 12, 13, 14, 15, 16, 17,18, 19, 20, 21, 22, 23, 24, 25, 26, 27, 28, 29, 30, 891,892, 893, 894, 895, 896, 897, 898, 899, 900, 901, 902, 903,904, 905, 906, 907, 908, 909, 910, 911, 912, 913, 914: n = A,T,C or G
  misc_feature 915: n = A,T,C or G
nnnnnnnnnnnnnnnnnnnnnnnnnnnnnnaaaagaattgactcgcgccctcgtccgccgacataggccagtgccggggtttaagggccaggaaaggaagcattcagggaatttaggtgtagccagaagaaaatcaggtcctggctccccagaagcaagagagttcaagtgaaggaaggaggaggttcctggatgtggatgtcatcatttctgggaacactcttaaatggagactcagatttcttagccaaaatttagggaggatccagaagaaaccaaagacgaagcatcccagttcttgggtatttcctgaaacagaagaaaatgacaaaggcccaggaatcactgaccctggaggatgtggctgtggacttcacctgggaggagtggcagttcctgagccctgctcagaaggacctgtaccgggatgtgatgttggagaactacagcaaccttgtgtcagtggggtatcaagccggcaaacctgatgccctcaccaagttggaacaaggagaaccactatggacactagaagatgaaatccacagtccagcccacccagaaattgagaaagctgatgatcatctgcagcagcccttgcaaaaccaaaaaatactgaagaggacgggacaacgctatgaacacggaagaactttgaaatcatatttaggtttaaccaaccagagcagaagataacaacagaaaggagcctgctgagtttaatggagatggagcttttctccatgataatcatgaacaaatgcctacggaaattgaattccctgaagtgaaaacacaacacaggtcaaatcttaacaagaaacaacaacaggaaagccagagatgaggggaaaatccagagcccacccggacacacaaaagaaaaccccnnnnnnnnnnnnnnnnnnnnnnnnn

SEQ ID NO: 22988 - DNA, 1262 bp, Homo sapiens; identical to SEQ ID NO: 21868
  misc_feature 1, 2, 1261, 1262: n = A,T,C or G

SEQ ID NO: 22989 - DNA, 816 bp, Homo sapiens; identical to SEQ ID NO: 21390

SEQ ID NO: 22990 - DNA, 594 bp, Homo sapiens; identical to SEQ ID NO: 20919
  misc_feature 1, 593, 594: n = A,T,C or G

SEQ ID NO: 22991 - DNA, 741 bp, Homo sapiens; identical to SEQ ID NO: 21831

SEQ ID NO: 22992 - DNA, 2827 bp, Homo sapiens
  misc_feature 2822, 2823, 2824, 2825, 2826, 2827: n = A,T,C or G
agggagtcgacccacgcgtccgaccgggagtttttgctcttgttgcccaggctggagtgcagtggcacaatctcggctcaccaccacctccgcctcccgggttcaagcgattctcccgcctcagcctcagaagttgctggaattacaggtattttttctaaatgtgagatcaaggaattaccaccaaaaaaggagagtaatacaggagaaatattccagacagtaatgttggaaagacatgaaagccacgacatacaagatttttgcttcagagaaacccagaaaaatgtacatgactctcagtgtctgtggaaacatgattgaagacattataagcgagtgcgtgtgacctataaggaaagtctcattggtagaagagacatgcatggtagaaaggatgatgcacaaaagcagcctgttaaaaatcagcttggattaaacccgcagtcacatctaccagaactgcagctatttcaagctgaagggaaaatatataaatatgatcacatggaaaaatctgtcaacagtagttccttagtttccccaccccaacgtatttcttctactgtcaaaacccacatttctcatacatatgaatgtaattttgtggattcattattcacacaaaaagagaaagcaaatattgggacagaacactacaaatgtaatgagcgtggcaaggcctttcatcaaggcttacattttactatacatcaaataatccatactaaagagacgcaatttaaatgtgatatatgtggcaagatcttcaataaaaaatcaaaccttgcaagtcatcaaagaattcatactggagagaagccatataaatgtaatgaatgtggcaaggtcttccataatatgtcacaccttgcacagcatcgcaggattcatactggagagaaaccatataaatgtaatgaatgtggcaaggtctttaatcaaatttcacaccttgcacaacatcaaagaattcataccggagagaaaccttataaatgtaatgaatgtggaaaggtcttccatcaaatttcacaccttgcacaacatcggacaattcatactggagaaaaaccttacgaatgtaacaaatgtggcaaggtgttcagtcgcaattcctaccttgtacaacatctgatcattcatactggagagaaaccttacagatgtaatgtatgtggcaaggtcttcagtcacaagtcatccctagtaaatcactggagaattcatactggagagaaaccttacaaatgtaatgagtgtggcaaggtcttcagtcacaagtcatccctagtaaatcactggagaatccacactggagagaaaccttacaaatgtaatgaatgtggcaaggtcttcagtcgcaattcataccttgcccaacatctgataattcatgccggtgagaaaccttataagtgtgatgaatgtgacaaagcattcagtcaaaattcacatcttgtacaacatcacagaatccatactggagagaaaccttacaaatgtgatgaatgtggcaaagtcttcagtcaaaattcataccttgcatatcattggagaattcatactggagaaaaagcttataaatgtaatgaatgtgggaaggtcttcggtctaaactcatccctagcacatcatcggaaaattcacactggagagaaacctttcaaatgtaatgaatgtggcaaagcttttagtatgcgttcaagcctcactaatcatcatgcgatccacactggagagaaacatttcaaatgtaatgaatgtggcaaactcttccgcgacaattcatatcttgtacgtcatcagagatttcatgccggaaagaaatctaacacatgtaattaatgtggcagagtgttcagttagcattaaagccttgtaagacatacaataatttatactggagaaaaactttgcaagtataatgaatgtagcagagcctttagtttttgttcaaggcttaataaccgttagctagaccatagaggacagaaactttactaatgtactgaatgtggcaaggtcttaaggtaaaatctgagaccaggatttttcaaagaattcttgctggtgagaaacctaacaaatgtaatgaatgtggcaaggtcttctggcacaattctcacattgtacaatattgcaaaaattcatgcttgagagaaacaaaaacactgagagtgggaaaccattatgacttcaaacattcatcaacatcagagaatccatactaaagagcatttataataattatatgtgatagagattttccgcaggccaaagtctcactaggcatcaaaaacttttttgatgaaaccatacaaatgtaacgtgcatgcttaagcttttacccaggcatcaaaaccggaacatcacagggtttatactggagagtaactacacaaagataatgtaataagcctttcagtgtaatattcatgattttgtcgtgagagatccactcaataaaaaccaggcaaatgtagaaaaaaaaaaaaaaaaaaaaaaaaaaaaaaaaaaaaaaaaaaaaaaaaaaaaaaaaaaaaaaaaaaaaaaaaaaaaaaaaaaaaaaaaaaaaaaaaaaaaaaaaaaaaaaaaaaaaaaaaaaaaaaaaaaaggggcccccccccggggggaacaacaaaaacccccttaaagggggtttttttcccccccctctgggctcggggaaaaaacccggtagaggggaaaaaccccgggttccccccatttaaccgggtgaaagaaaaaaggattttgagaaggtggataaaaaagaaaaagccccccccaaaaccccctctccaaattggccccccccnnnnnn

SEQ ID NO: 22993 - DNA, 1112 bp, Homo sapiens
  misc_feature 1, 2, 10, 1111, 1112: n = A,T,C or G
nnagcggccnatacggcgcctactactactactatgctgcgagaagacgacagaagggtcgatgtcgacggtatcgataagttttttttttttttattttttttctcgagagacagggtcttgctctgtcacccaggcacagcttactgcagccttgaactcctgggatcaatcagtcctcctgcctcagcctcccgagtagctaagactaacaggtatgtaccaccatgcctggtttattgttttatttttttggcagagatgggtctcactgtgttgcccaggctgatctcaaactcctggcctcaagcgatcctcccatctcagcctcccaaagtgctgggattacagacctgagccaccacacctgggcaacagagtgaaacctgtccctgttttcctgctcttactctcacctctgaggcctcctctgcctggaagagattacagggaaattccaggcagcccttgtcaattgtttttatgaattctttacctgttccttttaaagacaaggaaactgaggcccaaagttctaagttgtttggcaaatggagtctcctaccctcagctcctgcaaggacctgggggacccccaggtccagcagccacatgattctgcagcagacagggacctagagcacatctggatctcagccccacccctggcaacctgcctgcctagagaactcccaagatgacagactaagtaggattctgccatttagaataattctggtatcctgggcgttgcgttaagttgcttaactttcattctgtcttacgatagtcttcagaggtgggaacagatgaagaaaccatgccccagagaaggttaagtgacttcctctttatggagccagtgttccaacctaggtttgcctgataccagacctgtggccccacctcccatgcaggtctctgtggggtctttgggatggatctcctagggctgggctggaagcctctgtctgttgtctctagtaaccaccctgaagagaaggggtggcatcaggaaccgcggaccgcagctttgtccgggcgccttccgtattgtgcccatctggtgggcttaaccctcccacccggagcgcatcataaaacaccgaann

SEQ ID NO: 22994 - DNA, 714 bp, Homo sapiens
  misc_feature 713, 714: n = A,T,C or G
cgtccgcttttaaaattttagtaaaaaactatattggaaaggatggtttattcattgcattttttttttctatatcagaagttaggtatcttactcagattcattgttaaatattgtcccttgaagaccacacattctgtatgtcactcctggctacagtaactcagttggtttgcatccttagggaggtgctgtgtctgaagtgaagatgtgatgacccatccgtggaggactgtcactgccttggcatctgacagacaccggcctgtcatttggggcatggattttctttcgactttttatacttattcatgtcaatatacatgtttctaaatgtcagcatataaaagttttggaacacattttattaggctgaattatatactaccatttttgatttacagaaacattcatttcatacagttcaagctaactttttacttgctatgttagaaagcagagatatttaggaatttggcacttctgggtttttcagtgtaggtctctagggagataggctggaatacacctgtgaagatgaagtctgcctactggggactggtctgtattcctgacaccagggctgccagaggtgaagggcaagtttttgttgtgaaagcaccagtaaatgaccagagcagggaaatctcagttgacagaaaagtggacattgcctgaaatgggaagatattaaagttttggattgtatatgnn

SEQ ID NO: 22995 - DNA, 666 bp, Homo sapiens; identical to SEQ ID NO: 21473

SEQ ID NO: 22996 - DNA, 1577 bp, Homo sapiens
  misc_feature 1, 2, 1560, 1561, 1562, 1563, 1564, 1565, 1566, 1567, 1568,1569, 1570, 1571, 1572, 1573, 1574, 1575, 1576, 1577: n = A,T,C or G
nncgtccggcccccgtcgttcccgcggcgccgcgccgcgctggctcctcagcttccagccaaaatggcggagaacagcgagagtctgggcaccgtccccgagcacgagcggatcttgcaggagatcgagagcaccgacaccgcctgtgtggggcccaccctccggtctgtgtatgatgaccaaccaaatgcgcacaagaagtttatggaaaagttagatgcttgtatccgtaatcatgacaaggaaattgaaaagatgtgtaattttcatcatcagggttttgtagatgctattacagaactccttaaagtaaggactgatgcagaaaaactgaaggtgcaagttactgataccaaccgaaggtttcaagatgctggaaaagaggtgatagtccacacagaagatatcattcgatgtagaattcagcagagaaatattacaactgtagtagaaaaattgcagttatgccttcctgtgctagaaatgtacagtaagctgaaagaacagatgagtgccaaaaggtactattctgccctaaaaactatggaacaattagagaatgtgtactttccctgggttagtcaataccggttttgtcagctcatgatagaaaatcttcccaaactccgtgaggatattaaagaaatctccatgtctgatctcaaagactttttggaaagtattcgaaaacattctgacaaaataggtgaaacagcaatgaaacaggcacagcatcagaaaaccttcagtgtttctctgcagaaacaaaataaaatgaaatttgggaaaaatatgtatataaatcgtgatagaattccagaggaaaggaatgaaactgtattgaaacattcacttgaagaagaggatgagaatgaagaagagatcttaactgttcaggatcttgttgatttttcccctgtttatcgatgtttgcacatttattctgttttgggtgacgaggaaacatttgaaaactattatcgaaaacaaagaaagaaacaagcaagactggtattgcaaccccagtcgaatatgcatgaaacagttgatggctatagaagatatttcactcaaattgtagggttctttgtggtagaagatcacattttacatgtgacccaaggattagtaaccagggcatacactgatgaactttggaacatggccctctcaaagataattgctgtccttagagctcattcatcctattgcactgatcctgatcttgttctggagctgaagaatcttattgtaatatttgcagatactttacagggttatggttttccagtgaaaccgacttttttgaccttttatttgaaataagaggaccaatagcaatgaaacactgcgttaagaaatgggcggggtttcacggacacttttcagagacgatattacacggccctaccggtgtcaggagaagaatattaaattggctccagcattctttaaatacaaacattaaagaggttcaaaaattccagtaaaagagagcgcatttaataataattatacgcctatttcaataaaacaggaaaaaaaaagtgaaacacagannnnnnnnnnnnnnnnnn

SEQ ID NO: 22997 - DNA, 2569 bp, Homo sapiens; identical to SEQ ID NO: 21300
  misc_feature 2557, 2558, 2559, 2560, 2561, 2562, 2563, 2564, 2565, 2566,2567, 2568, 2569: n = A,T,C or G

SEQ ID NO: 22998 - DNA, 551 bp, Homo sapiens
  misc_feature 1, 23, 539, 551: n = A,T,C or G
ncaggtagtctgcctgcctttgncatcccacagtgctgggattacagccgtgagccaccatgcctggccttttttttttctttaaactaaagacttaactgtttttttccgtatctcctcagccccatgttttagactattttaccccaaaattgtatttattaatttggctttcccatttgaaaaaacaaattgatcttagcatggtggctagcttgaggcagtctttactgagccagtataattttagctaacacagttgtgtctcatgtgaaagtatgattttctttaggttttttttttttaattgaaagtaactcgtgaattctctttattatctcttctaagggcttgaggatatcatgttatccctgggatgagatatccttcccaggcctaacattctgatttaacaacactttcactaaagcctttggccccacctttggctccggtgcattaatatattgagctatatgattaaaattgaactattttatcctagatgggaaagtatcagatgggaattccgtttaggncataattaaacn

SEQ ID NO: 22999 - DNA, 1465 bp, Homo sapiens
  misc_feature 1, 2, 3, 4, 5, 6, 7, 8, 9, 10, 11, 12, 13, 14, 15, 16, 17,1464, 1465: n = A,T,C or G
nnnnnnnnnnnnnnnnnaaagcatttaattcttaccacagtcctttgacatcttattatctccattttacagataaagaaacaggcacagagggtttaagtaactttccacaaggtcacacaatcacaactagtaaagccagaattaaagtccagtcggtctgcattcaaagcctgtgctcctgccccaaagtgacaattagtgacttaaaggcaagaaaaacagaccctcctctacccaccatcctcatacacagccttccagcccaggatctgaaccatttattcattttctctcatattcattcattcattcaattcttcatccacatttagtgaagctctgccgtggaatgttcacacagaaggtacaaaaatgaggcaggtgtattttctcccatctaacaggcagcgcccgccaccctgtgggcgccccttgggggcccccttgtgggccccccccctgggggactatgcctctgagagacattttgtttcttcccttcttgagccccaccacaacccagaattcatgtgtccaggtgtcggggaaaaactcgtgttgtactgaaagtggaccagtgttaccctgaagctaccagacccataactcttcttcacagggagctcctgccagccccctacagaaaatgaattgcttgaaatttcgtggatttgcaataaccagaccttcttccatctaaaccctttcccttgtgtagtgtcttgtgtaaccagtataaaagttctataaactgtagttacttatgttatcccaaacacagtaacaatatacttcatcctagggttggcagtttctctgagtgttttgtttaattatcattattatatctgcaggattccaaagcgcccataaattcattgccaagtgcaatgtccagacgaatatttcctaggttttcttccaggatttttatagtcagaggatgtaatcttatgccaacgggtcttaataatcaaatgactccacagtgagaatcattactctgaaaaattgattttgttagaatgatggaaatttaaatatttgaaagtaaaaacacatgccacctttttcctagaactctgcaaggcaaattgctgtaagacaggcagaggaagcacaatatatatatatatccaaaatataatttgcagtgaaataaatgaaagcaaattataaataaacttacctgattttacaaactaacctttaaagggatttctactaatttttctattgcctgaattgccctttcttctagatccaatttatatttttgtacttcaccaatgtgtcttcaccattgtgcagtttccatgttttttaagatttaatattacttcttccaacatctttttatcctcctccagttttttatattctggttgtacttttttcatagataataactcctgttgaataacttcttcttagtcaaatagacatattttgaagatacann

SEQ ID NO: 23000 - DNA, 707 bp, Homo sapiens; identical to SEQ ID NO: 20542

SEQ ID NO: 23001 - DNA, 1219 bp, Homo sapiens
  misc_feature 1219: n = A,T,C or G
acgcgggggttcctcttggtaggtgcttctctcccagactaaaatctgattctcagcacaaatctcgccttctatttactcagctattcctcctctttagaaacaaaagaaattagtggatgctgggcttcagaaactcctgaccatggatccaaccaagagaattacctcggagcaagctctgcaggatccctattttcaggaggaccctttgccaacattagatgtatttgccggctgccagattccataccccaaacgagaattccttaatgaagatgatcctgaagaaaaaggtgacaagaatcagcaacagcagcagaaccagcatcagcagcccacagcccctccacagcaggcagcagcccctccacaggcgcccccaccacagcagaacagcacccagaccaacgggaccgcaggtggggctggggccggggtcgggggcaccggagcagggttgcagcacagccaggactccagcctgaaccaggtgcctccaaacaagaagccacggctagggccttcaggcgcaaactcaggtggacctgtgatgccctcggattatcagcactccagttctcgcctgaattaccaaagcagcgttcagggatcctctcagtcccagagcacacttggctactcttcctcgtctcagcagagctcacagtaccacccatctcaccaggcccaccggtactgaccagctcccgttgggccaggccagcccagcccagagcacaggctccagcaatatgtctgcattgaaaagaaccaaaaaaatgcaaactatgatgccatttaaaactcatacacatgggaggaaaaccttatatactgagcattgtgcaggactgatagctcttctttattgacttaaagaagattcttgtgaagtttccccagcaccccttccctgcatgtgttccattgtgacttctctgataaagcgtctgatctaatcccagcacttctgtaaccttcagcatttctttgaaggatttcctggtgcacctttctcatgctgtagcaatcactatggtttatcttttcaaagctcttttaataggattttaatgttctagaaacaggattccagtggtgtatagttttatacttcatgaactgatttagcaacacaggtaaaaatgcaccttttaaagcactacgttttcacagacaataactgttctgctcatggaagtcttaaacagaaacn

SEQ ID NO: 23002 - DNA, 2884 bp, Homo sapiens; identical to SEQ ID NO: 22866
  misc_feature 1, 2, 3, 4, 5, 6, 7, 9, 2879, 2880, 2881, 2882, 2883, 2884: n = A,T,C or G

SEQ ID NO: 23003 - DNA, 436 bp, Homo sapiens
  misc_feature 1, 2, 3, 4, 5, 6, 7, 8, 9, 10, 11: n = A,T,C or G
nnnnnnnnnnncgtgccgaggtaccccaccatacaagccaaggaagcttcagggggggcaacctggatcatagccacggtcttggcttctctcacttttcccctggttttggtcctcacttccagttctccaaaatctacctgtgtcctgactctggctgtgattctactctaagtgccatacacatccctttcaccactgacggaggttgcttccctggttgtgacattcagcattctctactgcagggcttctcaaccttggcactattggcatttgggtctgggtaatgctttgctgtggcaactgtcctgtgcattgtaagatgttaagcagcatccctgacctctgtctactagatgccagtaacaccccatcattgtcaaatgtctcctggggcacaatgtggcacctggttgataaacactgatctact

SEQ ID NO: 23004 - DNA, 3266 bp, Homo sapiens
  misc_feature 1, 2, 3266: n = A,T,C or G
nngtcgccattgtgacccgagaatttaatatacttgtgccccgcgcgtgttttgttaaccgtccgcccgagtgtcccctcaatttctacccctcgccccttaacccaaagctaaatccaccatctggtattctcccctagagcaccagatgaccatctgaagctggacaagtgtctctaacaataaaacattactgtttacaaaacaaaaagcacaaacataattatggaataaataaaaaacaagggacaaacagccaactgactctacccacttggtgagaagtgatatacttcaactatttttttaatgcttctgaaagtttcttggcccacagaggactagggtgcaatcattccctgtgttagtgagttgggtttaatgcagcttcaaaattagggtaaagggacttggtgaaatgtttacattaaatatttcactcctacccattcttcaggaaaaaaggtgagctcagcaaggctggatgccattaagagatatttactgttttctttttctatagctaaaaaagcaaactttacacgaagaagctcttgattaaggaaatttcaatagattcatatttataaaattttaaacatttggcacagcaaaatttggaaaaaatgggggagaaaaaataggtctggttgttgtccccctttttccacctgctgctggacagtgatgagatgctcacagaagaaaaaggcctggctttgtaccaggctggcgacaggtgctaccaggagtgggctgaggggagaaaaactatctcccactcttttggcccaggcaatgtcaacgacttccacattccctggcccacttcctgagcaaccccaggttcggctctgtataaggaccctcccctcccaaccccaaccccagagtgcagtgcaaatcaaccaacaatttactggtggaatggcaatcaaaggaaacagttaaacaccaaacaatttcttaaagccaaaaaatatttttcatggagttgaacatttttcgagtgtgtttttttcaagtgtaaaagcagtgacattttgttcaaacagaagcagcatctaggaattctggcacttgggttctagggggttacaggtatgcatcatggattcttctccctcgtatttaaaaaggcctcgtgtttctattcctgagttcataccaacacctgctagctctcccctctagcggacagtgggtggccagccagcctccctggttagattgggcaatgccaagcagacatccctcattcacctgctgggcttgctttctgattcagaggtaagtcgaagtgcagagaaagaaacttacaaaagcacaaccaccaaaggcagcctgaacggggagccctgtgcagactgagttgctggagactaccctctcagtcccattcctggggaaaggtaggtcactcatggaatttgaatcaaacatgggggaggacacctgccaagcaatagtatgatggactcaagtcatcccaggccatctactgtctccctcacctgccctaaccttttctgagtccctccctctcttgtgcaagcactgtagtttaaaaaggaaaaaacaccccccaccattaaaagacaaccttcaaatgttactcagtatataaagtttgcttaggctaaggtggagtcagaaatgtctctaattgtagacaccatctctgtgccacccttcctctcatcggatatggagtgatttcttctctcgctgctgcgacgcagatctgagccacagtcaggtaccaatgtacacgacataggcacatgtgcaaacacaaagaaggtgggctgctgcttctttctctctgcccctagtccaggctcctttgcttcacgtaagattaacactttcccattcctctgaagttgctggaaggacatttcccaggaagaaacaattcctcactgcctataaactgtagtctcatgtgggatagtcaattgaacatgagaatcagaacaatctgggcaaatgggtatggcaagaatgggaacaccacaacaggacagatgccaactctcattcatgccaggccttttggcatctgggtgccttctgtgtcttctttccacctcttccttcagtctcaacatccacttgtacccccagctacctcccatgtttccaggtatcattggctcttaactcccacaagcctgccttttggctacccatcccaacaatatcaagagggaatgactaagtatcagctagaaacttagccatgtctcaacattcctggattatctgaaaagctgtcgatgcccttttacaggtttatggtgacagacccgtatcatcttaaagtatgttcatagttaaggcttgacttaagaaaataagagaaccagacataatggaaagacctcttcaataatgttgtcatgcctctcagtgaacgtgctcacagtcacacttggtttggctccccaaacccacaatagaaaaggaaaaatgagtattttgtttttcatctgttttgtatttaaaggcattgggttacttcctcctgccctcttttcttccctgaacaagagtttacaactcctcatggcttcttaataggtgaagtaggtgaaaagtctgagaagctcacagcagggtttgccgtcccaactatgcagctgagaggtcgccagctcctgtgccttcccagccccactataattggcagtatgtttgttcatgtttcctgaaaacattttctttaaaaaggaaaagaaaaaaatgccaaacaacaccaaccaaaaaaaaaaaaaaaaaaaaaagaaggaagaagacaaagagcaacatccaaacattccccaagccccaccccagtaagtctgagattatcttattccttccctgaaataattataaagaagcatttcaggcaaaatacttagtattaatggtctcttactgctcaacctcccaaccatgcccttttcccttttatgtgtatctcttggagtaaaataaattcattaatggctttccacatacaaatacaatagaaaagaaagaagtctggaacctgactatcatgggaccaaaaagtatcttggccctttgggagtttccttgtcagaaagtataagcctcaacaggaaatagaggctccttctcctttgagttcaataccctccctgtgtcctactcaccaggaaaataagtgtgttcatatcccacctaatttacaacagaagataaccccatcccatccccaaaacataaaaatacaagtctatgcccatagaacn

SEQ ID NO: 23005 - DNA, 506 bp, Homo sapiens
  misc_feature 175, 506: n = A,T,C or G
acgcgggggggtgctcttgtgagctgctgctcctgcggttggtgagattacctgggtctagagtgcggagctgctccgtggccacgaggacgtcaccatgcccaaagcaccaaagggaaaaagtgcaggacgggaaaaaaaagtcatccatccatatagtagaaaagcagctcanattacgagagaggcccacaaacaagaaaaaaaggaaaaattgaagaatgaaaaggccttgcgtctcaaccttgttggtgaaaaactgcaatggtttcaaaatcatcttgatccccaaaaaaagagatattcaaagaaagatgcttgtgaactaattgaaaggtactgttacaatgagacagcaaagttatccgtttattcatccgatcatttaattgacatttatggagtgcctagtattttctcaatactgcgctagaggtgctgggaagagagagataaaaataaatgatactctcttgttctcaagttgcttgcaaatttgcatgcan

SEQ ID NO: 23006 - DNA, 552 bp, Homo sapiens
  misc_feature 552: n = A,T,C or G
acgcgggaaggcagtggtaacaacccagactacgcggggatattatcagaaactaattgacctcagaaaaggaaatacccaattccagcctactctagttgtcctgtctccctaaagggataggggagaaactgagaagcacttgtgtagttcacagtccaggaacacaggctcacttaaagattgagacctaagcaagcatgggtctatagaatgttttcccctgcccctaaaccttagcaacacattactaaaagcccatacaaagcagttccttttacctggtccatcatatctggttatcaagaaaatattacaaaacatactaaaggcaaaaaaaaaaaatccacaagtagaagaggcaaaagaagcattaaaaccagaatcagatatggcaaggatgctggaattattagaaagaaaatttaaaacaactatagttaatatgctaaggtccctaatgaataaagtagacagaatgcaagaataggtgggcaatgtaaacacagagataaacattctaaaaaaaatgctagaaataaaaaagtaccn

SEQ ID NO: 23007 - DNA, 552 bp, Homo sapiens; identical to SEQ ID NO: 23006
  misc_feature 552: n = A,T,C or G

SEQ ID NO: 23008 - DNA, 162 bp, Homo sapiens
acgcgggggggattgtgcagacagaactgctgaaggagcatatggcaaaggaggaggtcctgcaggatcctgtgttgaagcagatcccaatatcctgagcctgagtggtaaggtgctgccatcctgtgaccttgctcgacgctatggccttcgggatgtgga

SEQ ID NO: 23009 - DNA, 607 bp, Homo sapiens; identical to SEQ ID NO: 22085
  misc_feature 1, 2, 3, 4: n = A,T,C or G

SEQ ID NO: 23010 - DNA, 692 bp, Homo sapiens
  misc_feature 1, 2, 3, 4, 5, 6, 7, 8, 9, 692: n = A,T,C or G
nnnnnnnnnaaccttaaataaatttaataacatacaatttacttcacacactggggttccacaaagatttcttactacaaacagcgttctgcttctcaacaacctatataatttgataaccacagatgtagcataaagtcattcatttttaaactctaaattcagttgcttattggggttttcaccttggatctggtacaaattctaactagagtaagagttcctggatgtgtcaaaaatcgtcaccttcccaactcttacatatgtaggacagtgacatgactcctgcccacagaagaacacacctgtcctgccctctcccaacaatggaatgttacaaagcaggacacgcctgagttaaaatgagtatccctgaggttgataattcccaccatgcaccttgaagatggttcttgaatctttcattcagcccgatgaagagaagattcattgtagccagtgtcacattaggtgagaaaaattcagaaggcaacagatttgcgctgctgcaccagcgacccaaaccagcccgtgagtgcatagctactgccagcacttaaagaaaggtgagccgttggatactctgggaaaccgagaaagcaccttctactgcaagcgtgaagaacatgatgcccacagaaaacacaacagaaacaagaagtgagactcttgaaggtaatttccagaatagn

SEQ ID NO: 23011 - DNA, 1511 bp, Homo sapiens
  misc_feature 1, 2, 3, 1510, 1511: n = A,T,C or G
nnnggaaccccctttcgccttcttgccttccctttctcctgcccccccaattgtctaaactttcggcccaccccacaatttttttcttttcattccaagagcagccgaaaccagctcactcatttatttgactgagaacattaagaaggacaacaaaattaaacattctttaataaaattcctatagaaagctcagtcatagggcaaatactcagttctctttcccatatcaccgaggattgagagctcccaatattctttggagaataagcagtagttttgctggatgttgccaggactcagagagatcacccatttacacattcaaaccagtagttcctattgcacatattaacattacttgcccctagcaccctaaatatatggtacctcaacaaataacttaaagatttccgtgtggcgtgaaaccatttcaatttgaactaatatccttgaaaaaaatcacattattacaagttttaataaatacagtaagaagagctggcatttttctaaaatactgaatttcagatctggagtttattccataaataggtttcttttcatttgcttgctttcttggatacatttgctcaagtattattctctatgaagtgaactctttcatagataccatataaaaactgtattaatatgtgcctcattatagaagcagctggaagaactggatcacacagttacctaactgaaaagtaacttaggaaaaagctctgctttttgtaaaactttaaatcacaggctgaagaataccaaagaaacatttatatagaactcccactagaaattttataaatatatatgtagcatatttatatatattatatttgcctcaccagtagattttcagcaagtctggctggaatgatgctatcatggaaataaatattaacaaaagaattaatgagtatccacaggtttacaagatttcttctggaaaataatcataaattcaaattatattataatttgcagtttacacaattttaaaagggaagaaagatgcctttctttttagcttcatttggacagtaagaacagccaccaacggttgaagtttggtggggaaactggcaagtgacaatacttggtcacaacattgaaaagaagtatttacaccattctgggaagtaccaaatattagaaaaaacaaacaaaaacggaaacaatccctagtagcattccttggcgtgcaaagtcagcaggaaatgattatccattgacagttttcatgataagtcttggaagcattcaaaaagcagagggaatcatcggggattgttcagattaggttctgtgggatgccttgttcttaatttaactctgagttccaggatttcattccctttataacatctctaacagggtcatgttcaatttagtgcaagtgcaaaatgaaaatgaaatgaaaccaacaaatacattaggagcgaaggctgatcgttaagatctgtagtccccgcgtacctcggccgcgaccagctctagaacnn

SEQ ID NO: 23012 - DNA, 1197 bp, Homo sapiens
  misc_feature 1121, 1133, 1149, 1160, 1191: n = A,T,C or G
acgcggggtctctcggccttagcgccatttttttggaaacctctgcgccatgagagccaaggtgagcggttcctggtagtaagcttgggaggtaggagttggcgagtagtagcgaggagacgaaggcaagtccgccatacctcctgaactactgggtttcaagggtgcccaagagctggtgggagagagaaggtagtttgtgagagagctagcggttaagtgctatgggtagagagggtgggcttagaaaagggtggaattctgatcttatgttgggagggtgtccaagttactgatgtagttgttacgaccaatctttcatacttcttggttaagaatctgtccggttctaaagagtgcatttcatatccttgctaagcctactaataagcttcatcccttttttttttttttttaattatctgctgcttgggatcggttgctagtggaggaagaagcgaatgcgcaggtacgttgagactttgccagcccaggaggagggaagttccttggacaaaacttaggagaaacatttggtttggaaatcttaaaagatctttaggagaaaaacgtttgagtgttttctccctggagccaggatttaacagaacagagaacgatagaaccgtagtgcttgttcattttaccacctcattctttatgtggacgtttgatttaatgtgggagggaaaggcaactctggtttgaggtgtattccattcctgtgtctgcttttcaggctgaagcgcaaaagaagaaagatgaggcagaggtccaagtaaaccgctagcttgttgcaccgtggaggccacaggagcagaaacatggaatgccagacgctggggatgctggtacaagttgtgggactgcatgctactgtctagagcttgtctcaatggatctagaacttcatcgcctctgatcgccgatcacctctgagacccaccttgctcataaacaaaatgcccatgttggtcctctgcacctggacctgtgacattctggactatttctgtgtttatttgtggcccgagtgtacaaccatattataaatcacctcttccgctgttttagctgaagaattaaatcaaaaaaaaaaaaaaaaaaaaaaaactttatcngattaccggccnaccctccatgaatgantgaatggtccnacccccggggaaatttcccgggaccccggtncccctg

SEQ ID NO: 23013 - DNA, 1516 bp, Homo sapiens
  misc_feature 1, 2, 3, 4, 5, 6, 7, 8, 9, 10, 1504, 1505, 1506, 1507, 1508,1509, 1510, 1511, 1512, 1513, 1514, 1515, 1516: n = A,T,C or G
nnnnnnnnnncgcggtccccccctcaacatggcggcagcggtgctctaggcgccggaagggggcgtgaatcggtgcgaccgcgcgcgtgcgcagtaccgggtccgcgcctgtccccgaaacttcgcaccccgtcgaactctcgcgagagcggtatctgcgtgtcgggacgtgcggaggctctcactttccgtcatggcgctgaaggtagcgaccgtcgccggcagcgccgcgaaggcggtgctcgggccagcccttctctgccgtccctgggaggttctaggcgcccacgaggtcccctcgaggaacatcttttcagaacaaacaattcctccgtccgctaagtatggcgggcggcacacggtgaccatgatcccaggggatggcatcgggccagagctcatgctgcatgtcaagtccgtcttcaggcacgcatgtgtaccagtggactttgaagaggtgcacgtgagttccaatgctgatgaagaggacattcgcaatgccatcatggccatccgccggaaccgcgtggccctgaagggcaacatcgaaaccaaccataacctgccaccgtcgcacaaatctcgaaacaacatccttcgcaccagcctggacctctatgccaacgtcatccactgtaagagccttccaggcgtggtgacccggcacaaggacatagacatcctcattgtccgggagaacacagagggcgagtacagcagcctggagcatgagagtgtggcgggagtggtggagagcctgaagatcatcaccaaggccaagtccctgcgcattgccgagtatgccttcaagctggcgcaggagagcgggcgcaagaaagtgacggccgtgcacaaggccaacatcatgaaactgggcgatgggcttttcctccagtgctgcagggaggtggcagcccgctaccctcagatcaccttcgagaacatgattgtggataacaccaccatgcagctggtgtcccggccccagcagtttgatgtcatggtgatgcccaatctctatggcaacatcgtcaacaatgtctgcgcgggactggtcgggggcccaggccttgtggctggggccaactatggccatgtgtacgcggtgtttgaaacagctacgaggaacaccggcaagagtatcgccaataagaacatcgccaaccccacggccaccctgctggccagctgcatgatgctggaccacctcaagctgcactcctatgccacctccatccgtaaggctgtcctggcatccatggacaatgagaatatgcacactccggacatcgggggccagggcacaacatctgaagccatccaggacgtcatccgccacatccgcgtcatcaacggccgggccgtggaggcctaggctggccctaggaccttcttggtttgctccttggattccccttcccactccagcaccccagccagcctggtacgcagatcccagaataaagcaccttctccctaaaaaaaaaaaaaaaaaaaaaaaaannnnnnnnnnnnn

SEQ ID NO: 23014 - DNA, 7984 bp, Homo sapiens; identical to SEQ ID NO: 22761

SEQ ID NO: 23015 - DNA, 431 bp, Homo sapiens
acagaaaaacattccgcccacgacgccaccgaagctgtggcccagaatggagaatcgattccatttcaaggctgccacaactcttcggatctcactcacaaaagtctggaagtaatatgggacacctgggctgtaatgggacgagagcccatgacctccgaaatccatggcaacgtaataaaagtcttgcgggagaagagggatgagtctgtcgaaggagctggcattgtccagccagccgtgcaggcagagaactggagggccctgcagggagccccaggctttggctgcgatgtggccccagggcacagccagcttcagctctgagatcagaccttctagaatgtgctggggcgggggcgctggtcaggcctggaccccatcacttgctggctgggtaaccttggagaagttactaaaacgtcttgagc

SEQ ID NO: 23016 - DNA, 907 bp, Homo sapiens
acaattctattgacataaaactctagaaaagacacatcacattaaatctatattgagcaagagtaggttggtggtgacctggggtctgcagttgggtgaaagaaggggaagggggttaatggcaattttggcattgtggaaatattctatatcttgattaagtagaagttaaacagatatttacatctgtgcaagctcattaaactatactttaaaattggtgcattttatcgtatgtaaattttacctcattaaaagtgattaagaaataatttcattctcagtaccaggggtcgaaacgctcaagtttatttatgccgaagaaacttaagtaggatccttcttagtatcctcacagtttcataacacattacttcttctctacagtaatatttgctttaaaggttttaacagtttctgtttgcaaaaagtattatcagttggacaatattaaatggcatgtttacaagaccaaaaatgaaagtcctcaaaagctacttattttaacataaacttgcatgacaaatagtttccagtgcaacaacctgttatgttctgcaaccagccttttgtcagagttttgatcctttaacacttacctccttccccgtttttttcttctttaagaaaacaaacttacacttgtgtattagtttacaattactgtaagcaaatgaccacaaacttagcaacttgaaacaccactcatttatcatctcagttctgtggttctgaagtccaggaacagctgaactgtgttctcagctcagtatctcacagtgctaaaatcaatatgtcgatttgatttcaagctggggatgtgttctcatcacaagctcagagtcctctgccaagttcattcaggttgttggcaggtttcaattccttgcagctataggactgaggt

SEQ ID NO: 23017 - DNA, 1613 bp, Homo sapiens
acagagagtgcaattgatccgaaccctacataactcactgtttccatttacataacttacataactgcaagctgaaatcactatcactctaaaatttttttaattcaaaattttaatttcatttaatcatatttacccgcgtacgcgggggactggagacactgaagaaggcaggggcccttagagtcttggttgccaaacagaatgcccatatccgtcttacctgtgaggaagcttgccttgggcgccctctgctggccctccagaagctaacaggggcgagtgctcggtggtttacaaattgcctccatgcagaccatgaaactgttcagcctgctatagttagatctctggcactggcccaggaggtcttgcagatttgcagatcaaggagaacccaggagtttcaaagaagcgctagtaaggtctctgagatccttgcactagctacatcctcagggtaggaggaagatggcttccagaagcatgcggctgctcctattgctgagctgcctggccaaaacaggagtcctgggtgatatcatcatgagacccagctgtgctcctggatggttttaccacaagtccaattgctatggttacttcaggaagctgaggaactggtctgatgccgagctcgagtgtcagtcttacggaaacggagcccacctggcatctatcctgagtttaaaggaagccagcaccatagcagagtacataagtggctatcagagaagccagccgatatggattggcctgcacgacccacagaagaggcagcagtggcagtggattgatggggccatgtatctgtacagatcctggtctggcaagtccatgggtgggaacaagcactgtgctgagatgagctccaataacaactttttaacttggagcagcaacgaatgcaacaagcgccaacacttcctgtgcaagtaccgaccatagagcaagaatcaagattctgctaactcctgcacagccccgtcctcttcctttctgctagcctggctaaatctgctcattatttcagaggggaaacctagcaaactaagagtgataagggccctactacactggcttttttaggcttagagacagaaactttagcattggcccagtagtggcttctagctctaaatgtttgccccgccatccctttccacagtatccttcttccctcctcccctgtctctggctgtctcgagcagtctagaagagtgcatctccagcctatgaaacagctgggtctttggccataagaagtaaagatttgaagacagaaggaagaaactcaggagtaagcttctagaccccttcagcttctacacccttctgccctctctccattgcctgcaccccaccccagccactcaactcctgcttgtttttcctttggccataggaaggtttaccagtagaatccttgctaggttgatgtgggccatacattcctttaataaaccattgtgtactaatgcaagaggaggtgatcagaatttgcttgaatggtgtaatcatgtggcagattcaaaaattcattgtttctacatgtctcacaagaagactctgcaaaacaaaatctgaagaacagtatggaaggcaagggttgt

SEQ ID NO: 23018 - DNA, 1360 bp, Homo sapiens
  misc_feature 1, 2, 3, 4, 5, 6, 7, 8, 9, 10, 11, 12, 13, 14, 15, 16, 17,18, 19, 20, 21, 22, 23, 24, 25, 26, 27, 28, 29, 30: n = A,T,C or G
nnnnnnnnnnnnnnnnnnnnnnnnnnnnnntttggactccatatgactttattttctggggtggaggagaaagcgagccacctcagctgcctcatcatgcaaaaggtagagattagaccccaggaaggacttcctttggcttagggcatccttctccctgcagtcaccagcagggggcgccacaggccagcctgtgggacccactatctgagaacggggttgtcacccaggagtgagtgaaggtctggccagcactgagggctctggggtgcagagaagttaggagatccatcaaagcagccagaccacctggtgggaggcggcacacactctgccagtccggacacgggttagggagtggcatcacattccgccgagtcattgcctgcgaagactaacgtcacctctgatgtcagggctccaaggggcttcgttccagctccaggctccaggaaagggcgtcgcagggcccagaggttacacaacttcccccaagatcgctgtggaaatgactggcagagcagggattcaaacccaggtccctgtgggtgcctctgcccagccgcctgcagggtctgcaggtggccatgtcccacgtgtcacctttacagacccacggctgagagccggcccagccttggcctggcttccttctttctcatctctaaaaatgcctttcattctaagatctccttggcagcttcataataaaaagaaggcttctgaaaccgcaaatgtttttaaatgaattcaagccccaagtttctgcaggggggtgagggatgcaggatgaaggtaagtctttgagtatgaaagttacatgcatgatgcgagagccctccactgacctccaaaactcgcgctgccggggatacgagggcccctggcgagtctcccgaagtgtctccttttgaaagctcaccggtccttgtactctgagtgctttcagttgggtccattatgagaaatctccttttgagcatggatgtattcaaatccagatgttgtccccgcagaacaaaaagctccctcctaataattctctttatgaagaagtaggttctcaccctgtaatcccagcacttcgggaggccaaggcgcgggtggattgcttgagcccaagagcttgagatcagcctgggcaacatggcgaaattcgtctctgattcactcgatgcgcacctggccgtacgtagcttcatcaggcagggtgtacctgtcaagttcttaggtccgtagtgttcgcggctttacctgtcctggtaccgccgtccgcacctcggtcagtgcgtccccggcaggtgcgtgtacctgatcctcgtgccgaattcttggcctcgagggccaaattccctatagt

SEQ ID NO: 23019 - DNA, 854 bp, Homo sapiens
  misc_feature 854: n = A,T,C or G
gcgtccgcccacgcgtccggtcatctataaaaatactcacattaagacagtagcaattccagccttgagctccgcggacgcgtgggtctgaatttgtgtacaaagactattgtagagactatccgggttagtttgcaagggaagccaatgatgagtaatttgaaagaaattcacctggtgagcaatgaggaccctactgttgctgcctttaaagctgcttcagaattcatcctagggaagagtgagctgggacaagaaaccaccccttctttcaatgcaatggtcgtgaacaacctgaccctccagattgtccagggccacattgaatggcagacggcagatgtaattgttaattctgtaaacccacatgatattacagttggacctgtggcaaagtcaattctacaacaagcaggagttgaaatgaaatcggaatttcttgccacaaaggctaaacagtttcaacggtcccagttggtactggtcacaaaaggatttaacttgttctgtaaatatatataccatgtactgtggcattcagaatttcctaaacctcagatattaaaacatgcaatgaaggagtgtttggaaaaatgcattgagcaaaatataacttccatttcctttcctgcccttgggactggaaacatggaaataaagaaggaaacagcagcagagatttttgtttgatgaagttttaacatttgccaaagaccatgtaaaacaccagttaactgtaaaatttgtgatctttccaacagatttggagatatataaggctttcagttctgaaatggcaaagaggtccaagatgctgagtttgaacaattacagtgtcccccagtcaaccagan

SEQ ID NO: 23020 - DNA, 328 bp, Homo sapiens
acctccctcaccaaagcccataaaaataaaaaattataacaaaccctgagaaccaaaatgaacgaaaatctgttcgcttcattcattgcccccacaatcctaggcctacccgccgcagtacgactactacaaccccgagcgcagatgttctgtgttttacggggcccccaagtaaggagcagtactcttggccaacccttgtgttctgctgaagtctgccagtgtgctgaggggaagtgccctcgccagcgtcgcgccctggagcggggtctgcaggacgaggatggctacaggatgaagtttgcctgctactacccccgtgtggagt

SEQ ID NO: 23021 - DNA, 577 bp, Homo sapiens
  misc_feature 577: n = A,T,C or G
actgagagggcaaaccaaggacagaatagagatatgtggcagtggcaacccttacaaaatcaaacactggacatgatacatgcctgcccttcttgcttacatgtgaagtataaccaatgtgccaaatgcttttataattgactaaagcagccacaccccaccctgctcagaaacagaaagctactgcaggcccctacaaagtgagtgagagtgtgtgagctcctgctgaagaggtgagacccagatcatagttcctacttgtttctctatgaagtggaaatacagaaaaagaagcaaatgtaagcataaattgtctatgttttaaaaacagttcagctcatgacttaaatttggtgtcaagctccttgctctagtatgtgtcctcagggtcaccttcatggcttaattttaagaagagagcaaaacagaattcagctttgatctgaatatgaatttagatagcaagtgagcttgggtgatgacatttctatatcattttctatatttcaaaggacagtgggaggatagaccttgcctttctgattaaagctgaatctaggccgggctcagtggctcn

SEQ ID NO: 23022 - DNA, 3996 bp, Homo sapiens
cgtccgcgccttcctccgacgcactgtgggggctgcaggggaagctgcgggccgtgggggccggaggagaagccggctccacgcgcagctgctgtacggaacgccgtgagtctcaaacattgtctcagcagcagcatcatatcttacaaaagttgaggaaatactgtatttccagcttaggaaactgaagattcctccggcctcagatgaccaggcaccactagatacagaacactgtgctttccttctccaagtcacttcctgccttgtgaccacacacccaggcttgacaaagctgttctgcagatcagaaagaaggggttcctggtcatacaccagtactaccaaggacagcttttttcctgcaagatctgttacctaaagcaataaaaaatggccagaggatcagtgtccgatgaggaaatgatggagctcagagaagcttttgccaaagttgatactgatggcaatggatacatcagcttcaatgagttgaatgacttgttcaaggctgcttgcttgcctttgcctgggtatagagtacgagaaattacagaaaacctgatggctacaggtgatctggaccaagatggaaggatcagctttgatgagtttatcaagattttccatggcctaaaaagcacagatgttgccaagacctttagaaaagcaatcaataagaaggaagggatttgtgcaatcggtggtacttcagagcagtctagcgttggcacccaacactcctattcagaggaagaaaagtatgcctttgtcaactggataaacaaagccctggaaaatgatcctgattgtcggcatgtcatcccaatgaacccaaacacgaatgatctctttaatgctgttggagatggcattgtcctttgtaaaatgatcaacctgtcagtgccagacacaattgatgaaagaacaatcaacaaaaagaagctaacccctttcaccattcaggaaaatctgaacttggctctgaactctgcctcagccatcgggtgccatgtggtcaacataggggctgaggacctgaaggaggggaagccttatctggtcctgggacttctgtggcaagtcatcaagattgggttgtttgctgacattgaactcagcagaaatgaagctctgattgctcttttgagagaaggtgagagcctggaggatttgatgaaactctcccctgaagagctcttgctgaggtgggctaattaccacctggaaaatgcaggctgcaacaaaattggcaacttcagtactgacatcaagctgactgacttctacagcaatataaaggactcaaaagcttattaccacctgcttgagcaggtggctccaaaaggagatgaagaaggtgttcctgctgttgttattgacatgtcaggactgcgggagaaggatgacatccagagggcagaatgcatgctgcagcaggcggagaggctgggctgccggcagtttgtcacagccacagatgttgtccgagggaaccccaagttgaacttggcttttattgccaacctctttaacagataccctgccctgcacaaaccagagaaccaggacattgactggggggctcttgaaggtgagacgagagaagagcggacatttaggaactggatgaactccctgggtgttaaccctcgagtcaatcatttgtacagtgacttatcagatgccctggtcatcttccagctctatgaaaagatcaaagttcctgttgactggaacagagtaaacaaaccgccataccccaaactgggaggcaatatgaagaagcttgagaattgtaactacgcggtagaattggggaagaatcaagcgaagttctccctggttggcatcggtggacaagatctcaatgaaggaaaccgcactctcacactggccttgatttggcagctaatgagaaggtatacactgaatatcctcgaagaaattggtggtggccagaaggtcaatgatgacattattgtcaactgggtgaatgaaacattgagggaagcagagaaaagttcatccatctctagtttcaaggacccgaagattagtacaagtctgcctgttctggacctcatcgatgccatccaaccaggttccattaactatgaccttctgaagacagaaaatctgaatgatgatgagaaactcaacaatgcaaaatatgccatctctatggcccgaaaaattggagcaagagtgtatgccctgccagaagacctggttgaagtgaaccccaaaatggtcatgaccgtgtttgcctgcctcatggggaaaggaatgaagagggtgtgaggcccaatggggctgggtgggaggcggtgcactcactcctgactgcccggcacagatgctccagggatgattcaagccattccaaagttcaacttggtgacactctataagattccaaaaagcacatattagtgcagccaagtagcctctcctgtatttaacaaaaagtgcttcattctttgcaggaggcccaacctcctatatataggtttctattcttgatttatttgcttcttcgaaaatctagaggaaaagaaagaagttattttccaggtacccttctcgcttttgccattagccaaggatagaagctgcagtggtattaattttgatataatctttcaaaccagcttcttgtggcttcccttttctttgttcaagatgagggccaggaggggaaacatcacacctgccctaaaccctgttcctggaggtcagcatttgatctgttgcaagcccctctttctgtcccctcttcctaccctgcctcccatgactttgctcctcacacttttggaaccatgccttccgggggggcccatctcttctgggcgtccttgtctctgggccacttggagtgtgtgataaatcagtcaagctgttgaagtctcaggagtctctggtagcctgcagaagtaagcctcatcatcagagcctttcctcaaaactggagtcccaaatgtcatcaggttttgttttttttcagccactaagaacccctctgcttttaactctagaatttgggcttggaccagatctaacatcttgaatactctgccctctagagccttcagccttaatggaaggttggatccaaggagggtgtaatggagcatcaagccactcggcggcagcatggagctataactaagcatcctttagggttctgcctctccaggcatttagccctcacattagatctagttactgtggtatggctaatacctgtcaacatttggaggcaatcctaccttgcttttgcttctagagcttagcatatctgattgttgtcaggccatattatcaatgtttacttttttggtactataaaagctttctgccacccctaaaactccaggggggaaaatatgtgccaatcaatagcacccctactcacatacacacacacctagccagctgtcaagggcagaatgaatctatgctggataagaaatggtggaactgcgttatgaagagctaatttactggacaaagaattccaaagcaaaaccagaacagtatgaatttgagcaggtctcataggttgagcaatttccccctaaaccaactgaaggctaaaaagcaacaggccattgtgaaccaatgcaagacgccctctatcatggtgaaaagctccatcaatgaggtatcttctttagtggtggtatgtaatggaacttagccatttttcaaagcaattgaaatgcattgctctggatctgttccttggcagtggactcagaaagccaacatgtggctcctcccagcccataaccagtatttttgctgcttctgaatacaaattggttggttttgacttcagattgaacttactgtagcctcagatgatttcccccctccgcctccaggaagaaagaatgttactgccttaataaaaaatgaaaagagaatgatgctcaaaatctttccaaataaaatgttccctataaaaaaaaaaaaaaaaaaaaaagt

SEQ ID NO: 23023 - DNA, 2127 bp, Homo sapiens
  misc_feature 1, 2, 3, 4, 5, 2070, 2071, 2072, 2073, 2074, 2075, 2076,2077, 2078, 2079, 2080, 2081, 2082, 2083, 2084, 2085, 2123,2124, 2125, 2126, 2127: n = A,T,C or G
nnnnngcgtccgcggagggcgctgcggtaaggagcagccgccacaggcacagccgcttcgcagcctcccgccgctggtttgtcagccccgcggctgcgggcggccgggcggccgagcgcgctctgaggttcgtccctcatcgctgaacccgcgtcctcccgccgcagctcctcggggaggggggcggtcggcgcctgcgcagagccgcctcctccccgcccccgcccagactccccccgcgccgccgccgaccgctaccgccgccgccgccgctgcgcctgcgctcctcgccgtccgcgctgcagtgcgaagggctcgaagatggccggttggcagagctacgtggataacctgatgtgcgatggctgctgccaggaggccgccattgtcggctactgcgacgccaaatacgtctgggcagccacggccgggggcgtctttcagagcattacgccaatagaaatagatatgattgtaggaaaagaccgggaaggtttctttaccaacggtttgactcttggcgcgaagaaatgctcagtgatcagagatagtctatacgtcgatggtgactgcacaatggacatccggacaaagagtcaaggtggggagccaacatacaatgtggctgtcggcagagctggtagagcattggttatagtcatgggaaaggaaggtgtccacggaggcacacttaacaagaaagcatatgaactcgctttatacctgaggaggtctgatgtgtaagcagcctctccccatctacctagcaactgtcttcatcaacaaccctaattatggtcacaatgctaccaaactgtagatggtagctaatttttctttacctattttctaatgtcatgattcctgtttgcccaatggatcatttgtatgttaaccactgtatgtaaccaacccttatctggcaacataattgcagcacaataatgatttgcatgataccttgaaattggggggagggggcatgccaagttgggcatcactttgtcttagcaattaatgggatattgattactaaaataagttaatattaagcaaggtgccggttgtacaatctctgatcagtgtcttttcagcactttgagcatttacttggctcatttagtcttccttttgtagcgcatggttgggaggaaaaagtgcatgcatcattccttcactcttctctttttcccgcccccccctcccttcgcacataggcatttggtttgcttccatctttttttatgcagtgcctgtttttttttaaccaattaaaatcccttttgttgatgagctattgagagctgcagtagtttgcttttagtattgttgttgcacttgagcagagacaaacctttattcatagtgtctacaggacatatgaagagtgcaatggcaaaacaagagcaaaaagcacttcctcccatgaccttacagtaaccatactgattgaatccccagggacattccatcattgcaatagctcagatttttcttcctttttctttgcacaccagctctactctttagtaaaattgtaaaaggctgccattatggacattaggtatcccaacataaccatctggagtgtgtccagtttgttcttcataggaccaatttttatttgcagcttgagtttttatatgaagttgcattattgtggacttggctgtcttgtgatgaatttttttcatatgtattctgtgccatactattgttaaaatgaactgttgctattgtgagatggattttaactgacctattaagggtttctttcgaatggcactactttagggacattctagtatttgcttctattgtttgggccttgtggataatgtacagatttaaaaacaaatcttgttgctgatttgtccatttctttccctgcactttgttacatctgggatacagtctaactcatctgatttaatatgcatttaaaaaaatgccataactattaaacaccttgtttacagacagatgaaataaatttattccaaccaaaaaaaaaaaaaaaaaaaagggggggaaataagggccaagcccttaaagcttgagaaaaaagcnnnnnnnnnnnnnnnnggccgttaaactagtttagggaaaaaacttccaaaacnnnnn

SEQ ID NO: 23024 - DNA, 1986 bp, Homo sapiens
  misc_feature 1, 1986: n = A,T,C or G
ntatagggagtcgacccacgcgtccgggcttcggccggctaagccgcggccacccgcggtctgagggaccggaggagcggggccgggagctgcgaggagccccccagacgtcgccgagcgcgagggcgggcgtgctcggagtggtcgctcgtcagccgccgcccctcagtctccgcacttgcaggtcccctccctctccgccgggacgcgggagagcccggctcgcggcgggggcggccaatgcgaaactggctggtgctgctgtgcccgtgtgtgctcggggccgcgctgcacctctggctgcggctgcgctccccgccgcccgcctgcgcctccggggccggccctgcagatcagttggccttatttcctcagtggaaatctactcactatgatgtggtagttggcgtgttgtcagctcgcaataaccatgaacttcgaaacgtgataagaagcacctggatgagacatttgctacagcatcccacattaagtcaacgtgtgcttgtgaagttcataataggtgctcatggctgtgaagtgcctgtggaagacagggaagatccttattcctgtaaactactcaacatcacaaatccagttttgaatcaggaaattgaagcgttcagtctgtccgaagacacttcatcggggctgcctgaggatcgagttgtcagcgtgagtttccgagttctctaccccatcgttattaccagtcttggagtgttctacgatgccaatgatgtgggtttccagaggaacatcactgtcaaactttatcaggcagaacaagaggaggccctcttcattgctcgcttcagtcctccaagctgtggtgtgcaggtgaacaagctgtggtacaagcccgtggaacaattcatcttaccagagagctttgaaggtacaatcgtgtgggagagccaagacctccacggccttgtgtcaagaaatctccacaaagtgacagtgaatgatggagggggagttctcagagtcattacagctggggagggtgcattgcctcatgaattcttggaaggtgtggagggagttgcaggtggttttatatatactattcaggaaggtgatgctctcttacacaaccttcattctcgccctcaaagacttattgatcatataaggaatctccatgaggaagatgccttactgaaggaggaaagcagcatctatgatgatattgtttttgtggatgttgtcgacacttatcgtaatgttcctgcaaaattattgaacttctatagatggactgtggaaacaacgagcttcaatttgttgctgaagacagatgatgactgttacatagacctcgaagctgtatttaataggattgtccaaaagaatctggatgggcctaatttttggtggggaaatttcagactgaattgggcagttgaccgaaccggaaagtggcaggagttggagtacccgagccccgcttaccctgcctttgcatgtgggtcaggatatgtgatctccaaggacatcgtcaagtggctggcaagcaactcggggaggttaaagacctatcagggtgaagatgtaagcatgggcatctggatggctgccataggacctaaaagataccaggacagtcagtggctgtgtgagaagacctgtgagacaggaatgctgtcttctcctcagtattctccgtgggaactgacggaactgtggaaactgaaggaacggtgcggtgatccttgtcgatgtcaagcaagataacagggacttgaattagcagagtctaaaatcagggcaggcaaacgataatctgagtgcaagtctgaggagtcccagggtttagcagtagactgtatggtctttcaagagagttccagactggcactttcacccagaaccaatgcggtgtttcttaatgtttgcacaaatttccttaaaaatcaacttgtactgtagcataagaaaagtttttatttatctattggaagattatcagaaaaatan

SEQ ID NO: 23025 - DNA, 3020 bp, Homo sapiens
  misc_feature 3000, 3001, 3002, 3003, 3004, 3005, 3006, 3007, 3008, 3009,3010, 3011, 3012, 3013, 3014, 3015, 3016, 3017, 3018, 3019,3020: n = A,T,C or G
tccgagacactggtatcatttcttgaatgaaacacattttacagatgaggcaactgaggctgagagaagttaagatcacacaagtggcggcgctggtcacctttacattgcaattcactaggaagtgttcaggttgctctgaccgcagggcagatattggggctgcggtgcccagttccaaaggtcaaagcttgctccgcgcccgccagggagctggtctagcggctgcagtgttaacccgaggccccgcccccaacgggtggcgcgaggcggggcgtaggtgagcgctgcagagaggctgcgccttgggccgcctgtcgcctgtgcgcctgcgcgcggcgccgaggggacggggtccgactcagaaatggcggcctccatgttctacggcaggctagtggccgtggccacccttcggaaccaccggcctcggacggcccagcgggctgctgctcaggttctgggaagttctggattgtttaataaccatggactccaagtacagcagcaacagcaaaggaatctctcactacatgaatacatgagtatggaattattgcaagaagctggtgtctccgttcccaaaggatatgtggcaaagtcaccagatgaagcttatgcaattgccaaaaaattaggttcaaaagatgtcgtgataaaggcacaggttttagctggtggtagaggaaaaggaacatttgaaagtggcctcaaaggaggagtgaagatagttttctctccagaagaagcaaaagctgtttcttcacaaatgattgggaaaaaattgtttaccaagcaaacgggagaaaagggcagaatatgcaatcaagtattggtctgtgagcgaaaatatcccaggagagaatactactttgcaataacaatggaaaggtcatttcaaggtcctgtattaataggaagttcacatggtggtgtcaacattgaagatgttgctgctgagactcctgaagcaataattaaagaacctattgatattgaagaaggcatcaaaaaggaacaagctctccagcttgcacagaagatgggatttccacctaatattgtggaatcagcagcagaaaacatggtcaagctttacagcctttttctgaaatacgatgcaaccatgatagaaataaatccaatggtggaagattcagatggagctgtattgtgtatggatgcaaagatcaattttgactctaattcagcctatcgccaaaagaaaatctttgatctacaggactggacccaggaagatgaaagggacaaagatgctgctaaggcaaatctcaactacattggcctcgatggaaatataggctgcctagtaaatggtgctggtttggctatggccacaatggatataataaaacttcatggagggactccagccaacttccttgatgttggtggtggtgctacagtccatcaagtaacagaagcatttaagcttatcacttcagataaaaaggtactggctattctggtcaacatttttggaggaatcatgcgctgtgatgttattgcacagggtatagtcatggcagtaaaagacttggaaattaaaatacctgttgtggtacggttacaaggtacacgagtcgatgatgctaaggcactgatagcggacagtggacttaaaatacttgcttgtgatgacttggatgaagctgctagaatggttgtaaagctctctgaaatagtgaccttagcgaagcaagcacatgtggatgtgaaatttcagttgccaatatgatctgaaaacccagtggatggctgaaggtgttaaatgtgctataatcattaagaatactgtgttctgtgttattgttctttttctttttagtgtgtggagattgtaattgccatctaggcacacaaacatttaaaaggatttggactgcatttaattgtaccattcagaatggactgtttgtacgaagcatgtataatgcagttatcttctttctttcgtcgcagccagtcttttttgcttctcctacaaaacgtaacttgcaatttgccagtttattattgttggatacaaagttcttcattgataagagtcctataaataagataaatacgaagataaagctttattctttagtgttaaaatacagtatatctaataactagcctcattagtagagcagtatattaaaacaatgttttatgtaaaaagtgtttatcttcagcaccaaatacatgataaatgtatcaatcactatttataaacagagctttcaaacactcctcagaatattcttctaagtattttgatgaagtaactttgtaattatttgaacattgttttaatcattaggaaacactgattaactgcaagtcttcatgattctgtcatattaagaaacacctgtaggtttgcttcaaataaaggcatatataccaaggacttacagacaaaattaagaatgtcaatttaagttaataaaaatctcccaatatgaaaaaaaaaaaaaaaaaaaaaaaaaaaaaaaaaaaaaaaaaaaaaaaaaaaaaaaaaaaaaaaaaaaaaaaaagaaaaaaaaaaaaaaaaacaaaacaaaaaaaagagaaggagcggcgcgagcacacataaacaaactaccaaacgcggggagacaaacatagacacatccacacaagcagcgtctataaatacaatacagaggggcatcagcaaggagacggtcgtcaatcatcgagagagacgagggaggagagcgacagaacactcggagatgtcgggagagggccgagccgacaaaaacacagcagtcgacataggcaaagggtctagagtaataatagaagaaaaaaccacgaaacactatttatctttatcaggtgagaaaagaaaaagaattaatagtcagaggagacttaattaatcagaaaaaattataatgaagtacttttgatgacggtgtattacataaaattattgtatgtgggagtttaagatagtggagaacacaataaactagtaatagnnnnnnnnnnnnnnnnnnnnn

SEQ ID NO: 23026 - DNA, 337 bp, Homo sapiens
ctccctcaccaaagcccataaaaataaaaaattatagcaaaccctgagaaccaaaatgaacgaaaatctgttcgcttcattcattgcccccacaatcctaggcctacccgccgcagtacagtcctcgccccagtcattgacctgaagcgaggtggctcctcagatgaccggcaaattgtggacactccaccgcatgtagcagctgggctgaaggatcctgttcccagtgggttttttggaaggggaagttctgattcccttagctgacgaatatgaccctatgtttcctaatgattatgagaaagtagtgaagcgccaaagagaggaacgacagaga

SEQ ID NO: 23027 - DNA, 4172 bp, Homo sapiens
  misc_feature 4156: n = A,T,C or G
ctgaacttatttgttaaagagttgtggcctattacctccaaataagatgccaataaattaattcatgaatactaaataaaattaaagatgctaatggactcttgtgtgaaatagtttagaattcacttaataaatttttagacttaaatctctatctggaaaatctgaacatatcaaagagactacagctggctccttcaaacgctgtagcactaacacctaaaaaaaaaaaaaaaaaccaccaaaaaaacaaaaaacacgaggaggttctgggattaggagaacactctttaatgataaagcctgtccaagtactaaggacaattagagtaggcaggtgacctgtacaaagtattagtgataacacaacattcagcttcctaagagttaaaacgtgctgcttacatgaagggagatgatactgagctaagaagtcctggtatagagaagcagagagaccaacctacttcatattatttataaaatagagaatattctcagctaacatgctgggagaaaaaattcttccaaaaaggcagaattacaatcaatgccaagatttacaaattccatcatgtttaaatataaggacaaaaataaacatttcttatttaaaaaaaacccacaaatttccccaactatagcttatctgttagcacttctttatcagtctgactattctttaaaggccttaaaacatgaatttgggataaaaacaaataaaagtgcccaagttttaagaagccatatgttaacttaggatgttatctatatattttttagaccaatcaatgttttttaagaggtgtagatactggtaacttttctctttaaataaatgtttatatatttcaccaacaacactggcctgtggcacacagcatgtttaataaaaacacattgctattaaaaaaaagtatatgtaaacagaaaaaaaaaaccctctagtttcaacagaaaaacttacatccagagattcttttcccattatttcttaggacagccacagaactatttcaacctgtacccttaatccagcagatacatcttaataaaagaactctaattgctaagtactgaaataaaacattacttacaataatttcctagttatccacaactttcttcttgtagcaattgtgaacttaagatgacttgtttttataagctcctcagtgtcaatatatctcaacaatacatttattacttgtacaatatattacttcacacataataacataaaacatcatttcactaaagaaaaatacacattcaatatagccaagttctagttttaaaaagaagcacctgatgagttttcttctgaattcatttctccagaagaccagtccttaaagacttctggagtctagctatgttggcatctaatgccgcaaggccatttctgaagtcttgttcatcacgagaagtgaacgttgaaaacgaagagatgctccagtcagacatcaagtcagaagtgaaaacactaccatcacagacagtattgcctttcacttgaaggctgttgctaagacaacctgatgggccatgacatgcagtttgttcctctggctccttggtggcagcagggatcttaccaattgcttcctttattttcttgaggagctgtgtgtccttcatatcagatgctctggaaagtttttcaggtgcatcttctgcttcctttgttgaagaggaacagattacaggtgtacacagtttattttcttttccagagacagcaagtccgctgttgctgactagctgtgttgtagctgctcttatttgtggctgaggggatagtctcttagaaagtggtgatttcttttcaggagtgcttctagcaaaaggaatgtaaattgtattatccaaattatgctcatcttctattaaagccatagtttcactcccttcatcagaatcctgttttgaaagggcagaaataattccaggtgcagatgcttcctccatgcccctagtgttactattttgagggcctctggaggacagaacattttcataggttttgtctggctctatggtttcctcatttttaattgtagaaagtggctctgaatgtgtaaaactgtaatttgtttctaacttatttagatagctcattatggaagtgtgagcaggagctgggtcatgttgaagttgtttatcatgaatgttcaagagtgatttggtaaggttattcccaggcttgcagcgagcactgtccacactaagatcggagagaagctttgccatgctagtctgtaaagttctggttaattctcttagtcgagtcacctcagcatcacgctgacgtaatgttatccccaatatctggttttccttttcagcagtttctaacttaaactgggagcttttcacattgactagggcttcctccaattcaatttttattcttgttatctcaatatcatattgctgtttattttcaagtatagtttgatctttgtctttaaatatactactaaattttttgttttcatctttctgattttcaatcacttttaacagctcttcatttttactctgcagtaattcctggctctttagtgactcctccaattgattttgcagtgacatattcaatgactgaagagaaaacaattcaaggttgcaatccacagcaccagatggtttttgagttttctgttgttctctgagttgctggttcaaaattctcaactgccttcgtaactgagcattctcacttcttaatggttgcatggccagtgctatctcaacttgaatatctgtgtttccacttactgttggaagtacagatatacatgcctccatttctgtaatcaacctctgaatttctgaatcctcttgttctgctaccagggccttgagctctcccaacaaatattttataattctaactttttcagctgtcttgttcacattttttgccttctgtacatccttcactgtttttgtatctcgcacatgtatgtttaaatcctttctttcacttgtggcctctctaatttgctctctggcacatttttcttcattagtggccaagaaagctggttgtgactgagtagggcttcggtgtgtctgactgtccagatgcgtttcttttccatgagatcgaaaaagagacaaatatgtttgaatacattttagtaggcctgtttccttatgaattccttgttgtggcagaattccattaacaaggcccagttgctgcaatgttggaatagctgatatgtcagttttgggcaggctacatggaactccaggactggtattaaatgaattccgtagaacatcagtacaggttgcagaaactgttttaccttgtgatgcaaactgactgttgccatcagtttgaacttcagaatgaacctttggagggcagggtggccgctgaagtgaccagactggggtggaggtacataagccataactagaatgaggagttgcctgagattcagaatgagagggagcatggcatggtacagcaggaattccattagggatgttctttgaagtcaagtcattcatcagtgacatctgagtctgcacgtgctcacagagggcttggtatattatgggtgaatacattctataatgatcttgcaatgaccagttttgctctaggtctgatgtgtctctttcacttctagcagaagcttcattaggtatctgtttcttattatctgaagatgatgtttctttctggactaccaaaggaatagtatgtttttcatgtctttttttttttgatccgtatcttttgctttctaaaggtctagaattagatctgttttctaaatatgctgtttctgaacctgaatcttcatttctcaaaatgtccctcagcaaagaagcacaaccatcaagcccgtgtacagtttcagcctgactttctgaatcagaatggatggaatagccagaatctgcattaaaacgtggtatttttcttaaataggtcgctttctttccatttgttaatttagcaggtccagtgtgccttcctgaagataacacctggcccggtcgagctccagacctgaccatctctcgccgcctcagagaagcccagaccgagggaagtgaagcctcacggtaaaaagaattaaccgccgtgggctcccggaccttcttggcccccccgcgttaattaatnctagaagtatttccga

SEQ ID NO: 23028 - DNA, 2435 bp, Homo sapiens
  misc_feature 1, 2, 2432, 2433, 2434, 2435: n = A,T,C or G
nnagctgtttcctgtgtggcaaaaaaacgcccgaccgcgggggcggccgtggttccctgggagacctagcgcgtccaggtgggaggttagtgtggcccgggcgtccgctcctcagcggatgtggcagccccgagccatggctctcgccgtccgagtcgtttattgtggcgcttgaggctacaagtccaagtatcttcagctcaagaagaagttagaagatgagttccccggccgcctggacatctgcggcgagggaactccccaggccaccgggttctttgaagtgatggtagccgggaagttgattcactctaagaagaaaggcgatggctacgtggacacagaaagcaagtttctgaagttggtggccgccatcaaagccgccttggctcagggctaatgcgccctgaaggcagagtccagggaccttgacccagcccctctcagcagacgcttcatgataggaaggactgaaaagtcttgtggacacctggtctttccctgatgttctcgtggctgctgttgggggcagagattgacgcccccggtctttgcctctgagcgggagagtctgtgtgtatgtgtcttccccggaatccacaccaccccaccctcctcctgtcccgtggtttcatcatatctctttgcataccccatgtcttccccagttgtcccctggagtttggggggacatcccgcctcaggcatccttctcaaggggaagccaagagaggcatcaggatgggtgggtttctgattgtggcaacgtttgcaaccgttcacgattcaataaatattggatgaatttaaccgaaaaaaaaaaacaaacacacgcaccaaccacacgaacaaccagcggcgggcgcccgcacccacaagaacacccccggagagggaggcccccacacagcatcgcgcgcacccccacagcatctctccgcgacacacaagcgggacgggcccacaacaacgaggagagccgcacacaacagaacgcgaacaccaaccacggggcccggagcagcatacaccaacccaacgcacgcgacccgtggcgcccacacccactcgccgcacgcaggggaccacctcggggaaaccgacacaccctcaactctccggggcggcggacccacacagtggcgcccagaccgtcgagcacatatagacaggcgcgaagcgcgacaagaacaaactcaaacgggcgtcacagtggtaacaccacaccccaacgacgcccgcgcaggcaacacaagcgcaacgcacacgactgacacaatccgcaccgcgcaaatcaacgcacccaccacgaccacaacacgaagcagcacccacccaggacccgccccaccgaccctaagcccatccaccgacctacgacagccacccccgtaaccgcacgccgcagccagcaaacagcacccaccacgctcgcaaccacacagcgccacaggcccacgcacccacacacgacaaaccaacacacaacactaccccaaccacacacgacaccacacacacacagccacccacaccgaccaacacaaccacgaacaaaacacacacaccaggcaggacagcagaggagacaagacgcacacacgagacgcggcgagacgcgggcggagcggcgcgaccgagccgtgcggggaacacaggagacgacagcgcccgcgagcccggcaagcgagggcaacgagcgatgacagcggcgcgagacgatagcacgaggagcgcacgcacgaccgagcagagcaggagaacgaccacggccacacaagccacgacgaggagaagcacgagcagagcaaccacggcagggaaaagcggagtacggaacgaccatcgagcacaacagcagcagcgagaagaggaacgacagagaagagagagcgcagcacaccaaagagagacgcaaaaacgcagcacgcagagccagggaacggcaccgaacccagcgcactacaagacacggagagcgagagacgcggcgacgcgagggccaacccgacggcacggaacgagctgacggcacgcagagcgacagacgacacagagaccgagacacgcgacaccgagcgacggctgagaacagacacacgacgcgcagcagtgagagcacgacacacacaacagcgcagcaaggagcggcgacgagcagcacgcgcgcgccgggagacgagagtagcgggaggacagcagcagcagcagcggcagaaacgaacgaggccagacgcacgaggagagtcagaggcgaagcgcaagagcggcgcagagcaccaagcaagcgaaagacgacaagcaccacgcgacagacaacgcgcacaccggcgcgaccgcggaggcaaccgacagagagaacgagaacagcacacgacgcacgcgcagaagccggaaaccagggaagcgagacaaacgcgagcataggacannnn

SEQ ID NO: 23029 - DNA, 312 bp, Homo sapiens
  misc_feature 310, 311, 312: n = A,T,C or G
acgcgggggagacttctccgccgcctccgccgcagacgccgccgcgatgcgctacgtcgcctcctacctgctggctgccctaaggggcaacttcttccccaacgcccaagaccttaaaaaaaacttggaccagcgtggttttcaaggcgaacaacaaccggttaaccagggttatcagtgacctgaatggaaaaaacattgaagacgtcattgcccagggtattggcaagcttgccagtgtacaggtgaaatgatatgttactggtattcgcttcaaaatcatctgagtgtggggtaattgagtacctcnnn

SEQ ID NO: 23030 - DNA, 658 bp, Homo sapiens
  misc_feature 649, 650, 651, 652, 653, 654, 655, 656, 657, 658: n = A,T,C or G
acaatatgatggagtctttctctgtcgcccaggctggagtgcagtggcacgatctcggctcacttagaaacagggtttcgccgttttggccaggatggtctcaatctcctgacttcatgatccaccctcctcggcctcccaaagtgctgggattacgggcatgagccaccgcgcccggccagaatagtcctaatttttaactcttcagagagtgaaggaataactccaaatagactcccagaagttatgttcagataagtaaaccatcatgcttacattcagaaagttctgcttctcaggtaacttaaatggaaatggaaatgatgagtgctgggaagaggtattaagtagctcagagaatgcccttgcaatagactgaggtctttaacctatgtgaagaatttgaataaattgcttgaaatgtgaaagtggaaaaatgagaatatttaaataaaatacaaatttttaatatatgtagccaaatgtataagttaaagattaccaataaatatttgtcaattttattcaaaactttaaattctctgatttcaagttgagtttaaaaacatattttagatttttcttatttggaaaatattatgtatttgggttgatagaatagactgaaattgtattatgagtggccaannnnnnnnnn

SEQ ID NO: 23031 - DNA, 853 bp, Homo sapiens; identical to SEQ ID NO: 22576
  misc_feature 1, 850, 851, 852, 853: n = A,T,C or G

SEQ ID NO: 23032 - DNA, 1276 bp, Homo sapiens; identical to SEQ ID NO: 22177
  misc_feature 1273, 1274, 1275, 1276: n = A,T,C or G

SEQ ID NO: 23033 - DNA, 1425 bp, Homo sapiens
  misc_feature 1, 2, 1425: n = A,T,C or G
nnacatttttgtaaaacttcaaagatacttacctagtaatatagtatagaatttatattctgaaagctgtgtccactaaaagattaacagtggttatctctgggtgattttttctgttcttttttgttcatctgtccatttttcctaaaaacagatttctttagtcataaaaataataaaatataaagtattggaaaacagtgaatatttgaatttcattcatttgaataagcattcaaatgaactgcccagtgaacttataaagacagtggatatacttaaaattcttgttgtgaggacataaaatgataggtaaaagttgcattacctctgggactggaagctggaggagtcaactcgatggttattacagagccattgctgtaagggacagccttgacatctgtgaaatggggataaaattagcctagacatgtggagaagatcaaatgaggtattgagtgtgtgagctgtgttaggctggctcctactctctccccttgcactagcagaaccagtgcccagtcagatacttgggaagggctgaaggagggtctcacctgtgcccagaaataagtccagacagctgagagatgggtgccactcttcctgggtaatgccatacttgaaaggtagtgtgccccttctcatggatcctgcaccctcctaaggccccagctgctgctggtcgggctgaagaccatgatggactaagcaacactgtcccaacagaaaagtggagaattccctctctacctacaataggaattatcctaactcaggttgttagtacccaattgtcacttgggccttgatgttttatgaagtttttacaaaacactgctttccatgttttttgttgatttgtgtatatttttgcatatagcccgtttccaccggatttagataagtggagattgagccaggaggaaaagctgaagtgacgagatggtgtgctattctcatttggttaatcccctagtctgctaacacttttttcccttaggaattgtctcccaggaaatttctgttaagccctgctttactatttcaacagacccatctacctatgtgattttttccccctggctcttgagtagctttttatttccttacagtatttttttttaataaacttttaggatggttttagatctacacaattattgcaaagatagtacagagtatcccatatgcactgtcccctattattaacatcttacattagtatggtacatttgtcactgttaaccaatattgatacattattattaactaaagtacgtactttatttggatttcccttaatgtcctttttctgttccaggatcccattcaggttacatttagtcgtcatgtctccataggctccacttagctgtgagagtttttcagactttgcctgtttttgatgaccttgacacn

SEQ ID NO: 23034 - DNA, 1942 bp, Homo sapiens; identical to SEQ ID NO: 22067
  misc_feature 1937, 1938, 1939, 1940, 1941, 1942: n = A,T,C or G

SEQ ID NO: 23035 - DNA, 3201 bp, Homo sapiens; identical to SEQ ID NO: 22147
  misc_feature 3110: n = A,T,C or G

SEQ ID NO: 23036 - DNA, 2929 bp, Homo sapiens; identical to SEQ ID NO: 21129

SEQ ID NO: 23037 - DNA, 1632 bp, Homo sapiens; identical to SEQ ID NO: 22203
  misc_feature 1, 2, 3, 4, 5, 6, 1620, 1621, 1622, 1623, 1624, 1625, 1626,1627, 1628, 1629, 1630, 1631, 1632: n = A,T,C or G

SEQ ID NO: 23038 - DNA, 1219 bp, Homo sapiens
  misc_feature 968: n = A,T,C or G
ggagtcaatatagggagtcgacccacgcgtccggaaaagccatctttgcattgttcctcatccgcctccttgcccgccgcagtcgcctccgccgcgcgcctcctccgccgccgcggactccggcagctttatcgccagagtccctgaactctcgctttctttttaatcccctgcatcggatcaccggcgtgccccaccatgtcagacgcagccgtagacaccagctccgaaatcaccaccaaggacttaaaggagaagaaggaagttgtggaagaggcagaaaatggaagagacgcccctgctaacgggaatgctaatgaggaaaatggggagcaggaggctgacaatgaggtagacgaagaagaggaagaaggtggggaggaagaggaggaggaagaagaaggtgatggtgaggaagaggatggagatgaagatgaggaagctgagtcagctacgggcaagcgggcagctgaagatgatgaggatgacgatgtcgataccaagaagcagaagaccgacgaggatgactagacagcaaaaaaggaaaagttaaactaaaaaaaaaaaggccgccggtgacctattcaccctccacttcccgtctcagaatctaaacgtggtcaccttcgagtagagaggcccgccacgcccaccgtggggcagtgcccacccgcagatgacacgcgctctccaaacaaccaacccaaaccatgagaatttgcaacggggggaggaaaaaagaaccaaaacttccagggcccgtgatatatattcttaacaggtactttaaacaaggaactgggcgggattttaatttaccattaaatatttgtggacaattttgtagggtcggccaatttaaggacctcggatgaacgaacaaggcctcggagacgatcacagggaccaattccgaacattacctgtgggggggtgcccggggttcatttataactccagggggaaanaaatcctgtgtttaaacaaacaaatagaacaataaaaacaacccggggcgcttattgttggtgggggacaacgagaatatagggaaggacgaaattatttctcggcacccaattataaaagggacaagcgggccccaggaaggaattacagcagatataattcatacgaatcaacagagaagggtataagacgtgactaacaaaaataaaagcaagaaaaaaacaacaacaagagatgaataagtaatcaa

SEQ ID NO: 23039 - DNA, 1406 bp, Homo sapiens; identical to SEQ ID NO: 22088
  misc_feature 1, 2: n = A,T,C or G

SEQ ID NO: 23040 - DNA, 930 bp, Homo sapiens
  misc_feature 912, 913, 914, 915, 916, 917, 918, 919, 920, 921, 922, 923,924, 925, 926, 927, 928, 929, 930: n = A,T,C or G
cacgcgtccgatttttttgtacttttcttatcctagtctcttatgaaagaaagatatagtaactacttcatcaattttcatttttattactgactttcacatatcaagattcagaagttctttaaatatttaaacacgtattcttgtttagtccatatactacctcttttctgtcatttgaactctctctgcctcctaatatataggttatacagctgccttaaattagtgtaaagtaatacggtttcagtttttttcttgccgcatcttgtgcattctttcctctgttttccttttgactttaaatggaaagagagcaggcgtatgcgccagcagcattctatgcctgtgactcctgagtagccttttccctctcctttttcctcttgtgtctggcctgtgaatacagctgactgtatacagggttactgttggggttattgtggggcagtgtaaggtgatgaagatctcactgacttagtgttgatggcttgagtttgagtcctggtattaccactcgtttgttgataatcttaggtaaataaactggcattgctaagccccagaaaaatgtatttagtggaacagatgaaatatgattcagtggttaggaagttaacttctgaagacagacaaacctaagtttgaatcatggttcaccccttagtggctttgtggccttgggcaagtttctttaattttcttatctatactgtgaacagtacttacatcataggtttggtctgaagattctgtgagataatgcatatcaagtggttagcactttgccaggcacattgttaagtgcccaataaatgtgggccaaatgtgatagctcacccctgtaatgccagagctttgggaggatcctttgagatcaccctgggcaatatagcaaaatcccatctctannnnnnnnnnnnnnnnnnn

SEQ ID NO: 23041 - DNA, 482 bp, Homo sapiens
  misc_feature 1, 2: n = A,T,C or G
nnaaatcctgtcctgcaaccgatgcctttgtccaggaaaaaacggcacagtgatttaatggtaagtcactataaacatgaagggaaagactgccatccaaggaagcgcagaaaaggacacccctcaggtcctggatggaggaggatgacccccaagtcctggatggaggaggaagacccccaatactggatggagaaggatgcccccagtcctagatggagaaggatgcccccctcagtcctggatggagacgtcatgagtaactgtcggtaagaaacatcatgttcctcattctgcccttgctccttgggctccaacaggaaaaaccagaaattggtgggagggcggtgcactcggggaccctcaagccttctggaacaagccctgccatcctccgccgcgggctcagcggcagctgccacctgcacactcctggaagcagcagcggtggcagctctggtctctgccagctccccccgcgt

SEQ ID NO: 23042 - DNA, 1828 bp, Homo sapiens
  misc_feature 1, 159, 160, 161, 162, 163, 164, 165, 166, 167, 168, 169,170, 171, 172, 173, 174, 175, 176, 177, 178, 179, 180, 181,1814, 1815, 1816, 1817, 1818, 1819, 1820, 1821, 1822, 1823,1824, 1825, 1826, 1827, 1828: n = A,T,C or G
natgtggagattttgttcctatcctatagctcttttgtattctttggcatattttatatcctggtagaagaaaacaagtgcttgtttccaattttcttttttcttatttgctctcaggtagttcttactccatacaacaaagactttttgtttgttggnnnnnnnnnnnnnnnnnnnnnnngctctgtttcattttgttttagagacggggtttcaccatgttgtccaggctggtctcaaactcctgacctcaagtgatctgcccgccttggcctcccaaagttctgggattataggcgtgagctaccatgcctgacctgacttttgtttttagatattatgcttgccatgtgatagggcctgcaagcctcattgctaggcttactaagaaaattttagtttttcaaaagcattataatttcctaagaaactgaattctttttttatatgtttgagattcccatcattagtaatataagatgaaaggtaagtgccaaaaatgtatttttaaagaccctcaagtttaagatttatcctgattataagccaagttttatagtatatttaaccaattccatcaagaataattttaatatcaaaaattagtgttttctgtagccattgtccatgtcagagttacagtcctttttgtcattgataatataacctatgaagcagataaggattgaggaatatgactggaaggaattactatttagctaagctgacaaggtcgcttcttaagatgacatttggtttcagtaatctgactattctgttttcactttcatcttctttctaaatgaaaacaaaagtgctccctcccttcctggaaacctcagtaacactatgggaaaagtagaacatgacattgcagcctattgatttcttcttccagataggtttaaagtactccttaagttctgactaaatagaactaagccttattaaaaataactgcctcttgttcatgttatctgtaccttcagggacctgcctttcttcaagtatttcctagagtatctattatgatactgaagaagctaattatttgtgttgtaaatgggtataaatgaaaaaaaaacatactggtttctctagccaggaaaaatgctttctggtgtaatatatcttgctccagaaccctcattctaattgtaacactaggatcaaagaaacaaagtcactttgtggaccacagctaaactgtggatattttcccaaagacataagatttttatggcccgagcctctagaaaggaagccatgtttaggagcaaccagctttcctcccagctttagggggcagagttcctgagccagaggacttactgtccagctttgagaacctctccagagtatatgcactgggtactgctctttttcaagagaaccaaattaagaggatggcaagaaacagtagaagcacagaggaaagacaactctgcatgtgcctgtgtgaatgtgtgcatccatggagtatttcccaggtaaatactagtactggggacataggctaattgtgtgtcccacactgcaagatgctagggcgtagttaacactgtggtatacatacaaatcaggcactgtccaaaagattttttaaaatctaaagtctgaaatgtaaaaatataaggtcccaacccacttttacacttttaaagagatcccatacctgtttcactgcctgacgccaacacctcccatgtatcactactctgggcccccattcattcaagaggagacccatggggaacaaggcaaggttgtttgatttgctgagcataaaggaagaaatgaatactttcactaannnnnnnnnnnnnnn

SEQ ID NO: 23043 - DNA, 425 bp, Homo sapiens
acctaactgccgagatcctggagctggcgggcaacgcagcccgcgacaacaaaaagacccgcatcatcccgcgccacttgcagctggccatccgcaacgacgaggagctcaacaagctgcttggtaaagttaccatcgctcagggcggtgttctgcctaacatccaggccgtactggaatgccatcagccagcaggcccctgccatcatctatgacttctatctgtggctcactggaaggaaacccaggcaaggccaagatggctcaaagagcaaccagccacctctgcagcctgccacctcctgctggcaagatttgtttttgcatcctgtgaagagccaaggaggcaccagggcataagtctactcacttatatctgtctggaacataacgcttgtttgtttttacaacaaataaaattgatc

SEQ ID NO: 23044 - DNA, 1613 bp, Homo sapiens; identical to SEQ ID NO: 23017

SEQ ID NO: 23045 - DNA, 397 bp, Homo sapiens
  misc_feature 397: n = A,T,C or G
actttgctttagtaaatatcttaggattattacttttgttttccagtaaccttgctaagcttctgaagaacttttctctcatgttttctggttcaatttctgcttcattagtatctaagctactgaggttatcaccacccatgctttgagacatcatgggaaaccacatatatgacccattatcttgaagtgggtgtggctctggagattcacattccattctatcttccatagactgaagctgggtgcctaaagactcctttgcagaatccagagggatcatttcttccatagaaacttcctgcccatatgtgccctgtgagacctgctgtctaggttcatcaagctccctctccaaatcttccagcaaagtcaccacctcttctccactctcagn

SEQ ID NO: 23046 - DNA, 886 bp, Homo sapiens
  misc_feature 1, 2, 885, 886: n = A,T,C or G
nncctaacaacctggctggctggcacttctaaaaaccgatcctgaggcaaggcttctgtaaaagagtttatactggaagttaaaaatcatcaaattattagatactgggaatggagtagtaaagtagacagagcagggaaggaataaagtatgaattttcaagctggttacccatctgggcaactggagctcagttttgctgggaaagtctggaagacagtgtcagatataactaagagttattcccatcaaggggaaaggaaactgtgcttttcatccaccaaatccttgcttaacattggaatacagatgcttccaagacattaactttgtggcacttctggcttttcctacacacttattgtgtatgccaccatgtctagggggaaaaaggcccacaggcaaagaggtaccagcattcataccaccagctttcagcttgtagaggtggccgccaagaggaactcgtagttggcagtgccaactacaactactacaccaaccagctggaaactatacaaagagtatgaacaaagttcacaggagaaacaaggctctgcaacatatgaaaatatattctacttcattcataatgagacgcatgaaaattgtaactgtatcaataccatttctcacctagtagatgggcaaaaatccaatgtttgagcaccattctgggggtcggcggggacacgctggtccctacatggctcgggattgcgaataggaacggccgtgggagcagacgggaaatctttccactcacacacgggcggcggcgttgggccgggagcacccaggaaaatggtgtgattgtccacatgttagaaaaaacgtgctgttttcgctcacaacacagagcaagcagggaaatacgcggcagann

SEQ ID NO: 23047 - DNA, 2548 bp, Homo sapiens; identical to SEQ ID NO: 22221
  misc_feature 1, 2547, 2548: n = A,T,C or G

SEQ ID NO: 23048 - DNA, 2200 bp, Homo sapiens; identical to SEQ ID NO: 21879
  misc_feature 2020, 2038, 2086, 2165, 2184: n = A,T,C or G

SEQ ID NO: 23049 - DNA, 1496 bp, Homo sapiens
acccacgcgtccggttatttttgattctttatgggaaggggcggcacagggccgaggcgtagtgtgggtgactcctccgttccttgggtcccgtcgtctgtgatactgcagtgcagccatggcagaaccgcagcccccgtccggcggcctcacggacgaggccgccctcagttgctgctccgacgcggaccccagtaccaaggattttctattgcagcagaccatgctacgagtgaaggatcctaagaagtcactggatttttatactagagttcttggaatgacgctaatccaaaaatgtgattttcccattatgaagttttcactctacttcttggcttatgaggataaaaatgacatccctaaagaaaaagatgaaaaaatagcctgggcgctctccagaaaagctacacttgagctgacacacaattggggcactgaagatgatgagacccagagttaccacaatggcaattcagaccctcgaggattcggtcatattggaattgctgttcctgatgtatacagtgcttgtaaaaggtttgaagaactgggagtcaaatttgtgaagaaacctgatgatggtaaaatgaaaggcctggcatttattcaagatcctgatggctactggattgaaattttgaatcctaacaaaatggcaaccttaatgtagtgctgtgagaattctcctttgagatttcagaagaaaggaaacaatgtgattcaagatatttacataccagaagcatctaggactgatggatcactgtcccgattcaaattattcttcagtccatttccccttcctatttcagctgttccttttcacctaactgttcagtcattctggttttcaagcagtgctttatctcatgtccttgaatatagttgtgtaactttattttttaggtaataattagaacagttcccttcagaggctgcatttgccttcttctgccacctaaatattacttcccttcaaatctgcctttgaatcatcatttttaaaaaaaaattaacatgtttttgttgtagttatcttctggggtttcaattcctcagaaacaacttttttcacaacggaaaggaaagaacactagtgttctttcagtaaagtacaaagtgtttattttacaaaagagtaggtactcttgagagcaattcaaatcatgctgacaaggatactgatagatttatttgggaaaggggaggaggaaggaaatgatatggtacccagacactgggctaggctgcaactttatctcatttaatactcccagctgtcatgtgagaaagaaagcaggctaggcatgtgaaatcactttcatggattattaatggatttaagagggcatcaatcagctcaactcaagatttcataatcatttttagtatttagattgtgcctcaaagttgtagtacctcacaatacctccactggtttcctgttgtaaaaaccttcagtgagtttgaccattgtgctcttggctcttggg

SEQ ID NO: 23050 - DNA, 1546 bp, Homo sapiens
aagtagctgggattacaggtgcacaccaccatgcccagctaattgtatattttttagtagagacggggtttcaccacgttggccaggctggccttgaactcctgacctcaagtgatccaccctcctcggcctcccagtgatgggattacaggcgtgagccactgctcctggcccccacttccttttgatttctcagatcagtctttcccttctgagccatggccttctgtgcacccagctcagtggctcttcacccctaaaactaagtgaagtcatccttccccaaaaggacccctgggagatgttctggccctctgctgactactcccaggaatcagcacctcaaggactatttgagaatgttgtgctctctattggtcaccttgagactccgttcccctgctgccaactcttctcttctgccctgtgtattctgctgtgatccccttaacggcttttctgtgctactagcttagccctaggccttttatgaatacctgagtcttataacaatgaacttcttgagcaggcagtgtccaacttctttgctcttcagggacctgagtgtgcacctttcccttttgcaggtctatttgacatagtaatctagtgtgttggggaggggtagccaagcaggctgcagtgtctgcaatgcagagggcttggggaggtttgggtactctctgctgccactactgggatgatattcagaagagagaggacctcatactgtgactggacccaggaccctccctggaagagagctcagcccagctgtgtgtgtgtgtgtgtgtgagtgtgtgtgtgtgtgtttgtgtgctgtgctcatgtgcacctgggtgtaaaatgactgttatctggttgtgttactcagggtgggctggggactcaccagaagaatcccccccagcctgcccaagacaggtttttcccttgtaccatcttcagagaggtcaggggaagagggtccaggtgggttaaggggggtcgctatggataaccactaagaccagactgctgccaggaggagtgggggataatgaggtggccccagggtcctggcacctggctttggttttccgtcttctttcctcaggacgcccctgaggcctgggacctgtgcctggcttcgaggagcatctgtggctgggtgatccagctgctggtgtgatcatgggcttccctcctctcagcagggcaggcgctcctgccccagagactgggcaactggctgtttctatgacgtatttatttttacttgtgtttcatgtcacttttttaaaaaaaagcaaacagaacaattgtaagtcagtataactgcctatcagttttctttatttctcttggtacatcacatttacctcaaaaaaacaacggggggggggctaaagtttccttggggccaggtaggcgtaccggttcgggacaaggggccacagggccaataaacaggcggcgggttcaagtcggctgacacgcgccggcctgggagaccctcggggacactggacccagcgacgcgataacacggggaccgctcgggtcg

SEQ ID NO: 23051 - DNA, 2946 bp, Homo sapiens; identical to SEQ ID NO: 22213
  misc_feature 1, 2945, 2946: n = A,T,C or G

SEQ ID NO: 23052 - DNA, 1386 bp, Homo sapiens
  misc_feature 1: n = A,T,C or G
ngagaatacaagaaccttttattttccatccagttgggcagcagggaaaggctaggtgggcccagcccgcccttccttcctccagctggctggagattattagccaggagacagcagccctggaacccagactctgtctcccccttgaggtcacagatgttgaagttggaatctcgctccttcccctgactaccatcctaggctgggcctcaagactagtgaggcctgtccccaccatccctggccttgttgtggggctcaggaactcagagtcccagtgttgagtctgggagcactaggtcttcatagttccaggcccagagctacagctgggctgggagcgtgtgtgtgcactgtaagaaggagctgatgatactggccacgtgctggggttcgctcatgtggacacagtgattgcctgggacttccacaaactggaaccgcttagggacttggaggcctcccaggggtctaggccagctgagttgtgaagttgcatggcagggacagggcagggccgaggccagggttgctgtgattgtatccgaagtagtcctctttgagggtggatttcattgtgtctatcatgatagacagggactccttgtcagagtaattctctcttggatcaaaatatccgtggactgctttgatcaacaggacatgggcctgcagcttcctgatggaatgcgcacacagctccctgctgacgaagtcaatgctgttctctgcctctgcagcagctgcttcaggctgaacacgtgcgagggctcctgggaggcctctacctgcagcacgtgctctatggctctccgcttgtaggtcagcaagttctccatttcatctgattccaggagaaagagcggcgtgtccagcaagataagtttatccaccatctcggggaaggtacagaaaaacattccgcccacgacgccaccgaagctgtggcccagaatggagaatcgattccatttcaaggctgccacaactcttcggatctcactcacaaaagtctggaggtaatatgggacacctgggctgtaatgggacgagagcccatgacctccgaaatccatggcaacgtaataaaagtcttgcgggagaagagggatgagtctgtcgaaggagctggcattgtccagccagccgtgcaggcagagaactggagggccctgcagggagccccaggctttggctgcgatgtggccccagggcacagccagcttcagctctgagatcagacctggtgcggcgttctcactcatcgctctcgtcccgcgaatgcgctgctgtcactccctcacgcctggctaggtcgcaggagcagagtgacgcccgcaattccgggccctatctccaagactgtacccctcgtgccaagcttgg

SEQ ID NO: 23053 - DNA, 2576 bp, Homo sapiens
  misc_feature 1, 2, 3, 4, 94: n = A,T,C or G
nnnnctatggctcccatttgtaatacaaggaaatgtcagcttctagttttgtaacgtcttgcccaagagctgcgaccgttaacttgtggagttnggacggcgtcaagtcaattggttgcccgacctttattctgccttgtcccatagatttagaaagaggctgacacatctggtaactagtttacggtcatctgcctctaagcgacatttagggtaagcgacatttttcagaaaccaaggccctccctctcgtctcactagtgggaagggtggaaagaacaggacagaaagctcttcctcttgtgtgaggcagttgctgtggaagccccataggcaggaggcccccgggcagcacatcctgtctgcttgtgtctgctgcagagttctgtccttgcattggtgcgcctcaggccaggctgcactgctgggacctgggccatgtctccccaccccaccgccctcctgggcctagtgctctgcctggcccagaccatccacacgcaggaggaagatctgcccagaccctccatctcggctgagccaggcaccgtgatccccctggggagccatgtgactttcgtgtgccggggcccggttggggttcaaacattccgcctggagagggagagtagatccacatacaatgatactgaagatgtgtctcaagctagtccatctgagtcagaggccagattccgcattgactcagtaagtgaaggaaatgccgggccttatcgctgcatctattataagccccctaaatggtctgagcagagtgactacctggagctgctggtgaaagaaacctctggaggcccggactccccggacacagagcccggctcctcagctggacccacgcagaggccgtcggacaacagtcacaatgagcatgcacctgcttcccaaggcctgaaagctgagcatctgtatattctcatcggggtctcagtggtcttcctcttctgtctcctcctcctggtcctcttctgcctccatcgccagaatcagataaagcaggggccccccagaagcaaggacgaggagcagaagccacagcagaggcctgacctggctgttgatgttctagagaggacagcagacaaggccacagtcaatggacttcctgagaaggacagagagacggacacctcggccctggctgcagggagttcccaggaggtgacgtatgctcagctggaccactgggccctcacacagaggacagcccgggctgtgtccccacagtccacaaagcccatggccgagtccatcacgtatgcagccgttgccagacactgaccccatacccacctggcctctgcacctgagggtagaaagtcactctaggaaaagcctgaagcagccatttggaaggcttcctgttggattcctcttcatctagaaagccagccaggcagctgtcctggagacaagagctggagactggaggtttctaaccagcatccagaaggttcgttagccaggtggtcccttctacaatcgagcagctccttggacagactgtttctcagttatttccagagacccagctacagttccctggctgtttctagagacccagctttattcacctgactgtttccagagacccagctaaagtcacctgcctgttctaaaggcccagctacagccaatcagccgatttcctgagcagtgatgccacctccaagcttgtcctaggtgtctgctgtgaacctccagtgaccccagagactttgctgtaattatctgccctgctgaccctaaagaccttcctagaagtcaagagctagccttgagactgtgctatacacacacagctgagagccaagcccagttctctgggttgtgctttactccacgcatcaataaataattttgaaggcctcacatctggcagccccaggcctggtcctgggtgcataggtctctcggacccactctctgccttcacagttgttcaaagctgagtgagggaaacaggacctacgaaaacgtgtcagcgttttctttttaaaatttaattgatcaggattgtacgtaaaaaaaaaaaaaaaaaaaaaaatttgtcgtacacgtacattgtgcaatgacagtcacaatcaattcctcagcgcacccatcgccacggatacgatacattagatattctgaacttgctcatcttaggacttcacattggtgtcagtgttttctgacaaatcacgtgtatcaggaatgaatgagggaggtgtggctgggtgaaggcagagagccgaccctacaggtccacatctgcacatacatgcacaggaatgcatgctctcacacacatgcatacacacacgcacacacacagacatgcacatacactcacacgccccaggaaatccaaggaatcactgagcctgctgttggttgaggcatttctgagtatccaccctacctgtagggtcagatgtactgattgacacagaaaattaccctatgtaccactaggaggcggcagaatctcatttgggttaatctgtgtttgtctttaaaaaacaaaaacaggccgggcatggaggctcacgcctgtaatcccagcactt

SEQ ID NO: 23054 - DNA, 459 bp, Homo sapiens; identical to SEQ ID NO: 21058
  misc_feature 1, 2: n = A,T,C or G

SEQ ID NO: 23055 - DNA, 628 bp, Homo sapiens
  misc_feature 1, 2, 3, 362, 621, 625, 626, 627, 628: n = A,T,C or G
nnnacgcgggggtcggcgccattttgtctcggcagcggtggccgtagctccatcgcattttatgtttctggcgagaagggaacggagttttcatcaggtagattggtttttgtgcggccgtcctccaccgtttcctccaggacagcacctagtcgtggccggaggagtctcagagctgtcagaaagaataagactgattttatgggaaaattaagcagatgctccagtttgagaaacctggatctgcgatctgtttgtggctgggtgcagtggcttgtgcctgtaatcccagcactttgggagtgcttttataagtctaaatatattctttggaatctctaaagcaaaacttttaaactttnttttttttttttttttttttttaggtaccagcatcaagatgatttatggtaataaggtactcagtctttgcttaaaataaattttacgtttaccaaaaaaaaaaaaaaaaaaaaaaaaaaaaacatgtcggccgcctcggcccagtcgactctagactcgagcaagcttatgcatgcggccgcaattcgagctcacttggccaattcgccctatagtgagtcgtattacaattcactggccgccgttttacaacgtcgngacnnnn

SEQ ID NO: 23056 - DNA, 1859 bp, Homo sapiens
  misc_feature 1, 2, 3, 4, 5, 6, 7, 8, 9, 10, 11, 1859: n = A,T,C or G
nnnnnnnnnnncgctctccgttcggcggcgctcccatggcgcacattaccattaaccagtacctgcagcaggtgtacgaagccatcgacagcagagatggagcatcttgtgcagagttggtgtcttttaaacatcctcatgttgcaaacccacgacttcaaatggcctctccagaggagaagtgtcaacaagtcttggaacccccttatgatgaaatgtttgcagctcatttaaggtgcacttatgcagtggggaatcatgacttcatagaggcatacaagtgccagaccgtgatagtccaatatcctttgtcgttcatggcagctgtcccgcatagaacacatgcagtggattacttgggacttgagacccggaaacactgggccagttgctcatttctgcagttagaaaggaatgacagtgttttggaacagaagctcgtttcagctctttcacttggtacatcattcttgcgagcattccaggcccacaaagaagaaaactgggctctgcctgtcatgtatgcagtagcgcttgaccttcgagtgtttgccaataatgcagatcaacagttggtaaagaaaggaaaaagcaaagttggggacatgttggaaaaagcagcagagttactgatgagctgtttccgggtctgtgccagcgacacccgtgctggtatagaggactctaagaagtggggcatgctgtttctggtgaaccagctgtttaaaatctacttcaagatcaacaaactccatttatgtaaacccctaattagagcaattgacagctcaaacctgaaagacgattacagcactgcacagagagtaacatacaaatactacgttggacgcaaggctatgtttgacagcgattttaagcaagctgaggagtacctgtcatttgcctttgagcattgtcaccgttctagtcagaagaacaaaaggatgattctgatctatttgcttccagtaaaaatgctattgggtcacatgcccactgtggagctcctgaaaaagtatcacctgatgcagtttgcggaagtaaccagagctgtgagcgagggcaacctgctgctgctgcacgaggcgctggcgaagcacgaggccttcttcattcgctgcggaatcttcctcatcctggagaagctgaagatcatcacctacaggaacctctttaagaaagtgtatttgttactgaaaacacaccagctgtctctggatgcttttctggttgccttgaagttcatgcaggtggaggacgtggacattgacgaagttcagtgtattctggctaacttgatatacatgggacacgtcaaaggctacatatcgcatcagcatcagaagctggtggtcagcaagcagaacccatttcctcccctgtccacggtgtgttgaaagtacacggagccccgaggacggactcggctggttctggagtctttgtgagacttctttgaaggaggctttgcgtgaaggctgctcggctcacttttcctaagtgtggttcctgaaggctgtctttgtaactttttgtagttctttgtgtaaaaagcgtattctgaatttatacacatggcatgttcttcattatatcttccaggatacatctatttttatatattaaatttgaatgtgttatcaaaatgcttggttaacttaaggcacctttttaaaagcagaatttaatttgatttaaattttccagattttatagcttgcctgtatggatgctcctcaatttatgatggggttacatcccaataaacttattttatttgcctttgctttgttggttaaaaaaaaatttcttttaaaaaaccatcttaaattgaaaatacatttaatacacctgctacn

SEQ ID NO: 23057 - DNA, 1010 bp, Homo sapiens
  misc_feature 1, 2, 3, 4, 5, 1009, 1010: n = A,T,C or G
nnnnnagcgtccggcctgccggggttttccacctcatccctttcctccggccccttgatttgtgctggacaacaaatggcagcaccaggacctcgcctcatgtggctttgtcttggatcttgcccttctccatcgctgatgtgatacagctctagaatttcgtgaagttgcatgcaaagttgcatgcagcccgtgggtatgactgtctcaggcccccagctcatttgccaagaggaaaccttaacccccctgagagggtctgcgtttcttctagagctcctacctcagtggtgtgcacagagttggagacacctgagggctggtccacgtctcacctttgccatacgggtcatttcttgatcaaatatatgactggggtcctggtttactcccgcccaccctttcttttaaagtattcttaacatgaaatccacaaaagcggaaacaatgaaccattcttgcactttacagaatcattgtccttagctttagaggttgttaatttcttgtttttaacatgaacagaatgtgtggttctgaaggtgtgtgggggtctcaagaaattgtcctttggggccgggcgcagtggctcacgcctgtactcccagcactctgggaggccaagggggacggatcacctgaggtcaagagtttgagaccaccctgaccaacatggtgaaaccccgtctctactaaaatacaaaaattaggcagtcgtggtcgcctgtaatctcagctcttccggaggctgaggcaggagaatcgcttgaacccaggaggcagaggttgcagtgagccgaggttgcgccactgcactccagcctgggtgaccgagtaagactgtctcaaaaaaaaaaaaaaaaaagaaaagaaattgtcctttggttgccttagttaccagagttgaatgaatgtacacatttcggtagtgggggggcagagcggataaccccttccttgtctgtttcctttgagaaaggacactccaccttttcaaaggtacttaaann

SEQ ID NO: 23058 - DNA, 976 bp, Homo sapiens
  misc_feature 974, 975, 976: n = A,T,C or G
cggttttttttcttatgccacgggaagtttagagagctaagattatctggggaaatcaaaacaaaaacaagcaaacaaaaaaaaaagcaaaaacaaaacaaaaaataagccaaaaaaccttgctagtgttttttcctcaaaaataaataaataaataaataaatacgtacatacatacacacatacatacaaacatatagaaatccccaaagaggccaatagtgacgagaaggtgaaaattgcaggcccatggggagttactgattttttcatctcctccctccacgggagactttattttctgccaatggctattgccattagagggcagagtgaccccagagctgagttgggcaggggggtggacagagaggagaggacaaggagggcaatggagcatcagtacctgcccacagccttggtccctgggggctagactgctcaactgtggagcaattcattatactgaaaatgtgcttgttgttgaaaatttgtctgcatgttaatgcctcacccccaaacccttttctctctcactctctgcctccaacttcagattgactttcaatagtttttctaagacctttgaactgaatgttctcttcagccaaaacttggcgacttccacagaaaagtctgaccactgagaagaaggagagcagagatttaaccctttgtaaggccccatttggatccaggtctgctttctcatgtgtgagtcagggaggagctggagccagaggagaagaaaatgatagcttggctgttctcctgcttaggacactgactgaatagttaaactctcactgccactaccttttccccacctttaaaagacctgaatgaagttttctgccaaactccgtgaagccacaagcaccttatgtcctcccttcagtgttttgtgggcctgaatttcatcacactgcatttcagccatggtcatcaagcctgtttgcttcttttgggcatgnnn

SEQ ID NO: 23059 - DNA, 3474 bp, Homo sapiens
  misc_feature 1, 2, 3, 4, 5, 3472, 3473, 3474: n = A,T,C or G
nnnnnagatgtgtgcacacccggatgttgtccggcttatcgtgggcgtcccagaggccccgcagagtgtccttccaagtcgaggcctgttcccggcggcgttaagcgcgccgtgcccggtcttataaggtctccttagggcccttgaccaaaagcgggacgctaagttggccccgggattcttttgacccgcgcccttgttgtgtttttggcaatcagtttatgtttaaagaattatacgttacatgttgacatagaaaaagacattttaaagaatgttcttaaaaggtttataaaaggcatttgttctggccaggcatggtggctcccgcctgtaatcccagcactttgggaggccaaggcggatggatcacctgaggtcaggagttcgagaccagcctggccaacatggtgaaactccgtctctactaaaaacacaaaaatttgctgggcatggtggtgtaatcccagctactcgggaggctgaggtaggagaatcacctgaacccgggaggcaaagtttgcagtgagccgagatcgcgccactgcactccagcctgggcgtcagagcgagactctgtctcaaaaaaaaaaaaagcatttgttctgaatgtgcctcatcatcccaggcaggcatctgtaagtttccattgtttccacaaaaaccagtggggttcccctctctggaaaaaagcacgaacattcttgctgcttggcaatgggtggctctcatgcccacacctctccacccaagggaacagtctctctgctcctcacctggcagaagcccagaccctgagtccctagcgcggggcagagcacagaaacatgatccagatgcagcaggccccgcccgtctagttctcctgcaacagcctcttagcactgctccactctgacctgcccggctggaatcacagttcccactccggcacaggtaaagatgagctcccaggatccagcaggggctctgcccctggggatctgccgccagccggctcttcccggtggacagaactaggaggggcaggctgtacccagcacatctcagagagatggaggcaagctgggttcctgatgatttccagctaatacaggtccttcctcctgcatgcaggcgccccgtaacgctttataacagacgcctctagacttctgtgggggtaaagtgaaggacccaaagcgacacaagtagtgtctgttcacacttccactttcaaagctaactactagctgttcaaatatactccatacagctttcagcaaatcaaagtgtttacctctcccacaccaagggaagaaaagatgcagactgcctttaaagcacctgtcagcaaggcgagggttttaaagatcagccttgagaatcaaagcagcagcagaagtgtcattactccagtgctctcccttcccgttcgtgggtcacacagagacaggcacatccccagcgctttgcaaacagaagcgctcccaaaagttggctagagggtacacttcggcaaagggatcatcttccccctggcttgctggactcttggaaatgcgtctgaaagcccttgccatcccgtcttgtgctgatgacagcatgagcccggttgcaccttgctcagcaacaagctgcgagatcctcagcttctcactcataccccaccttgagctgctgacggcggcctggagaaccgtgtgtggctgttcctggatgacatctgctgtcactagccttcccagaacacccgctgcccagggttcctgctgccttccccggtggacagattttgcagggaagactgaggaaatgggagggggagctctgctctaaagcagaaggcacagaaggtggggtttttgttttatagggagactgcccagtgtgctgcaaaaggacaaccaacaacagggagtgcccgtactcaccccctctgcatgattgctggtcagtggacgagaggtaaaagcaggcaggattattacaggaataaatctgcacttccaaagaggcagctcccatgactgagtttacaatgcttggagccccccagggcaagagtggcaccagctgggaggttgacactgcatcactgcttcggatgccctcacaggctctgactcgctgccaggtgctggtgaggctggaagaacttccttccttcctatgtacaatgcaaacagtgccgcttccagtgctacccacacgggtgcagcctcacgggagagttgcggagagagggaatgcgttcagttcagccagcggacggccaggggtaagcggcccctagtgggtcacatggcctatgatgtctggagaccgcagatcttcaccctctggagtctcatttgcagagtctcatttgtcgtccggtcactgtggccacctcaccctcgtcaccacgggcctttcctgtgccgtgctcactctgacactgagatgctgccaggcagttttttttttttaaatcagtggagtaagttctaagggagccccatgtgcttaagataaaaacgtagctggtaaagtggaggcagaggctgcttctgtgaggctgcatatatcttacaggacaaaaagttttgtacttgaaaaccaaattctgggaaatagccctgcaggtttttgggaagcgtctccctccctgtcgtgagttccacctgggccctccgggagaacagggacaggagaaacacaagcaaagcagacaggcccggaattgggagcctgagccctgcatattttggaagggaacccctcgagggactagtctggaatagtaggccaaacggtaggaagctttgattactctgctaacttgggggcccaagagtagggctaaagcattgtctgcagagaaacaaacagggaaattcagtaagaagggcctattttaacttgcagttagcaggagaatttgtccccagattttgatctagcttaaagtcccttgattccttcccctctacaaatggcaatcacggttgccctagagatgctgactgacaaggtctcccaaaggaggggcccttctgccatttatgggcccctaagtgcacacgtgggcttccatgcggatggaatcattggtccccaccagggaacctggactgtgggagctgccgccaccataggacccaagggcttccagaccaggaagaggcaaacagcctgcctgggaacacagtgctggaacttgggacttgggttctgagcggggctgctccctgggctgttgtcatcactctttcctttttttttttttttttcttttgagatagggtctcactctgttttccaggctagagagcaatagtgcaatcacaccccactgcagccatctgtctcctgggctcaggtgatcctcccacctcagactcccgagtagctgggaccacaggagggcaccaccatacctggttttaaaactttttgtagagatggggtctcactatgttgcccaggctggtttcaacccggacggcgnnn

SEQ ID NO: 23060 - DNA, 1051 bp, Homo sapiens
  misc_feature 1051: n = A,T,C or G
acgtagtctaggccatatgtgttggagattgagactagtagggctaggcccaccgctgcttcgcaggcggcaaagactagtatggcaataggcacaatattggctaagagggagtgggtcccgcgtacgcggggtagactgagggattttagcctcttccctctgatttttcctttcgcgaatccgtatctgcagaatgggccactgtaggggtggggtttattttgtttgtttttttttttcttgagttcacttgggatccttatttggtatgacttctgctgaaggacagaacattgccttcctcgtgcagagctggggctgccagcctgagcggaggctcggccgtgggccgggaggcagtgctgatccggctgctcctccagcccttcagacgagatcctgtttcagctaaatgcagggaaactcaatgtttttttaagtttggttttccctttaaagcctttttttaggccacattgacagtggtgggcggggagaagatagggaacactcatcccgtggtcgtctatcccagtgtgtgtttaacattcacagcccagaaccacagatgtgtctgggagagcctggcaaggcattccgtcatcaccatcgtgttggcaaaggttaaaacaagaaacaaaaaaccacaaaaataaaacaacgaaaaaaaacaaaaaagccaagaaaaccaacacaccgagtcagcccttggttcggctacaaaccctcaagaggggaagcaacctccggcagccgggggtccccgagggagctgctggtgacctgggccaaaaagctgggtggccccagcaatgcagaatggtgtgcgttagacggctgggggtctggtgtgtggccaggtgactacccacggtaggttgtgtccacaccatggacttcaggccacgggcgtggatgcctaagctcagcatggacggtacatgttgccaacgggcaatatccccggtgggcgaccagccgaaagctataagcaatgtaacagggaatgttaagcacaactactggagaactcgggaaggggagcaan

SEQ ID NO: 23061 - DNA, 2029 bp, Homo sapiens; identical to SEQ ID NO: 22618
  misc_feature 1, 2, 3, 4, 5, 2029: n = A,T,C or G

SEQ ID NO: 23062 - DNA, 689 bp, Homo sapiens
  misc_feature 1, 2, 3, 688, 689: n = A,T,C or G
nnncccctttttttccccgggggggatttaccccccccaaaagggaaaaaaaagggggggcggggccccccccccggggggggggggggaaaaaaggggaaaaaaaattccccccccccgggggggcccctttttttaaaagggcgccccggggggggatactttttttttttttttttttttttttggaggttgaatgcagggttttattgagtggtggaggtggttctctgaaggatggatgcagagctggaagcggggatggcacgggaagataatcttcctgctgggtggccaaacctctccgaccaccctcggctgaactcctctcggcgttcaaatgttcctcttctctctttctctgctgtatcgtttcaccattcatctgcttgtctgggatggtgaagacaactgtttgctcatttgcttggcgataggtgattgtctcgccgctcagctataggcgatggtctcaccactcggtgataggcgattgtcccatctaggtcgccaaaatgtgtctggaattggtgggttcttcgtctcactgacttcaagaatgaagccgcggacactcgcagtgagtgttgcagttcttaaaggcggcatgtctagagtttgttccttctgatgttcggatgtgttcacaagattcttccttctggtggggttcatggtctcgctggcnn

SEQ ID NO: 23063 - DNA, 415 bp, Homo sapiens
acagttggaatccatggcagttttatggaggccaaatatatcagatgaataggctaatttccctgagttgctggccttattagtccctactctgttgccccctggttacctaatgcatgttcaaaaggtatagttttcatcacctgcttgatcttgattttcagacagcatcaaatcagttgcaaaacaaatccaagctaaaattttgagtgtatgattaatttactatagcatgtaattatgcagtattttattttttgttttttattttttttgagacagggtctcgctccattgcccaggcagaggttgcagtgagctgagatcacaccactgcactccagcctgggtgacagagcgagaccctgtttcaaaaaaataagaaataaaaagtgagtcttcatattcaaattag

SEQ ID NO: 23064 - DNA, 4341 bp, Homo sapiens
acatggtggcaagtgctggactcgctcctgaattcccaaagaaaacgcctccataatgcagcctccaaactgcacaaattgaaaagtgaaggattcatgaaagttcttaaatgtgaagtggaattgatggccaggatggcaaaaaccattgacagcttcactcagaatcagacaaggctggtggtcatcatcgatggattagatgcctgtgagcaggacaaagtccttcagatgctggacactgtccgagttctgttttcaaaaggcccgttcattgccatttttgcaagtgatccacatattatcataaaggcaattaaccagaacctcaatagtgtgcttcgggattcaaatataaatggccatgactacatgcgcaacatagtccacttgcctgtgttccttaatagtcgtggactaagcaatgcaagaaaatttctcgtaacttcagcaacaaatggagacgttccatgctcagatactacagggatacaggaagatgctgacagaagagtttcacagaacagccttggggagatgacaaaacttggtagcaagacagccctcaatagacgggacacttaccgaagaaggcagatgcagaggaccatcactcgccagatgtcctttgatcttacaaaactgctggttaccgaggactggttcagtgacatcagtccccagaccatgagaagattacttaatattgtttctgtgacaggacgattactgagagccaatcagattagtttcaactgggacaggcttgctagctggatcaaccttactgagcagtggccataccggacttcatggctcatattatatttggaagagactgaaggtattccagatcaaatgacattaaaaaccatctacgaaagaatatcaaagaatattccaacaactaaggatgttgagccacttcttgaaattgatggagatataagaaattttgaagtgtttttgtcttcaaggaccccagttcttgtggctcgagatgtaaaagtctttttgccatgcactgtaaacctagatcccaaactacgggaaattattgcagatgttcgtgctgccagagagcagatcagtattggaggactggcgtaccccccgctccctctacatgagggtcctcctagggcgccatcagggtacagccagcccccatccgtgtgctcttccacgtccttcaatgggcccttcgcaggtggagtggtgtcaccacagcctcacagcagctattacagcggcatgacgggccctcagcatcccttctacaacaggccattctttgccccatacctttacacgccaaggtattaccctggcggctcccaacatctcatctcacgtccatcagtaaaaacgagtttgcccagagatcagaacaatggcctagggtcaggcccagccccaggcccagtggtattactgaattcactgaatgtggatgcagtatgtgagaagctgaaacaaatagaagggctggaccagagtatgctgcctcagtattgtaccacgatcaaaaaggcaaacataaatggccgtgtgttagctcagtgtaacattgatgagctgaagaaagagatgaatatgaattttggagactggcaccttttcagaagcacagtactagaaatgagaaacgcagaaagccacgtggtccctgaagacccacgtttcctcagtgagagcagcagtggcccagccccgcacggtgagcctgctcgccgcgcttcccacaacgagctgcctcacaccgagctctccagccagacgccctacacactcaacttcagcttcgaagagctgaacacgcttggcctggatgaaggtgcccctcgtcacagtaatctaagttggcagtcacaaactcgcagaaccccaagtctttcgagtctcaattcccaggattccagtattgaaatttcaaagcttactgataaggtgcaggccgagtatagagatgcctatagagaatacattgctcagatgtcccagttagaagggggccccgggtctacaaccattagtggcagatcttctccacatagcacatattacatgggtcagagttcatcagggggctctattcattcaaacctagagcaagaaaaggggaaggatagtgaaccaaagcccgatgatgggaggaagtcctttctaatgaagaggggagatgttatcgattattcatcatcaggggtttccaccaacgatgcttcccccctggatcctatcactgaagaagatgaaaaatcagatcagtcaggcagtaagcttctcccaggcaagaaatcttccgaaaggtcaagcctcttccagacagatttgaagcttaagggaagtgggctgcgctatcaaaaactcccaagtgacgaggatgaatctggcacagaagaatcagataacactccactgctcaaagatgacaaagacagaaaagccgaagggaaagtagagagagtgccgaagtctccagaacacagtgctgagccgatcagaaccttcattaaagccaaagagtatttatcggatgcgctccttgacaaaaaggattcatcggattcaggagtgagatccagtgaaagttctcccaatcactctctgcacaatgaagtggcggatgactcccagcttgaaaaggcaaatctcatagagctggaagatgacagtcacagcggaaagcggggaatcccacatagcctgagtggcctgcaagatccaattatagctcggatgtccatttgttcagaagacaagaaaagcccttccgaatgcagcttgatagccagcagccctgaagaaaactggcctgcatgccagaaagcctacaacctgaaccgaactcccagcaccgtgactctgaacaacaatagtgctccagccaacagagccaatcaaaatttcgatgagatggagggaattagggagacttctcaagtcattttgaggcctagttccagtcccaacccaaccactattcagaatgagaatctaaaaagcatgacacataagcgaagccaacgttcaagttacacaaggctctccaaagatcctccggagctccatgcagcagcctcttctgagagcacaggctttggagaagaaagagaaagcattctttgagaaaaacaagcaaaggagaagagtgttactgtacccttatgacagaattgtcctggattttgactccatccacgcccatcacctttctacattttgctgacagataactaaccgatgatgaggccgaggtaaaagagacatctgcagtgtgacagaagggagcatgagaagcatggctcaccagccagcctctgtggtctttgtaattagaagcttcagaactcactaatactactgtacctttcattggcgcattaccccataaaactttttgagacgaggtgagatctgagtataaagataggtcagaagtattttaaagggcttaatgtgccaaaaagaaaaaaagctagagaccctttttgcaaacatttggtgaccacacatttgagggaagacgtggcgttaggtgaagcagaagcaaaccctgctcttaggggctcacctaggtgagtgcacagcctgtgacgctacagggagaggctgagtaaaccgagatccagcgttctgtatggcaggggtattgcttatcacagaggttctgaagagtaggaagtacataatgaagagggctttaaaaattgccaacaaagtgagtcaccagggctggcagtagtgtgacggggctgtcctgagctgttaggagagtagatgcggggagggctggtgacctccgtgggtttatatgtcggaaactcttctctccaaatcccaggcctggcttccagcaccatccagctgtgcccaagaagccaccctggtctgttctccaactcttttaaatggtgcccaacttttctaagtgagcttagcaatgagaagaaaaaaaaacatgaattctttttctggaaaatcagggagacatgggtaataataggtactaataaatatttatagatgagtgaatgaggaaataattacatcaaaaaggtcagtgacaattgataaatgacaaggaaatatttaattaggtaaaactaaatcattgctctctatactaggatagcagtcatccacctcatgcgcctaagcaaggtagtccgggaggcacaaaaggacatttcaaacacttggcactgtcacaaagcggtaaatatttctttcacaaaaggggcagaaagaacaaatagagagagaggaaggacgggagaagaccggcggagaagacaaaacagaacggcagcgagactagaaaacaggaaagataaa

SEQ ID NO: 23065 - DNA, 2424 bp, Homo sapiens
  misc_feature 1, 2, 3, 4, 5, 6, 7: n = A,T,C or G
nnnnnnncgcggagtcggcggggcctcgcgggacgcgggcagtgcggagaccgcggcgctgaggacgcgggagccgggagcgcacgcgcggggtggagttcagcctactctttcttagatgtgaaaggaaaggaagatcatttcatgccttgttgataaaggttcagacttctgctgattcataaccatttggctctgagctatgacaagagaggaaacaaaaagttaaacttacaagcctgccataagtgagaagcaaacttccttgataacatgcttttgcgaagtgcaggaaaattaaatgtgggcaccaagaaagaggatggtgagagtacagcccccaccccccgtccaaaggtcttgcgttgtaaatgccaccaccattgtccagaagactcagtcaacaatatttgcagcacagacggatattgtttcacgatgatagaagaggatgactctgggttgcctgtggtcacttctggttgcctaggactagaaggctcagattttcagtgtcgggacactcccattcctcatcaaagaagatcaattgaatgctgcacagaaaggaacgaatgtaataaagacctacaccctacactgcctccattgaaaaacagagattttgttgatggacctatacaccacagggctttacttatatctgtgactgtctgtagtttgctcttggtccttatcatattattttgttacttccggtataaaagacaagaaaccagacctcgatacagcattgggttagaacaggatgaaacttacattcctcctggagaatccctgagagacttaattgagcagtctcagagctcaggaagtggatcaggcctccctctgctggtccaaaggactatagctaagcagattcagatggtgaaacagattggaaaaggtcgctatggggaagtttggatgggaaagtggcgtggcgaaaaggtagctgtgaaagtgttcttcaccacagaggaagccagctggttcagagagacagaaatatatcagacagtgttgatgaggcatgaaaacattttgggtttcattgctgcagatatcaaagggacagggtcctggacccagttgtacctaatcacagactatcatgaaaatggttccctttatgattatctgaagtccaccaccctagacgctaaatcaatgctgaagttagcctactcttctgtcagtggcttatgtcatttacacacagaaatctttagtactcaaggcaaaccagcaattgcccatcgagatctgaaaagtaaaaacattctggtgaagaaaaatggaacttgctgtattgctgacctgggcctggctgttaaatttattagtgatacaaatgaagttgacataccacctaacactcgagttggcaccaaacgctatatgcctccagaagtgttggacgagagcttgaacagaaatcacttccagtcttacatcatggctgacatgtatagttttggcctcatcctttgggaggttgctaggagatgtgtatcaggaggtatagtggaagaataccagcttccttatcatgacctagtgcccagtgacccctcttatgaggacatgagggagattgtgtgcatcaagaagttacgcccctcattcccaaaccggtggagcagtgatgagtgtctaaggcagatgggaaaactcatgacagaatgctgggctcacaatcctgcatcaaggctgacagccctgcgggttaagaaaacacttgccaaaatgtcagagtcccaggacattaaactctgataggagaggaaaagtaagcatctctgcagaaagccaacaggtactcttctgtttgtgggcagagcaaaagacatcaaataagcatccacagtacaagccttgaacatcgtcctgcttcccagtgggttcagacctcacctctcagggagcgacctgggcaaagacagagaagctcccagaaggagagattgatccgtgtctgtttgtaggacggagaaaccgcttgggtaacttgttcaagatatgatgcatgttgctttctaagaaagccctgtattttgtgattgccttttttttttttttaagatgctttcattttgccaaaataaaacagataatgtggatggtttaagggttatagtattatagtttaaataataacaacaaaattcttcccaggaactctgctggaaggtaaattaaaatacttgtttttccattggtaaaatattgttgcactctgtgaaccaaaagacagtctaagttggaggacatagaacggaactcatcttaaacatactccccaccccgtcttggcctcctcagaccactttggccatccctgcatttggggccgctatggtaatgtgaatgcactgggtacctcggccgccaccgcggggagctccaattcgccctata

SEQ ID NO: 23066 - DNA, 2087 bp, Homo sapiens
aaccaggaatcaagtcaggctggttttgttccctgtttctgaaggcagttgaattcagttgtacccctagcaactactaatggttcagccacccgtggagtccagttggggctgagttatgctccactaacccatagcagaccagcaacattctatctttgagctgcttaagaaacacacaaaggataccagccagtggtccaagagcagaccagaatccccacgcagctacacagtaacaagtcccagcaactcctgaagatagatgcggaaagggtgactttaccatggggttcgagtctgagccaagagagttataaaggggtccctaactcattcctttttcaaaataaataaaaaaaggactgtctttcaaacaaaaaccctgcgattttaatgagaattaaaggaggatgtaaattaaaaggcctgtttgtctgtacagcaatgcagatgcgcaggcccatcctggtggaggacccagatgcagggagcaaatattcgggttgtgttgctaagagtcgcaggaactactgctagtgatactaggcttgctgcaggaggatgtcacgctgagaaagggagatgactaggagcagaaaaagtactctcactgttccagcttccagcccaatcctagcagaatgaatgcattttaaaatcagtccacattcacatgtgctgagaaggttgttagtggtccctcatctgggcaaagcagacccaagatggtgctgagtgcagagtgcagagcattcttgtgctctcctctcatggctggaactatctgggctttgcgccctggtccagtgctacgtatcaaccccctcaacatgcctgtggctctgacacggggggatgaattaacttgcctctgttcaaatatacagacttggtgaggctgtcttttgttagtactgatgcacagggacagaaaaagcctgcaactttcagttgggagaatcctataaaagctgtgagcagcaataatttgcagtattgatcataggaagggaaaaaacattctctttcctattagagccccataacagaggtgacatctgtcccaaggccattccatggaaaatggtggctgctggcaattagtgaggctagtccagaagcaagcctccttctgatattggtcactgaaaacagctcactataaacggggtgttttgtggcattcaactctgttgtgctacaaatagagaatgcaaaaagacggtgaaagtaggagtgcataaatagtttttttcatgggtgccagacaggctaaggctttcatataaaaatattcctcactttcctcgtcctgtttaggaagcagtccagttggcataccacgaataggtcacacataggaaatggcctattttgaccaactggatttgtaattttccaaaccggattctgtccagcacttttctacactaatggaaattttcctcctcatgcccagccatctgaaccaaggacaggttccttctcctaagaggacagaggttggattccagaaaaaaatcctggagtcatgccaagagcagagtagcaaagctccctccatccattctccatgtcacgcagactgtattcctaatgaaaaacttcccccactcacacctgtgggatggagtggagcaaagcagttgacgaggaattgaggcaggcgctcctaagatggagggaggcggagagcagggctgtggaaaagaattttccatctgacctgctactttccatagctaatttatacaatattcacaaatcttaatggactttgagtcatttctagaaaagttggacagaaagagccaaagagcagcatgcgtttctctcctataaagacactttcacttccagtttcggaagtccaaatactgaggcacacaccaacggtggacagccctgcaggagcttcctgaaactatctacaattccaagtggatcaccagcttcagaattacacagggatcttatttgggataaagtgttaaaaagtgaatgacaggctttttttttttttttttttttttctgaagtcccttctgtcgtcttctcgcagccgtagtcgacgcggccgcgaa

SEQ ID NO: 23067 - DNA, 1395 bp, Homo sapiens
  misc_feature 1, 2, 3: n = A,T,C or G
nnncgactcccattgttccccacgcgtgcggttctagatcgcgggcggccgctcgcgctttaagccaggcgtgagccaccgcacccagcgatttagggtttttttctaatagactatgttcaacaaataagtaattctcgaatagttcagattaaaacatacaggaaccaagtacatacccagcatagaagaactttactaaaggcttcttggaaagcccttttttgaaacgacagtatcgtaagtaacatatcatttataatagaaatcttgacccagtgcagaaaaataaatatagtaaaatttatttatctttggccagttttccaacacccaggtattagccttgaagttgaagagataaggtttcttgtatattatttttcatttgtgttctacaattaaaggttctgctttgatttgtcagataatttatagaaattttgttctcaaaacaaatgtttgataaaacagattattaaatttggggttgagatgtctaaattgaatgctagaagtaaagtagaagtgaccactattaaagatgtatagggagaagagtacagcacaaagtgataaaatagtgacacttttgtaggggtgtttattgtttggttaagtctgctaaattacggtatgcattatctggtgactatttgtgcctgaaaattcgttttgtattaaaattctggagaaggaattcaggactagaataaagagaaattttgtaaccttttttatcatgacagttttagaataatttttttagctgagattaaatgttcaaggctccaatattatttttaggaacttatttaaggagtgctactttacagaaattactaacacaccaaaacattattaattaaataaaatataagtttacaataataaaacatgtttcttttaatttttctgattatattttatgagttcagaaaggaaatggtaaaagaactatacattttcatgttttaacattttatgtacgtacttgattctgtctgtgtcataattacacatttacttgaacacagctatcctttatcttgtgctttctttaatagaaaaatgaacagaaactgaatgcagttaaatttttatttttagtaggttgtgaagttacttttactggagaaataaaaatatgttaaacttgattgactttttaagataaattgttaacacttttgcaggattagaattaatatgaagtatctctttaacattattgtatatattacctactgcaaacctatctgttctgtttctttgtgatttaaagaaaaataggccgggcattgtggctcacgcctataatcccagcactttgggaggccgaggcgggcggatcacaaggtcaggagttttagaccagcctgaccaatatgatga

SEQ ID NO: 23068 - DNA, 3191 bp, Homo sapiens
cgtccggcaaacctgtctaattggggcggccagcggacttcctcctctgagggccgtgccgcgctgccagatttgttcttccgcccctgcctccgcggctcggaggcgagcggaaggtgccccggggccgaggcccgtgacggggcgggcgggagccccggcagtccggggtcgccggcgagggccatgtcgctgttgggggacccgctacaggccctgccgccctcggccgcccccacggggccgctgctcgcccctccggccggcgcgaccctcaaccgcctgcgggagccgctgctgcggaggctcagcgagctcctggatcaggcgcccgagggccggggctggaggagactggcggagctggcggggagtcgcgggcgcctccgcctcagttgcctagacctggagcagtgttctcttaaggtactggagcctgaaggaagccccagcctgtgtctgctgaagttaatgggtgaaaaaggttgcacagtcacagaattgagtgatttcctgcaggctatggaacacactgaagttcttcagcttctcagccccccaggaataaagattactgtaaacccagagtcaaaggcagtcttggctggacagtttgtgaaactgtgttgccgggcaactggacatccttttgttcaatatcagtggttcaaaatgaataaagagattccaaatggaaatacatcagagcttatttttaatgcagtgcatgtaaaagatgcaggcttttatgtctgtcgagttaataacaatttcacctttgaattcagccagtggtcacagctggatgtttgcgacatcccagagagcttccagagaagtgttgatggcgtctctgaatccaagttgcaaatctgtgttgaaccaacttcccaaaagctgatgccaggcagcacattggttttacagtgtgttgctgttggaagccctattcctcactaccagtggttcaaaaatgaattaccattaacacatgagaccaaaaagctatacatggtgccttatgtggatttggaacaccaaggaacctactggtgtcatgtatataatgatcgagacagtcaagatagcaagaaggtagaaatcatcataggaagaacagatgaggcagtggagtgcactgaagatgaattaaataatcttggtcatcctgataataaagagcaaacaactgaccagcctttggcgaaggacaaggttgcccttttgataggaaatatgaattaccgggagcaccccaagctcaaagctcctttggtggatgtgtacgaattgactaacttactgagacagctggacttcaaagtggtttcactgttggatcttactgaatatgagatgcgtaatgctgtggatgagtttttactccttttagacaagggagtatatgggttattatattatgcaggacatggttatgaaaattttgggaacagcttcatggtccccgttgatgctccaaatccatataggtctgaaaattgtctgtgtgtacaaaatatactgaaattgatgcaagaaaaagaaactggacttaatgtgttcttattggatatgtgtaggaaaagaaatgactacgatgataccattccaatcttggatgcactaaaagtcaccgccaatattgtgtttggatatgccacgtgtcaaggagcagaagcttttgaaatccagcattctggattggcaaatggaatctttatgaaatttttaaaagacagattattagaagataagaaaatcactgtgttactggatgaagttgcagaagatatgggtaagtgtcaccttaccaaaggcaaacaggctctagagattcgaagtagtttatctgagaagagagcacttactgatccaatacagggaacagaatattctgctgaatctcttgtgcggaatctacagtgggccaaggctcatgaacttccagaaagtatgtgtcttaagtttgactgtggtgttcagattcaattaggatttgcagctgagttttccaatgtcatgatcatctatacaagtatagtttacaaaccaccggagataataatgtgtgatgcctacgttactgattttccacttgatctagatattgatccaaaagatgcaaataaaggcacacctgaagaaactggcagctacttggtatcaaaggatcttcccaagcattgcctctataccagactcagttcactgcaaaaattaaaggaacatctagtcttcacagtatgtttatcatatcagtactcaggattggaagatactgtagaggacaagcaggaagtgaatgttgggaaacctctcattgctaaattagacatgcatcgaggtttgggaaggaagacttgctttcaaacttgtcttatgtctaatggtccttaccagagttctgcagccacctcaggaggagcagggcattatcactcattgcaagacccattccatggtgtttaccattcacatcctggtaatccaagtaatgttacaccagcagatagctgtcattgcagccggactccagatgcatttatttcaagtttcgctcaccatgcttcatgtcattttagtagaagtaatgtgccagtagagacaactgatgaaataccatttagtttctctgacaggctcagaatttctgaaaaatgacctccttgtttttgaaagttagcataattttagatgcctgtgaaatagtactgcacttacataaagtgagacattgtgaaaaggcaaatttgtatatgtagagaaagaatagtagtaactgtttcatagcaaacttcaggactttgagatgttgaaattacattatttaattacagacttcctctttctaaaaaaaaaaaaaaaaaaagaatagttctatacaaatgaagtatggaggtgtgtatgtttatatgtatataacaaaatattttcattgtgaccactctgaagtaagagcaatgggaatggcattattgtagaataagtcattgtatttttaacaccagaaagaaccttgccgatcaccaggcataacctaattttatccatggaagaaacacagaaaggcatctaagttagagctggcaccagaactgagacctccagaaatctattccagtattttttccactacacaacttgccttcctgacaggttctgagataagtgttatggttgtagatagagtg

SEQ ID NO: 23069 - DNA, 655 bp, Homo sapiens
  misc_feature 650, 651, 652, 653, 654, 655: n = A,T,C or G
aaatactaaatgtttccttttttcattactcatatatttttttcttgccttactacactgcctagtaaaatatataaaatatgtgcttcacggaaaggggactttgattaaggacatgcctccttcagagctttttcttttccccctagtatttccaacttggggatgtttggcatcgacgaatttactgcagtgattaaccctcctcaggcctgcattttggcggttgggaggttccgacctgtgctgaagctcactgaggatgaagagggaaatgccaaactgcagcagcgccagctcataacagtcacaatgtcaagtgacagtcgagtggttgatgacgaactggcaaccaggtttcttaaaagttttaaagcaaacctagagaatcctatccgacttgcctagtcctcaaagataagaagttggtgttcagcttagttgattcagtagttgttaccaagaaacatatgttataggaaaacaacttggtatttaagtatgaagtggatgaaatgtttatttatttaaggtgaaagcatttgacccagggtgtcttcatcttcaatttgggtttaatgttatagaaataaatgatgataaactctaactaataaaggaaagagaatatttggttactcagatcccannnnnn

SEQ ID NO: 23070 - DNA, 1440 bp, Homo sapiens
  misc_feature 1, 1440: n = A,T,C or G
naccaagtataaatataaattacaaccctccctccttactatcaacgcgccaacccctttttttttttcctttttttttttttcctttttttttttggccccccccttttcttccaatgttccagggtatcccatcccgcctgactcctgttaccgccgattttcttgttcccccactgtttggcctgacttaaaccatattctaccggcatattgcacaggatggatggcaaaaaaaagtttaaaaacaaaaacccttaacggaactgccttaaaaaggcagacgtcctagtgcctgtcatgttatattaaacatacatacacacaatctttttgcttattataatacagacttaaatgtacaaagatgttttccacttttttcaatttttaaacacaacagctataaacctgaacacatatgctatcatcatgccataagactaaaacaattatatttagcgacaagtagaaaggattaaatagtcaaatacaagaatgaaaaacgcagtacatagtgtcgcgaactcaaatcggcatttagatagatccagtggtttaaacggcacgtttttgcttataaaaaaagtgcaaaaaagatgtggtttacaagttaaagctacagaatccctttttgctgtaattgcaccagttttaaagcctctggacagagcagtatttcgtttaaaactttgtttttcttaaaagcttacagtgtttggctaattctcctcccctttttacaagacgggggccggagggtggacactggtggcaggttaagggatactgtcactttaagaagcctgcagattgaagtgtaaacatggagaaattaggggctgattttttaaactgtgtgagatattaaccagccgccctgttataaaatcaggaaatccaaacagcgatttacaccgattaacaccccctttatatattttttacaaaaatacactgagaaaataatcaaacgttttcatctctcttgtctttttttgttttttaaaagtgtcaaaagtctacatttaaatataaaaaattaaaagttaaaactctagcccttcagtgaaggagacgtaaaatggcgtgggtaacaacaactaccaaaaaaaaaaaaaaaaaaaagaaaaaaaggaaaaggaaggaataaagaaataaaggaagtaaaaagaaaggaaagaaaaaaagggacaaaagaaaaaatatgtttggccagtataaatacgtccacatataaaatggcatctgattacatttacaaggaaaaagaaatacgaggatggagcatcggtgaaggaaaaaaacacgtcttctcatttacacctataaggaataaacacacacactgagaaaaaatttggtcctgaattgtttttttttaaaatccagcacagatttgagttgcgtttgaatcctttaaagagttaagaatgaaan

SEQ ID NO: 23071 - DNA, 1299 bp, Homo sapiens
ggtccggaattcccgggtcgagccccccccccccccccggaggggcggttggctttgttgggtgggcttgtttgtgtccctgtgggtggacgtggttggtgattggcaggatcctggtatccgctaacaggtcaaaatgcagatcttcgtgaaaacccttaccggcaagaccatcacccttgaggtggagcccagtgacaccatcgaaaatgtgaaggccaagatccaggataaggaaggcattccccccgaccagcagaggctcatctttgcaggcaagcagctggaagatggccgtactctttctgactacaacatccagaaggagtcggccctgcacctggtcctgcgtctgagaggtggtatgcagatcttcgtgaagaccctgaccggcaagaccatcaccctggaagtggagcccagtgacaccatcgaaaatgtgaaggccaagatccaggataaagaaggcatccctcccgaccagcagaggctcatctttgcaggcaagcagctggaagatggccgcactctttctgactacaacatccagaaggagtcgaccctgcacctggtcctgcgtctgagaggtggtatgcagatcttcgtgaagaccctgaccggcaagaccatcactctggaggtggagcccagtgacaccatcgaaaatgtgaaggccaagatccaagataaagaaggcatcccccccgaccagcagaggctcatctttgcaggcaagcagctggaagatggccgcactctttctgactacaacatccagaaagagtcgaccctgcacctggtcctgcgcctgaggggtggctgttaattcttcagtcatggcattcgcagtgcccagtgatggcattactctgcactatagccatttgccccaacttaagtttagaaattacaagtttcagtaatagctgaacctgttcaaaatgttaataaaggtttcgttgcatggtagcataaaaaaaaaaaaaaaagaacgaaaagaaaaaaaattggggggggggctgggcgctcgggaaagagggttttaaaacacacattggtgttgggggggggggcccaaagagggacaggtcacgacacgggccaccaaacacggtgacccaaagggagaaccgggggcagagaccaaaaggaccgggaacttctcacgaaggaaaaaaaccccccggggggcacaccgccgacgggttcgaacacacatcgcagaggcggggaccggacgggaaccagagggagacaaacacacgaggagtcagggacgcgcggaataaatgccgaccc

SEQ ID NO: 23072 - DNA, 1145 bp, Homo sapiens
  misc_feature 1, 2, 23, 1140, 1141, 1142, 1143, 1144, 1145: n = A,T,C or G
nncgtccgcgcagaactcagcanatgttccatgggaaatccagtttgagattccttcagtttctaatttttcactcctgtcctgtgaacccctaaaagctttgttagtttttcccttcttctgccgaggtcctctgcttctgccaagcatgaatttttttaaatagataagccttctttaattgttacaagaagtgaactggtctgcctccactcttcttccattactctcaaaatgcaattcgaatatgactcttctggtcccttcctatttcctcagcactcattaattttctttctatgtctttatctcatacttaagcctgaattgttgaatgaatcaccctctttctcctcagcatttacaaatacctgaaacacgtgtctatatcctccccatcatctctgtaactcatacttgtcttttcagtctcagagtagaaatgaagtgttccctgacgcctctttccccatgcccacccaaacatgagcaagacctcttctgtcagttcccacaaaattcttaatgtacccgatttcagcacttagcccactgcattataatggctcatctactagcttatctgagtctcccactgggctctgcaaaaagcttctgcctacctctttccatgctatagtcctgtcagagaacacaatgctcagtaaataacgttctgttgagatggatccctaaagtgttaaatatttaaagtctttattaatttgaaggacctctgaagagaaaacgaactgtaaaaatcaagataatcttaatttttaaaaacagacttataagctaaaggagacccaaatatgaaatacttttataaaacaaacaacaatatctatacatgataaacagggacatgaaaagatggttgcaggagcattagtggtgattattataggatgggaagctaggatgggttcacagaaaaaaaaaatccccagtttactctgtatgtcagggtaaattccaagtggatcaaacaattacatatgaaatatgaaaccattcaagcctagaataagctaggaatcgggggaaaattttctgattcaacatccagaagcaatgatgaaaaccttgatgatttgattatgttaaaaaattttctgcatggaaaaaaaccttgannnnnn

SEQ ID NO: 23073 - DNA, 1406 bp, Homo sapiens
  misc_feature 1, 2, 3, 1379, 1380, 1381, 1382, 1383, 1384, 1385, 1386,1387, 1388, 1389, 1390, 1391, 1392, 1393, 1394, 1395, 1396,1397, 1398, 1399, 1400, 1401, 1402, 1403, 1404, 1405, 1406: n = A,T,C or G
nnnatccggactctgggtgtttgctaccgtgaccgtttagacggactctgggtgttttgctaccgtgaccgtttagaaactgttcatacttggtgcgctgtggactcttgtgataattaaccaagagtagctctatttgtccaacctcacacctaaagaagaaagaaaatggcttgtgctgagttttcttttcatgtaccaagtcttgaagagcttgctggagttatgcagaaggggttaaaagataactttgctgatgtccaggtctctgtagttgattgccctgatttgactaaggaaccctttacctttcctgtaaaaggcatctgtgggaaaactagaattgcagaagttggaggtgtgccttacttattgcctcttgtaaaccaaaaaaaagtttatgatctgaataaaattgcaaaagaaatcaagctgcctggagcctttattcttggagcaggagcaggtccatttcagactctcgggttcaattctgagtttatgccagttattcagacagaaagtgaacacaagcctcctgtaaatggaagttactttgcccatgtgaaccctgcagatggagggtgcctactggagaaatacagtgagaaatgtcatgattttcagtgtgcattactggctaatctttttgccagtgaaggccaacctggcaaggtaattgaggtgaaagccaaaagaagaactggaccacttaactttgtgacttgtatgagagagaccctggaaaaacattatggaaataagcctataggaatgggaggtactttcataattcagaagggaaaagtgaagtctcacattatgcctgcagaattttcttcctgccccttgaactctgatgaagaagtgaataaatggttgcatttttatgaaatgaaagctcctttggtttgtctaccagtttttgtctccagagacccagggtttgatttgcgactggagcacactcatttttttagtcgtcatggagaaggtggacactaccattatgacactactccagatatagtggaatatcttggatacttcttacctgcagagtttctctatcgcattgatcaaccaaaagagacgcattcaattgggcgagattaaatcagctgatacttatttagaaaaagaataattaaggttaattaattgattgacttattaattaatactgatataaaaccaatagaaatgatcccacaggccaggcacaatggctcatgcctataatcccagcactttgggaggctgaggcaggaagcacactggagcccaggagtttgagaccagcttgggcaacatagcaagaccctgtctatttttttaaaaaagtaaaaatagaaattatctcactacttaaattccannnnnnnnnnnnnnnnnnnnnnnnnnnn

SEQ ID NO: 23074 - DNA, 809 bp, Homo sapiens
  misc_feature 779, 780, 781, 782, 783, 784, 785, 786, 787, 788, 789, 790,791, 792, 793, 794, 795, 796, 797, 798, 799, 800, 801, 802,803, 804, 805, 806, 807, 808, 809: n = A,T,C or G
acgcgggatcacgacgcaggtctcgtgccaatcaaaacgtcaacgctgttcacagccattatacacgtgcccaagcaaatagtcccagaccagcaatgaactcccaagctgctgtacacggggaaagatgtcactgtcttgcagaacactgatggaaataacaatgaggcatgggctaaggatttgaagctggcagactttgcgctgctgtgccagtcgatggcaatcggaagcctagtgactgaggctggttgctgccatctcaggccatgagccccgaatcacgccgtggctggctcggagggctagacgctggctcgccttgaacaccggtagccgctccaccagcaggcgtgattgggaatatgagtgtggcaagcactgactcagtgatgggagaagggcagagaaaactcttagtattctctttgatttattggattaaataactggtttaatggaagaaatcagtttctgaatctcttgctctgttgtgtcccacagccctcctggaagcctgtgaattcctcaggaagtaaaaccgaagaagatggcccagctccccaagaaagcctcagccattcactgcccccagctcttctccccaggtgtgctggcgccttggcctcccctgctgaaggtggggattgcccatccatctgcttacaattccccgctgccgtcttagcaagaagtaaaatgagaaattttgttgatattctctccttaacaaagagcgaatcaaaggcaacggaatatgaacaaaaaaaaactctaannnnnnnnnnnnnnnnnnnnnnnnnnnnnnn

SEQ ID NO: 23075 - DNA, 1047 bp, Homo sapiens
  misc_feature 1045, 1046, 1047: n = A,T,C or G
acgcgggggtctgccgcggtggccgggtgccgatttgacaagatcaaagctgcaggaaaatggacagtgaggttcagagagatggaaggatcttggatttgattgatgatgcttggcgagaagacaagctgccttatgaggatgtcgcaataccactgaatgagcttcctgaacctgaacaagacaatggtggcaccacggaatctgtcaaagaacaagaaatgaagtgggcaagtgagttaaggacgtactcgtcttggtgagagcgtgagctgctgagatttgggagtctgcgctaggcccgcttggagttctgagccgatggaagagttcactcatgtttgcacccgcggtgatgcgtgcttttcgcaagaacaagactctcggctatggagtccccatgttgatggatcctgagcttgaaaaaaaactgaaagagaataaaatatctttagagtcggaatatgagaaaatcaaagactccaagtttgatgactggaagaatattcgaggacccaggccttgggaagatcctgacctcctccaaggaagaaatccagaaagccttaagactaagacaacttgactctgctgattcttttttccttttttttttttttaaataaaaatactattaactggacttcctaatatatacttctatcaagtggaaaggaaattccaggcccatggaaacttggatatgggtaatttgatgacaaataatcttcactaaaggtcatgtacaggtttttatacttcccagctattccatcttgtggatgaaagtaacaatgttggccacgtattttttacaccttcgaaattaaaaatgtgaattcgtgggtcccaaaaaaaataagatactagtaatcgaaagacaaagatacaaaacacatagtagagcgtacagaaaacaaaaaatggtggggcggcgccaaagaattatacaacgtgggcggggcgaagataaagagattttccaagaacgggggagtggtggtacaaaaaggggggggtcaaaagggggggattataaagcacnnn

SEQ ID NO: 23076 - DNA, 1834 bp, Homo sapiens
ccgttctctctcccggacagcatgagcttcaccactcgctccaccttctccaccaactaccggtacctgggctctgtccaggcgcccagctacggcgcccggccggtcagcagcgcggccagcgtctatgcaggcgctgggggctctggttcccgggatctccgtgtcccgctccaccagcttcagggggcggcatggggtccgggggcctggccaccgggatagccgggggtctggcaggaatgggaggcatccagaacgagaaggagaccatgcaaagcctgaacgaccgcctggcctcttacctggacagagtgaggagcctggagaccgagaaccggaggctggagagcaaaatccgggagcacttggagaagaagggaccccaggtcagagactggagccattacttcaagatcatcgaggacctgagggctcaggtaaggggtaggagggacctcaactcccagccttgtctgaccctccaattatacactcctttgcctctttccgtcattccataaccacccaacccctactccaccgggagggggttgggcatacctggatttccatccgcgcacctagccacagggtccctaagagcagcagctaggcatgggagggctctttcccaggagagagggggaaggggacagggttgagagctttacagaggaagtggacagcatggagggaggtaaggaaaggcctgtaaagaggaggagacactggctctggcggaatggggactattggagggttaagcggatgtggctaaggctgagtcatctaggagtaaacaagaggccttcctttgggaggagccaatccagggtgtagggggcccagagtgaccaggtgcactagggaaaaaatgccaggagagggccaggaagaggacttgttagtagcgactcacttctgggcaggcaggccagccagctagccagcctgctgaggcttcccaagaggggcagagtgctgggatctgggaatccaggaaaggagggaatggggtggggctagatgaaaagggataggtgtccagggagagcctctggctattcctgggaccaggaagttttcactaggatacataacactttttacacactcaccccacccatccctggctttctattcatggaacaacctctctctacaatccctccagatcttcgcaaatactgtggacaatgcccgcatcgttctgcagattgacaatgcccgtcttgctgctgatgactttagagtcaagtatgagacagagctggccatgcgccagtctgtggagaacgacatccatggggctccgcaaggtcattgatgacaccaatatcacacgactgcagctggagacagagatcgaggctctcaaggaggaggtgctcttcatgaagaagaaccacgaagaggaagtaaaaaggcctacaaggcccaattgccagctctgggttgaccgtggaggtagatgcccccaatctcaggactcgccaagatcatggcagacatccgggcccaatatgacgagctggtccggaagaaccgagaggagcttagacaagtactggtctcagcaggatgaggagaggcacacagggtcaccacacagtctgtgaggtggagctgtgagaggaagtcaaggaggtgaaagtgacaggccagcctgggaacagacggtcctggagaaactggaaggcggttgggaaagccgaggagggggagcgcacccacaaggaaggcaagggctccgtggcgagaaaggcaaccggggagggccccggttatgtctcggaaaacacagggggagacaacccgggaaggaaagaac

SEQ ID NO: 23077 - DNA, 997 bp, Homo sapiens
ccgcgggctggcgggggacccttcaggcccggccccgtttgggcctcggctcctggaaaagcgactcgcgcctctgggaagccgcagccccagactccagtcgcgcttctcgcccggcgccgccggaaagcagcctctccaacgcctgccggaaagcagcccggcccggcattttacgacgttcgcagcgctacccttttccgctccacggtgacctccgtgcggccgggtgcgggcggagtcttcctcgatcccgtggtgctccgcggcgcggccttgctctcttccggtcgcgggacaccgggtgtagagggcggtcgcggcgggcagtggcggcagaatgttggctaccagggtatttagcctagttggcaagcgagcaatttccacctctgtgtgtgtacgagctcatgtagagacggggtttcaccatattagccaggatggtctcgatctcctgacctcgtgatccgcctgcctgggcctcccaaagtgctgggattacaggtgtgagccaccgcgcccagccctgcagaaagtgttgtgaagagcgaagacttttcgctcccagcttatatggatcggcgtgaccaccccttgccggaggtgggcccatgtcaagcacctgtctgccagccagaaggcactgaaggagaaggagaaggcctcctggagcagcctctccatggatgagaaagtcgagttgtatcgcattaagttcaaggagagctttgctgagatgaacaggggctcgaacgagtggaagacggttgtgggcggtgccatgttcttcatcggtttcaccgcgctcgttatcatgtggcagaagcactatgtgtacgcgggcttatgagctgtgacatcgtaaaccatgcacaagggctcttccagggttaaacaaaatgcataacaatcaaatacagcaacatctgccaaaagaagtaacaccaataaattgcaagtgattgtttaactatctaatgtggtataatcagcc

SEQ ID NO: 23078 - DNA, 1308 bp, Homo sapiens
  misc_feature 1, 2, 3, 4, 1292, 1293, 1294, 1295, 1296, 1297, 1298, 1299,1300, 1301, 1302, 1303, 1304, 1305, 1306, 1307, 1308: n = A,T,C or G
nnnnccgctgggtgcagccgagcggtgtggagcggagagaatactcgaagggctctcctgatactaacagttttacgatttaaaacttcgccagaatttcgacagggtctcactgtattgcccaggttggtctcgaactcctggcttcaagcgattctcccacctcagcctcccaaagtgctgggattacaggcgtgagccaccacgcctggcctcactcaaacagtaaacgaggtatgtgacgcattcccagactcttcagccaactgagcatcagcttcttcacagcaattgggtcctgattaatgtcctcccaagacagacttcattggatccacgatcaagaggactctgccaggtttttctgacccctctacattgctataaagtgccaaggccttaagacttgggtacgtgtgttacaacggcaagagtgccagcgccaacaaaagacccattggacctgtcagctcctctgtttcaccaagcagacacaataaccttaccaacaaagcagagtaagccaagtgcctctgtgtgacaccaccagcagctgatgacgcataagaaaaatataactaatttagactagagccctatctcttcttgagaagctgggatttgaaggagctatcctgagatctgtactgctagtaagtgactgataacattataaactggatcggtccctgagttcagagactgagttgcaattgagtgaaaaatagacaacgaaatcttgaagaattgcacggaggtgcaagccaagtttatttggctctccaaataatattggttgaactaagaaattggtaaacgaaacctgtaataggactggtgtttgggcgtctctctctgtcactgttgtctcttgctgtcacattgctgtctgtgttgtctttctaggtccagatgttttcagataattcacattgccctgattgtggacaacagtggttccctagtttagaactaggccactggttgtaccaaactgaacttgttgaaaatgaatgttaccaggtattcttagaccgtattaacagagctgattattgtcctgagtgttatcctgataatcctgctaatagaagccttgttcttccttggtctttcccacttgagtgggctccccagaatctcaccagatggacctttgagaaagcttgccatccatttcttctgggtcctccactggttagaaaaagaatacatggctctcgagtagctggttttaaccctgcattacagttaatcttgaccagaacagataaaaccttaaacaaaaaacnnnnnnnnnnnnnnnnn

SEQ ID NO: 23079 - DNA, 549 bp, Homo sapiens
  misc_feature 498, 529, 530, 531, 532, 533, 534, 535, 536, 537, 538, 539,540, 541, 542, 543, 544, 545, 546, 547, 548, 549: n = A,T,C or G
acaggtcttgcctaaaatcaagaagagagcaggagaactgagaaactcctccccttcccccaccagaagccttgtgtctagtaacaggtaacaacagccatctactgttggagaaagaacaaaagcatggaaaggatggagcagggaaagagggaaaaaacaacaaccactctccagcactccaggtcttaacattaagcacaaaataggagcagcctagcccaccaccggagggatttcaagtctgttgcacactgaaaataaccatggctacaacaaaacccaattcaccgcaaatgctgactaaattgactaatagccccatgctaatagcttgatggaaggatagatattcccactttgaacatttgcttcagtgtctacttttcttctatacaacatacctggcatttaatttaaaaaaaacacacactcacacacgctcacagacctatgtgaaaagataaaatagcagaaccagacccaaaggtgactcanaagttggaacgactagagactactagagacnnnnnnnnnnnnnnnnnnnnn

SEQ ID NO: 23080 - DNA, 734 bp, Homo sapiens
  misc_feature 680, 687, 727, 728, 729, 730, 731, 732, 733, 734: n = A,T,C or G
ctttccgggtggcgggggggatttggctgcagcggaagaaggagaccggagggtgtgtgttgggcaaagccggaggcagaggaggacgattgttttacggatcccgtgatcggcccgtccttctcccctttccccccctccctaccgcccctgtcccgccggggagcggcggcggccttggactttgctgtctttcctcgcggagacagatttcaacactacacttgcacaatgtctttgaaaccaagagtagtagattttgatgaaacatggaacaaacttttgacgacaataaaagccgtggtcatgttggaatacgtcgaaagagcaacatggaatgaccgtttctcagatatctatgctttatgtgtggcctatcctgaaccccttggagaaagactttatacagaaactaagatttttttggaaaatcatgttcggcatttgcataagagagttttggagtcagaagaacaagtacttgttatgtatcataggtactgggaagaatacagcaagggtgcagactatatggactgcttatataggtatctcaacacccagtttattaaaaagaataaattaacagaagcggaccttcagtatggctatggtggtgtagatatgaatgaaccacttatggaaataagagagctagcattggatatgtggaggaaaangatggtngaaccactttaagccattcttatccgaatgctgctccgannnnnnnn

SEQ ID NO: 23081 - DNA, 543 bp, Homo sapiens
  misc_feature 543: n = A,T,C or G
ggcttcctaggacccattgtgaacctcagcgagcccaccgcccatgaggggtccacagtgaccgtgaggtgcatggctggggctcgagtccaggtcacgctggacggagttccggccgcggtcccggggcagccagctcaacttcagctaaatgctaccgagagtgacgacggacgcagcttcttctgcagtgccactctcgaggtggacggcgagttcttgcacaggaacagtagcgtccagctgcgagtcctgtgtgagtcggtcaccctgacctttaatccctccacccctgccctggaaagattagacgctcctctgcaccactgtgcctcgggtgtgttgggtgtctgatcacacatggtggttccacagatggtcccaaaattgaccgagccacatgcccccagcacttgaaatggaaagataaaacgagacacgtcctgcagtgccaagccaggggcaacccgtacctcggccgccaccgcgtggagctccactccagccgggaggtgccggaggagatcccgttcttcgacaacn

SEQ ID NO: 23082 - DNA, 689 bp, Homo sapiens
acaaggttttttcctagtgtccaaagagctgttcctctttggactaacagttaaatttacaaggggatttaaagggttctgtgggcaaatttaaagttgaactaagattctacccgcgtactttaaaccagacagcagggttcagaggtggcacaccgggacaaagctgaggccctgcacctcaacagctgactgccaggtgcctgtgggtgaactgaggggagtagagggagagggcaggtggaactggggcagaatctagtcatgccctaaagctagccctgtaaacaatggtgccccagaaagctgcaggtggtgtttggagaagcagttacttttcagttacaagacccatctccctagtctcagccttacaacaccacgggactaaggaagagcacttccttgcctccgtaaggcaagaggaagaaccatcccaatcatttgatctccagctccacagtagagagaaacctacaaaatgtcaaaccagcttcccgactcccaggagctcaagccaatgccttagcactggagagctttttgcaatatgctggggaaaggggagggagggaatgaaagtgccaaagaaaacatgtttttaagaactcgggttttatacaatagaatgttttctagcagatgcctcttgttttaatatattaaaattttgcaaagacctttgagct

SEQ ID NO: 23083 - DNA, 3528 bp, Homo sapiens
accccgcgtccgctagttctagatcgcgagcggccgccctttttttttttttttttcccgcaatcacaccatttattgctgtgctgtccggggaagacaccgtgcaaatgccaaagtgcactgaggagaggggagggtctgtgactcccaaaccctcgaatattttatgaatctaagagtccagacgcagttcatccacggagatctgcgccccgtccacaccaacacccacgtttgtgcacccacatgtgcacggtgctcttcagagcggcgaggtcctcccccgcggggaggaatgtgggagaggcagaggtcactgagtttcctcctgtttcgtgtcacctcttggcaacctgtgcctggcttctagaagcggcatgggcaagaaaaggaagcaaaagaggctctggcctgctcctccttgcccaggagcaaagccagcaactgtgtagtcccgctgtgaggtaatgcctggcgccgcccgtgtattcctgcaggtcaagacagattcgggccgggtggggtggcagcccagccacggagggcatgcagggagaacaccaccaggactggctgcctgggccgcagccacttcccgccaggctcaggggcctggagtcagggggcgtccttcccttatctgtcccctgagctccctggctccccagaagggtcttctatcaagaacactgggccctgggcagaagggagggcaaggcccggcctcccctggtctctgacctctgcccaggtgctgtggacctgctgagacgggttcagaaggcgccagagaggaaccagctggacctgagcctggctcctgggcccgctcccctcctggctgcagctgcaccaaggttctcattagcaggggcccccgcctgggtgcggaacatgctttgggcatttgccatgaggcggctgggagttttgcaacagtttccaggggagcagagcaggaagaggggcttccccgacgatcccattcactgctccttctccatgggccaagccatgtaggcaggggacaaaatgtcaggtctcagcagctcccatggtacctaatgtgacacagacaaggctccaggccccatctcactggcctgggctcctgaccagtctcggagccatcagctcactccccatcttgcccctggagttgagtcacaggcttggccctggccacaaatggccagtacagaaggggccaggcacacagcacatgagggtctggggtctgggtgctcacctggctgtcacccaagctcctccaagaaggccccaaggaccttgctgcctggaaagccatctgtttggctccttggcacctggcatgcccattccctgaaacccagtctggtgtggtcaacatgccgcagtctccttgagtgagcccgggagcagaagccccatcccaggaggggagtgtggcggcagtgccaggcaggaggcagctctggggcagaggtgtggacaggagtctcccaccgccctggtgctggctcagacctgcccttccggggctggggagacgttctggcgaggatcatgtgggggaaacttgacgaaggcaatggcagccagctccttgcagaactcctccagcaccaccacgccctggaggagggtctggtggtccagctgctccccaggagcctggcccgtcaactgcttgcgcaccaggagcagcttgcctgggaactggggtaccctctggattctctgcatcaagtccccgatcaccctcaccaacacggagaataggctcctgcagccgggggccaggctgatgtacggatccagcaggtactcatgaatatgggggtgggggaagagggcaagccgggacaggaccgaggtcacctgcaggttcaggctgtatggctgatccagaatccgggacatgcggtcaaacagcactcggaggaagtggccctcgaagaaaggtcgctcgggctcatgggggtccaaaggtgtgggggtcagaggccagccccaggaggcgacgcgggagctgcactcctggaacaggccataagcatcgtggacgtatgtgtcatagcctgtctcctccaggaaggcagaggtcttggcttcctcggggaccaggcacaggaaactgttgacgatctcggtcactgctgttttgccatcgtaactggtagcaggagctaggcgaggctttgcgggagtttgaaagcctggaatccaggcagctgtcggtgaagtaggggtcttcctccaggtctagggtgtcctcatagctctcaggctctggtgagccccaggccacgtaagggcggccctcaaggttgcgcaggaccaggctgtggatgatcccctcgtggggcttctgcagcagctcctcaaacagccggagtgtggtgatgctgatctcatcagagaggtggtcacaatgcccgatgagatgagcatacagggtgtgggggttgtccccgggggcttcaggctgccggtctgtgcccaggaggaaagccacggcctcccgcagcagcgcaggggagcgaagctggcgcagcatggctgtgaggagggcggtggaggtcaagatgctctgctcggacacgtgcaggagctggggctgcagggtctccacgaagaagttctcagccacagccttcgccaaggcgtccgcaaccaccgtgtgtgcctctgtgatgaggtggtcgcagtaatcaaaccagcccaagaaggcagccaaggcctccttgccagggaaggaagcctcatcagacggggcactgggtaacctccagctgatgccctctaaggcggcaatgtctgcggggtccaggaagacaggcatggaccggtacaactggcaaaggtgccggacgatcgcagggcagcaggcgctgctctgtaccaggtaggtggcagctgctggggaggccatgctcaccaggagcagcaggttctcctgggccttcaaggccacccgactcttcttgctctggcacagcccaagcagggaggtaatcaggttgctctctgtggtcccaccgtccagctcctcggtctcagcaggcatgtggctgttcaaggcctgggccccacaggactccccgtccagctggggcctggcaggagcaccatcgtgggagcagtccttgtccccgtggctggttgtgtccttaggcagggcagtgggttctccgcatgctttcttcctacctacaatctttttaccttccaggatgtaggcgagcagctctgggtcctgctggatcttggagcagaggacggtggtgaactgcacctcctccttttctgtaacggatccggaagcagtcccaccaagtcggaggagtttctgcacaggcctgtggacgctgaggtaagcagcagcagggggtgctgcacctgcgccagaaccttgctgaagaactggaacacctgctgccgcatgcctggggggtactcggccttgcccagcgtgcagagagtctccaggatcttgtgctgcagcaggtactccaggcagggccctgcctcacccgcggccgc

SEQ ID NO: 23084 - DNA, 1890 bp, Homo sapiens
tatagggagtcgacccacgcgtccgggcggagatcgcgtctctttcgctccgtgtcccgctgctgctcctgtgagcgcccggcgagtccgtcccgtccaccgtccgcagctggtagccagcctgcccctcgcctcgactccctttcaccaacaccgacacccacattgacacctccagtccggccagccgctccactcgttgcctttgcatctccacacatggcgtcctccgcgcagagcggcggctcctccgggggacccgcggtccccaccgtgcagcggggcatcatcaagatggtcctctcagggtgcgccatcattgtccgaggtcagcctcgtggtgggcctcctcctgagcggcagatcaacctcagcaacattcgtgctggaaatcttgctcgccgggcagccgccacacaacctgatgcaaaggatacccctgatgagccctgggcatttccagctcgagagttccttcgaaagaagctgattgggaaggaagtctgtttcacgatagaaaacaagactccccagggcgagagtatggcatgatctaccttggaaaagataccaatggggaaaacattgcagaacattctgggtaccatccttcatccaaatggcaacatcacagagctcctcctgaaggaaggtttcgcacgctgtgtggactggtcgattgcagtttacacccggggcgcagaaaagctgagggcggcagagaggtttgcaaagagcgcaggctgagaatatggagagactatgtggctcccacaggtaatttggaccaaaaggacaagcagtttgttgccaaggtgatgcaggttctgaatgctgatgccattgttgtgaagctgaactcaggcgattacaagacgattcacctgtccagcatccgaccaccgaggctggagggggagaacacccaggataagaacaagaaactgcgtcccctgtatgacattccttacatgtttgaggcccgggaatttcttcgaaaaaagcttattgggaagaaggtcaatgtgacggtggactacattagaccagccagcccagccacagagacagtgcctgccttttcagagcgtacctgtgccactgtcaccattggaggaataaacattgctgaggctcttgtcagcaaaggtctagccacagtgatcagataccggcaggatgatgaccagagatcatcacactacgatgaactgcttgctgcagaggccagagctattaagaatggcaaaggattgcatagcaagaaggaagtgcctatccaccgtgttgcagatatatctggggatacccaaaaagcaaagcagttcctgccttttcttcagcgggcaggtcgttctgaagctgtggtggaatacgtcttcagtggttctcgtctcaaactctatttgccaaaggaaacttgccttatcaccttcttgcttgcaggcattgaatgccccagaggagcccgaaacctcccaggcttggtgcaggaaggagagcccttcagcgaggaagctacacttttcaccaaggaactggtgctgcagcgagaggtggaggtggaggtggagagcatggacaaggccggcaactttatcggctggctgcacatcgacggtgccaacctgtccgtcctgctggtggagcacgcgctctccaaggtccacttcaccgccgaacgcagctcctactacaagtccctgctgtctgccgaggaggccgcaaagcagaagaaagagaaggtctgggcccactatgaggagcagcccgtggaggaggtgatgccagtgctggaggagaaggagcgatctgctagctacaagcccgcgtttgtgaccgagatcactgatgacctgcacttctacgtgcaggatgtggagaccggca

SEQ ID NO: 23085 - DNA, 702 bp, Homo sapiens
  misc_feature 501, 530, 566, 647, 660, 702: n = A,T,C or G
ggtggtggcacatgcctgtaatcccagctactcaggaggctgaggtgggagaatcgcttgagcccgggaggcaggggttgcagcgagctgagatcgtaccactgcactccagcctgggcaacagagtgagaccctgtctcaaaaagaaaaaaaaaaaaagagagaaatcaggaacatcatgaaagatacagcaaaatgttttaccccagcccactgcaccacacctgggattgtgacaattaacttgataaattgttccttttcctgttcggaactgactaggttgtgcgtggatggaccagtgaaaagaaaatcctgtttgggtagggaagagggaagtagaaaacctctttcgtattcttggtgtcaagaaatgggaagagaatgagggagcagagacctgggttgagtgttggctctgcactaaacagctgtgtgatcttggtctagtgccttaacctctctgagcctcagtttgtacatttcagtaacattgggatnaatggtacatccacatgcccactttcacnagagctgcttgtgaaggacttggatgagaaaatgtnagagaagtaattttcggacacccattaaagctcaaatacaagggtgttggttagtgaaaaagttttcaactgtacttgtancccaccttgatancccctccatcagcattaagcgtgtattgagggaatgttaggn

SEQ ID NO: 23086 - DNA, 1322 bp, Homo sapiens
  misc_feature 1322: n = A,T,C or G
acgcggggacacaccaggattcgagggccacacgcctcagccagccccggcaagggcctatcaggggtgggtcggggcatccgagcgggtttgacggaaggagcggcggcgacggaggaggaggatggaggcggtggtgttcgtcttctctctcctcgattgttgcgcgctcatcttcctctcggtctacttcataattacattgtctgatttagaatgtgattacattaatgctagatcatgttgctcaaaattaaacaagtgggtaattccagaattgattggccataccattgtcactgtattactgctcatgtcattgcactggttcatcttccttctcaacttacctgttgccacttggaatatatatcgatacattatggtgccgagtggtaacatgggagtgtttgatccaacagaaatacacaatcgagggcagctgaagtcacacatgaaagaagccatgatcaagcttggtttccacttgctctgcttcttcatgtatctttatagtatgatcttagctttgataaatgactgaagctggagaagccgtggttgaagtcagcctacactacagtgcacagttgaggagccagagacttcttaaatcatccttagaaccgtgaccatagcagtatatattttcctcttggaacaaaaaactatttttgctgtatttttaccatataaagtatttaaaaaacacaccattgacaccagacaaaacaaagaaaaacactctcaaggacaccaacatacaagggacgggaccacacacacgaacagcaacacgggaaacacatggagcagagaccgtcgaaccactgacaccacagcataacaggcaccacggggacacaacactcgcacaaacacacacaaaggcgtacacgccacaaatagcgcgcatcaccacgggcaacacggacaagcacaacgtacgcgcaacaccatcacgcgaacacaaccccgcaagcacgacaacacacaccgcatcgcgcccccaagcgaagacaccacaaattgatcctaaacaaccatcgcttctcaactctctcatcctactccatccaacaatcacattcatacactataactaccaaaaagatcaatccacatcaccacaatacattctataccaactcacaacaaacacacaagactaccaactacactactcaccgacatcctatcccatctactcacacacaaacctaactaaacagcatcaaacataacacacataatcaaatcacaagagcttacacacactaaacaaataaaattaactcaactagatcgcctgcatcaccacn

SEQ ID NO: 23087 - DNA, 872 bp, Homo sapiens
  misc_feature 1, 2, 3, 866, 867, 868, 869, 870, 871, 872: n = A,T,C or G
nnncatcacttcgccgccgaatccccggcgccgcccagcggggcagagccaggccaggccgcccgcccaacctggtccgctgcctcttcggccatggaagctgccggcagccctgcggctacggagacagcttctccactcttcctcctcctccacctccgcccatgaaatggtgcactctccctttaagactaagatggtggcttgctacgatcgggactccacttccggtggggaggggggcgggaccccagcccgctcacgccggaagtggtttgcgttttcaagatggcgactccctatgttactgacgagaccggcggggtgggaaccgccaaacctctcccttctttttgacttcacccttggataccatcaaggccagaggatggaaccaagataacataaaataggtgctcctttgtgataatgggctatttgtatctctgagggcttccacacaggatggccattcaagaagcttctgctctgcctttcattacagtctatctttagtcctcctaaaccttcagctataatctctatgcaatcaacttaaatatatgttgtagtattgtccctttctcccaaattccatgtaaaacacttgcctgaattgaattgtttccacaaagttgttttccctgtggacttgtttatatcagtagtttttattttcccaattttccaaattcacgagtgataattatcaataggtgtgtactcggtaagcgatccttctcactagaatgtatactctcaagaaggcgagaacttggtggcgtattcactggggattccaaaggtctgttacgtgttggccacgcagtagtgccactacacagttaatcccaaaaaaacaacannnnnnn

SEQ ID NO: 23088 - DNA, 2512 bp, Homo sapiens
catcagctttttaagaaaattttgagagaaaagcaagtgaagaaaagagtagtcagtgcccaacatcacggatctctcactgaacacaccatgcctggtattctctcacagtgatgtcaccatttctacctgccacgtatcggcgaaggttgggactcgactggtgtttgatcacgatgggaaaatcatccagaaaacccccttcgccttctgccgtgattgtcagcttcttgaggctccccagccatgcttcctgtacagcctgcaaaactgactcctagaagtaccccaccccacccctgctccttggaggacaacgtgatcactgtattcagctctgtcaagaatggtccaggttcttctagatgatctgcacaaatggttcctctcctccagcctggtgtctgccattagcattggaataaagttcctgctgaaaatccacatctcccctgggtccggtgttctggaagcgagagagacaatgtcacacttcaaggaggcagctctctagacaggaaagttattcacgtcccatgtcaattgagaaatgcaattttatctgctgcctttcattctataccctgcttctgaaccatcgtgttcaactgtgaaactcacactttggtgaccacgactccaaaactcacttaatacacccaaggtcagccccagtgatctgcttcatagcaaggactttgggtgggtctgcccagggagtagggcaccctcagagaatgtggctttggactttatcacagctggggccttttgtgtcacttaagatctaaacttgtaaccatgctagatgtgtttctaatgtgacaacatcacgaaccacgagtccagaagcctaatccttaatcctacctcctcatgatgaagtctcatgctctgtgctcaacgtggttagctgcacaagatgtaaaccaaagcttcactgaaccctcgacccaaatcagtaactcaagtgcgtcaatcataatgaacctccccaaactcagtttttatgattatttttgaggcagggtctcactctgtcgaccagactggagtgcagtggcaggatcagggctccgtgcagccctgaccttccaggctccagcgatcctcccgcctcagcctcctgagtagttgggagtagagatgcgtcccacatcgcctggctaatttttgtatttttgtggagaggggatctcgccacgttgcccaggcttgaagccggatcaagcaattgggttcttcggatttccgaaatagaccccaatattctgcctttaccccggaggatgcagatgtaccttctctcaggccgatgacctcaggcctccacggtccctggagctctaggaaaggcgagccgcgatctcgcgcccacacccagtgctctgggtcataagcctggatctggaaaaacaaacgccctttgagaagacggggactcgccaggatacccctctctcccctcatccagcctccagcccacccaattcctccccacctcctccacctccccaggccccactcacctcctccaactcctctggggaaacccaagccctgcagctcatggaacagaagaagtggaaccgtcgtttctggaacaggactatctgagagcggttcttcctggccctcgagttcatggaacggtataactggaaccgacgcttacggagcaagggtatgcgagagcggttcttcctggccctcgggttcgtggaaccggtataactggaaccgacgcttacggagcaagggtatgcgagagcggttcttcctggccctcgggttcatggaatggcctaactggaaccaaggcttacggagcaagggtatgcgagagcggttcttcctatacaggaagtggaagatgttttgtttggagtcctcgtcgtcctcctccatgctcattggccaggtagctgaggacagaaatcaggttgctgctcaggggcaccaccaggagaggcctccggctgaggtcagcttcccagagaggaaggtaagggaccgtccctagctcaggactggcacccaccctgcagagagccatgccttcctcaggagggctctgctggacagagacctgatcaagggcgtctcccactccttccggcatggagacaaaaacccaaagagtggcagaagtggaagcatacggcaggaatcacaaacaacatggaaaccaacgcagaagatcactgacggcacgcagataacacaggctagcaaaaaaccaagaaccccgtgctcactaaaaaggaccaccatgcacacccaggcccacgcagagaaacccgagtagacagcagacacaggagtccgcataaaaccgaaagggaccacacgccacaccggaaaacaagcacacagaccaaaaaactgcagggaacacagcgaaaacagagagaagaaaggacacagagcgcacgaccaaaggcacacaagaaacaacgccaaaccaacacgacaacagacaaagcagacatcagccacgcggtaaagcgga

SEQ ID NO: 23089 - DNA, 4592 bp, Homo sapiens
  misc_feature 1, 2, 3, 4, 4581, 4582, 4583, 4584, 4585, 4586, 4587, 4588,4589, 4590, 4591, 4592: n = A,T,C or G
nnnnagaaggcgacgcctcttgcctcctgtctctcgcctctcgaaggaagtttgctcttaatttcagagccgggttcgccgtcggatcaacctccaggagctagcagcgggcgcggaccgggcagtttccgcgctcagcacaggcagctcgcggtcatgggcggctcagcctccagccagctggacgagggcaagtgcgcttacatccgagggaaaactgaggctgccatcaaaaacttcagtccctactacagtcgtcagtactctgtggctttctgcaatcacgtgcgcactgaagtagaacagcaaagagatttaacgtcacagtttttgaagaccaagccaccattggcgcctggaactattttgtatgaagcagagctatcacaattttctgaagacataaagaagtggaaggagagatacgttgtagttaaaaatgattatgctgtggagagctatgagaataaagaggcctatcagagaggagctgctcctaaatgtcgaattcttccagccggtggcaaggtgttaacctcagaagatgaatataatctgttgtctgacaggcatttcccagaccctcttgcctccagtgagaaggagaacactcagccctttgtggtcctgcccaaggaattcccagtgtacctgtggcagcccttcttcagacacggctacttctgcttccacgaggctgctgaccagaagaggtttagtgccctcctgagtgactgcgtcaggcatctcaatcatgattacatgaagcagatgacatttgaagcccaggcctttttagaagctgtgcaattcttccgacaggagaagggtcactatggttcctgggaaatgatcactggggatgaaatccagatcctgagtaacctggtgatggaggagctcctgcccactcttcagacagacctgctgcctaagatgaaggggaagaagaatgacagaaagaggacgtggcttggtctcctcgaggaggcctacaccctggttcagcatcaagtttcagaaggattaagtgccttgaaggaggaatgcagagctctgacaaagggcctggaaggaacgatccgttctgacatggatcagattgtgaactcaaagaactatttaattggaaagatcaaagcgatggtggcccagccggcggagaaaagctgcttggagagtgtgcagccattcctggcatccatcctggaggagctcatgggaccagtgagctcgggattcagtgaagtacgtgtactctttgagaaagaggtgaatgaagtcagccagaacttccagaccaccaaagacagtgtccagctaaaggagcatctagaccggcttatgaatcttccgctgcattccgtgaagatggaaccttgttatactaaagtcaacctgcttcacgagcgcctgcaggatctcaagagccgcttcagattcccccacattgatctggtggttcagaggacacagaactacatgcaggagctaatggagaatgcagtgttcacttttgagcagttgctttccccacatctccaaggagaggcctccaaaactgcagttgccattgagaaggttaaactccgagtcttaaagcaatatgattatgacagcagcaccatccgaaagaagatatttcaagaggcactagttcaaatcacacttcccactgtgcagaaggcactggcgtccacatgcaaaccagagcttcagaaatacgagcagttcatctttgcagatcataccaatatgattcacgttgaaaatgtctatgaggagattttacatcagatcctgcttgatgaaactctgaaagtgataaaggaagctgctatcttgaagaaacacaacttatttgaagataacatggccttgcccagtgaaagtgtgtccagcttaacagatctaaagccccccacagggtcaaaccaggccagccctgccaggagagcttctgccattctgccaggagttctgggtagtgagaccctcagtaacgaagtattccaggagtcagaggaagagaagcagcctgaggtccctagctcgttggccaaaggagaaagcctttctctccctgggccaagcccacccccagatgggactgagcaggtgattatttcaagagtggatgaccccgtggtgaatcctgtggcaacagaggacacagcaggactcccgggcacatgctcatcagagctggagtttggagggacccttgaggatgaagaacccgcccaggaagagccagaacccatcactgcctcgggttctttgaaggcgctcagaaagttgctgacagcgtccgtggaagtaccagtggactctgctccagtgatggaagaagatacgaatggggagagccacgttccccaagaaaatgaagaagaagaggaaaaagagcccagtcaggcagctgccatccaccccgacaactgtgaagaaagtgaagtcagcgagagggaggcccaacctccctgtcccgaggcccatggggaggagttggggggatttccagaggtaggcagcccagcctctccgccagccagtggagggctcaccgaggagcccctggggcccatggagggggagctcccaggagaggcctgcacactcactgcccatgaaggaagagggggcaagtgtaccgaggaaggggatgcctcacagcaagagggctgcaccttaggttctgaccccatctgcctcagtgagagccaggtttctgaggaacaagaagagatgggagggcaaagcagcgcggcccaggccacggccagtgtgaatgcagaggagatcaaggtagcccgtattcatgagtgtcagtgggtggtggaggatgctccaaacccggatgtcctgctgtcacacaaagatgacgtgaaggagggagaaggtggtcaggagagtttcccagagctgccctcagaggagtgaaagggacaatttggctgaagtctttctctgaaaaaagccaaagggttataggggtacacttaggggttgcatgcaagctgttaccaaaaaatttttaagtattttcttaatttgaataataaaaccagaggaaatgcatacagggcatgagcaactgaggcaaacctttgtggacatgaattgttctacgatgaatttttgctttagtattttaataagaattacaaagacaatggcatacttggggtgagagggagctgaggatgtctgaggagggaatagtattgcagggaagactgagaaaacagtaggatgacagttttgagtatactctgcacttttcaattgtgcaatcttcttgtgcactttaaggctttttaattttgtttgagaatgcaaatgtatactgtaagtctacctttactatctactatgcctacttcaccatctcttaaggactcggcatttgtccacagtcagactgcaagagagggtaggtcatgaacagtcacccgtgctggctgtagcccccacagaggcaatcatgcccaatagattcaagagaagctaagcggaaatggagggtggaaggtgtgatctgtgggactgtctgggcctgttactcatcctgctatcaatttcttattaattaatcttgatgattcttattaattaatcacatttgcaggaaattcagatgaggcaagaaaattttattggcctgggtaagactgaaagcattccaaattaggcttagactgtgcaaagggcttagctaagttatcgagcttaaaacccgtcaattaaacaaacattatttgaacagttactgcatgccacgcactgtgttgggcttagtaataaaaaaaagaaaagataagtgcttgttctagcataaattaaaaggtccaagggaatttaatctggaagagaacatatgccaatttttaaactatgacagcttttttttttctctttccattcaaatagtcctggttcattcccagaagggcacaaaatgaatgaataaataaataaatgaataaagacaaaagccaaggtgtatgctctcaagttccaaagatgttatcaaaagctgaaatcatttgtttggtcattcagcaagctaattgagtctctgttatataccaagcactggggataccatggcgaaaaacaactttgttccttcctcctagaacttacattttaatggaaatagacaaaacacatcttcttaacggatggtgacctataaccattaatgttgaaaatggaagagacttgcttccaaaagattaaaaggagttgttcttttctccttcagaaaaataccagatcatttcctaaaatctccagtcccaagtattacatcgtggtttccctccccgactttttattttattttattctatttttttgagatggagtctcgctctgtcgccaaggctggagtgcagtggtgtgatctcggctcactgcaacctccgcctcctgggttcaggagattctcctctgtcagcgtcccaggtagctggaattacagccatgcggccccttcccggctcatttttgtatttttggtggagatgggttttcacctgctgcccggctgctctcaactcctaattggcagcnnnnnnnnnnnn

SEQ ID NO: 23090 - DNA, 383 bp, Homo sapiens
  misc_feature 1, 2, 3, 4, 5, 6, 7, 8, 9, 10, 11, 12, 13, 14: n = A,T,C or G
nnnnnnnnnnnnnnccgaggtactgccttatggtaagccacatacctttttatcttgtaatatctgagtcttggaattctttatcttccctactctatatctacaagacagtagcacctgacttatctagctgcagagctcttaattctatccttaggccccgattcagaaaagggggttcctcatgctggatctgaacaacccagcacaggcatgtctggggagcatggcgggagcctgcatgtggactcataggaccggcgcccgaaacgaagctagtggctggctcaggtgggcaaaccaggcaagaaaagcaactgtccttcggagcaaagtccacgtgatgggaagaaacaggtcatgatacttttgagtggttacat

SEQ ID NO: 23091 - DNA, 1159 bp, Homo sapiens; identical to SEQ ID NO: 22137
  misc_feature 1, 21, 44, 66, 85, 1158, 1159: n = A,T,C or G

SEQ ID NO: 23092 - DNA, 1107 bp, Homo sapiens
  misc_feature 1, 2, 1096, 1097, 1098, 1099, 1100, 1101, 1102, 1103, 1104,1105, 1106, 1107: n = A,T,C or G
nngaatttaggtgacactatagaagagctatgacgtcgcatgcacgcgtacgtaagcttggatcctctagagcggccgcctactactactaaattcgcggccgcgtcgaccctgtctggaatatctttatacaaacacaaataaacaaatgtgtcccctttcattcacatttgccccctttcattcaaatgactgatggtcacatgttcttcacaggttctgtctcttgcttttctcttccgcatcgcaggtggagtggctgaaacttctcagcaggcgcatctacactagtgacctgaggagagaaaccctaaccccacaatggctgcatcttctctgaagacgagactgatgctcatctttgaaatgaagggcagtgtgtgcatttctccatgaaggtatccagaaacagccatgccagagctgctgtggggtggctgaactgctattccttttctagggtgggatccccactctttgtaaggaaggatattggggtcctgacactgggaactcatcttgtcagtgaggccttctttaactgctgtcttgtaattgagccaccccatctgtgtttcctgttccaatttaggacttttttttttttatcataatataaagatctgaaatgctatgttttccttattcattggcttattatctttactatcccatcctccacactaaaagttttttcgagctggatttgggagttgtggggtaggttatattttgatcacttgtatttcccagcttctagaacagtgcccagcaaagtacttctctgaataaatgaataaagtaatattcctctgctctgctgttgccaactggaatatcctgagggaaatttctttactttcctcaggggatgatccagaagatgaaaaacaaattgtcattccatatagtcctcttctgagtgtttttcagttttgttaaaactcagatttttttctttttacctgaatgtttttttgttaatgattattagcatatacagtattttcttttatgtaccaaaaaaaggcaattgatacagtgcatgacttgaaaatatacctgccttctctgaggctcaaattcaggactgtannnnnnnnnnnn

SEQ ID NO: 23093 - DNA, 936 bp, Homo sapiens; identical to SEQ ID NO: 22476
  misc_feature 1, 2, 933, 934, 935, 936: n = A,T,C or G

SEQ ID NO: 23094 - DNA, 4444 bp, Homo sapiens; identical to SEQ ID NO: 22727

SEQ ID NO: 23095 - DNA, 3244 bp, Homo sapiens
  misc_feature 1, 2988, 3242, 3243, 3244: n = A,T,C or G
nctagggacctaaatactaggtcagctttggcgacactgtgtcttctcacataaccacctgtagcaagatggatcataaatgagaagtgtttgcctattgatttaaagcttattggaatcatgtctcttgtctcttcgtcttttctttgcttttcttctaacttttccctctagcctctcctcgccacaatttgctgcttactgctggtgttaatatttgtgtgggatgaattcttatcaggacaaccacttctcgaactgtaataatgaagataataatatctttattctttatcccccttcaaagaaattacctttgtgtcaaatgccgctttgttgagcccttaaaataccacctcctcatgtgtaaattgacacaatcactaatctggtaatttaaacaattgagatagcaaaagtgtttaacagactaggataattttttttttcatatttgccaaaatttttgtaaaccctgtcttgtcaaataagtgtataatattgtattattaatttatttttactttctataccatttcaaaacacattacactaagggggaaccaagactagtttcttcagggcagtggacgtagtagtttgtaaaaacgttttctatgacgcataagctagcatgcctatgatttatttccttcatgaatttgtcactggatcagcagctgtggaaataaagcttgtgagccctctgctggccacagtgaggaaagtagcacaaataggatacagttgtatgtagtcattggcaacaattgcatacaattttactaccaagagaaggtatagtatggaaagtccaaatgacttccttgattggatgttaacagctgactggtgtgagacttgaggtttcatctagtccttcaaaactatatggttgcctagattctctctggaaactgactttgtcaaataaatagcagattgtagtgtctggtttggtttggacagtagtgctttctatcatattgttgtgtgcaatggtaatttgttctactggccaaagcctctttcagcagtgccttgccatcatgcttaaaagtttggctagtatatcttgctggatggagccttgaactccggcaaggattgaaccatctgacttccaaatttgccttcccctctggacctcactattaacaagcaaacctttcagggccctcttagctctcagaagctatgtatgggctttcccagattttaaagctgctgcctcgagaactactcatttctctcctggtcagcagacagaaatagccatactaatctcatagggctcaaatgcatcttcaggcagcagggaaccaagcagcgtggcacaggccttcttgactggaggaagagcttgctggcatggtgggcagtattccaggagaggccatgtccgtgttcacttcttggcacatttcagttccgttttcctcttgtttaaaactgcctctttagatgtggatgccttaatgctgtaacacatttgaaaacattggcaatacttaagttgctgccatgattacagatggaattattggctaccaaagagacgcaattgatgatgagaagcatgattcttgcttccatataaccaaagttaatcttaattgcaatttgactccgtttccttggtagggatagactttcttcagattccaagtgctctcttaaatggcaaattaagttaaagaatactactgctccattcccctcacttattctccagttaattgcttgtcagttccatttcaagaaagcagtgatgttccaggtttgattcagttttcctgtgcacactattgccaaatttttttttagcaaagattctgcactggaacgtagacagttggaaacagtactacctacctagaggttatgtgttttctctttctccccgctttcacctctttctttcccaattcaaaacagccaagtgagccctgttctggtattttgaatcattagagaaaagaaagggagtggctgttttgagttgtcctttctttgcagaaaggagaaaatgtgattgtgttttttttttaccagcctacttctaagtgtcactgcctggtttttctctttttcaaggattagaactaagaggacacaccagcatcggagtgtattaagcccctgaaacacatggtagctagggactgaacacaggaaccgtatgacagcagcacaaacccccaaaggatgttcctgccttgtgggcccctgagccccttgggagactgagaatcatgaccagattcatccagaactgctgcagtgttaagtgaaaatcctctgtagttgttctgcagaggaaccttccttccattagaaaatttctgctcaatacagaatggtccacatcacccaaagtgcactgttggagatgctgtgaaattaaaacctctttgtacctgagacatctagattcacctcaggaggcctgaaggaaatgtgtaacttgtgggaaagaactagacaaccatttaggaattctctagatatactcagcctaacccagtggcttaacacaaggagattggctttgatctttttttcttgtggcatcttccagcaagttagaagtctcatgggataagactgcagttcccctggttcaatagctggaacagtgattttaaatgtccctttttctggatcccttgtaaacatgaaatcattccatggatggctgccttataattttgtctctttccactttaattgtgaatggttaaaaaaatgctgttttctgatattaaatttttattagtgcataccttaaaaaaacaaaaaacaaaaaaaaaaccccggggcttttttttgggggggggaaaaaggggttttggatgggcctgggcctttggtttccctgcccccttttcttgtcccagggggtaaattcggcagagtccccttatagggggggcgtattatttgcgtaagccgggtttccgcttgtctttcgtgcgcaacacaacnagaaagaaacggagagaacaaaaaaagaagaagaagagacaaacaagtacagaaacgaagacgagcaacaatacatcgacaaacgaaccaacacgaaacaaacaagaacacaaatgagaacgtaaaaaccacgaaaacactaagacagcaacaagatgaagaaaacgacaggacaagcaaaagagagacgagaacacacaaccgagaacaaaaaaagacacaaagatcaacaacaaaaacaagcatgacaacannn

SEQ ID NO: 23096 - DNA, 1137 bp, Homo sapiens
aaatttatttcccagtttactcccctcgctcaaactccgcgcccctctcgctccgagagacataggtctcgcgagatctttggtaaacttacagaaccggaagcagcgtgtagttctcttcccttttgcggccatcaccgaagcgggagcggggaaggattcggcgggcaagcgggtgtaatcagcagccatccgttcttgggcatggtggcttccgaccgcggggaccccgagagtctcttgtcggccgagtagcagccaggaaggagagactgggatggtttttttatctgttgctttcttaaatcaagggccgccgggccggagatggatggagggaccggggatttgggaactcgaaaacgagctgagggaagggagcctgtggaaatagactggagtctgggtagtgtcgtttcctagagaatggtctcgaagtaacttctcggtaaagtcttcacggaatttccagaccacacttgcccactgggaggcttttaggacccgagacgtgtgcaggcttttccagccaaaatgaagtttaatccctttgtgacttccgaccgaagcaagaatcgcaaaaggcatttcaatgcaccttcccacattcgaaggaagattatgtcttcccctctttccaaagagctgagacagaagtacaacgtgcgatccatgccccatccgaaaggatgattgaagttcaggttgtacgtggaacacctataaaggtcagcaaattggcaaagtagtccagggtttacacggaagaaatatgttatctacattgaacgggtgcagcgggaaaaaggcttaattggcacaacttttccacgtagggcattcaccccagcaaggtggttatcactaaggctaaaactgggacaaagacccgcaaaaagatcctcgaacggaaagcaatctcgcagtaggaaaggaagggcacttcagagacacctgagagatgcggataagtatcttttacaagctgtaaatgaccaaaaaagaaaccggttttcggggaagagtgagggcggctggccgaccttgcaagggagcggcctagggtatgacgcgcacttcggcctcgacatcgagcgtgctgtgtgggcctcctctatgtcatctatcgcggaggcc

SEQ ID NO: 23097 - DNA, 2543 bp, Homo sapiens
  misc_feature 1, 2, 2542, 2543: n = A,T,C or G
nnagctaggcatggtggcacatgcctgtaatcccagctactcgggaggctgaggcaggagaattgcttgaacccgggaggcagaggttgcagccggcccagggccctacccgccctggcgcactgctcttcccggtcatggaggcgccagccgccggcttgtttctgctcctgttgcttgggacttgggccccggcgccgggcagcgcctcctccgaggcaccgccgctgatcaatgaggacgtgaagcgcacagtggacctaagcagccacctggctaaggtgacggccgaggtggtcctggcgcacctgggcggcggctccacgtcccgagctacctctttcctgctggctttggagcctgagctcgaggcccggctggcgcacctgggcgtgcaggtaaagggagaagatgaggaagagaacaatttggaagtacgtgaaaccaaaattaagggtaaaagtgggagattcttcacagtcaagctcccagttgctcttgatcctggggccaagatttcagtcattgtggaaacagtctacacccatgtgcttcatccatatccaacccagatcacccagtcagagaaacagtttgtggtgtttgaggggaaccattatttctactctccctatccaacgaagacacaaaccatgcgtgtgaagcttgcctctcgaaatgtggagagctacaccaagctggggaaccccacgcgctctgaggacctactggattatgggcctttcagagatgtgcctgcctatagtcaggatacttttaaagtacattatgagaacaacagccctttcctgaccatcaccagcatgacccgagtcattgaagtctctcactggggtaatattgctgtggaagaaaatgtggacttaaagcacacaggagctgtgcttaaggggcctttctcacgctatgattaccagagacagccagatagtggaatatcctccatccgttcttttaagaccatccttcctgctgctgcccaggatgtttattaccgggatgagattggcaatgtttctaccagccacctccttattttggatgactctgtagagatggaaatccggcctcgcttccctctctttggcgggtggaagacccattacatcgttggctacaacctcccaagctatgagtacctctataatttgggtgaccagtatgcactgaagatgaggtttgtggaccatgtgtttgatgaacaagtgatagattctctgactgtgaagatcatcctgcctgaaggagccaagaacattgaaattgatagtccctatgaaatcagccgtgccccagatgagctgcactacacctatctggacacatttggccgccctgtgattgttgcctacaagaaaaatctggtagaacagcacattcaggacattgtggtccactacacgttcaacaaggtgctcatgctgcaggagcccctgctggtggtggcggccttctacatcctgttcttcaccgttatcatctatgttcggctggacttctccatcaccaaggatccagccgcagaagccaggatgaaggtagcctgcatcacagagcaggtcttgaccctggtcaacaagagaataggcctttaccgtcactttgacgagaccgtcaataggtacaagcaatcccgggacatctccaccctcaacagtggcaagaagagcctggagactgaacacaaggccttgaccagtgagattgcactgctgcagtccaggctgaagacagagggctctgatctgtgcgacagagtgagcgaaatgcagaagctggatgcacaggtcaaggagctggtgctgaagtcggcggtggaggctgagcgcctggtggctggcaagctcaagaaagacacgtacattgagaatgagaagctcatctcaggaaagcgccaggagctggtcaccaagatcgaccacatcctggatgccctgtagcccctgcccgcatcctccagggggcccagggtgcctgcactttgctgtggcaggcagattgggtggtagtgggaggttgtgcatggaggccagtgaaagctgacatctgtaaaaggccttcaaggaagagaaaccaggccctgcgtcaggcagtgtgagtttgccgtttgtccttaactttcttttttttttttttaaaaaaaagaaaactttaaaaaaactcccattaaaaacaaaacatctttgtgttttgaacaaaggaattttcaatatttgattggtattctgttctgaagtctaggatatttttcagcctataaagccccctgttttatgcccttctaattctgatgtttgggtattgtgtgagtgcatgtgtttttttttttttttttaaagcgtgtgtgaacaaatggaaataaagcagggactgtgaacaaaaaaaaaaaaaaatcagaaaaaaaaaaaaagggggggaggggcgaaaaatataaaggggcggtggtttttggtcacacatgatttgttatgcaaacagccccgggttggtcgaaatggtttaatgagtacggagatagtann

SEQ ID NO: 23098 - DNA, 438 bp, Homo sapiens
  misc_feature 1, 2: n = A,T,C or G
nnctactaaattcgcggccgcgtcgacttttttttttttggttacttctgctagctatttaatctaggaaatacagctcagaataaaaatgcagtcataaaacctgttggtataaagataagcagtttatttaatatctaattaaatgtggtcaccagagaaatcacagcttatgaaactttatcagaaaaagattaatccatttcaggcttaacccaaatgtcataagagaactcatgaatttagataggaatccacttattatccaaagacgttttcatatcaagttaggtgagcctatattactagctatatttatacttacttcaatcaaatttatatactttgtagctatcactgatgtggggcacaattatcgaaccagaataagataatagggagcctttctgtctttatcaaaaatttctagaatgttct

SEQ ID NO: 23099 - DNA, 3748 bp, Homo sapiens
  misc_feature 1, 2, 3740, 3741, 3742, 3743, 3744, 3745, 3746, 3747, 3748: n = A,T,C or G
nnacccacgcgtccggttaaagtcagggggcaaagagtaaacgcgcgactccagcgcgcggctacctacgcttggtgcttgctttctccagccatcggagaccagagccgccccctctgctcgagaaaggggctcagcggcggcggaagcggagggggaccaccgtggagagcgcggtcccagcccggccactgcggatccctgaaaccaaaaagctcctgctgcttctgtaccccgcctgtccctcccagctgcgcagggccccttcgtgggatcatcagcccgaagacagggatggagaggcctctgtgctcccacctctgcagctgcctggctatgctggccctcctgtcccccctgagcctggcacagtatgacagctggccccattaccccgagtacttccagcaaccggctcctgagtatcaccagccccaggcccccgccaacgtggccaagattcagctgcgcctggctgggcagaagaggaagcacagcgagggccgggtggaggtgtactatgatggccagtggggcaccgtgtgcgatgacgacttctccatccacgctgcccacgtcgtctgccgggagctgggctacgtggaggccaagtcctggactgccagctcctcctacggcaagggagaagggcccatctggttagacaatctccactgtactggcaacgaggcgacccttgcagcatgcacctccaatggctggggcgtcactgactgcaagcacacggaggatgtcggtgtggtgtgcagcgacaaaaggattcctgggttcaaatttgacaattcgttgatcaaccagatagagaacctgaatatccaggtggaggacattcggattcgagccatcctctcaacctaccgcaagcgcaccccagtgatggagggctacgtggaggtgaaggagggcaagacctggaagcagatctgtgacaagcactggacggccaagaattcccgcgtggtctgcggcatgtttggcttccctggggagaggacatacaataccaaagtgtacaaaatgtttgcctcacggaggaagcagcgctactggccattctccatggactgcaccggcacagaggcccacatctccagctgcaagctgggcccccaggtgtcactggaccccatgaagaatgtcacctgcgagaatgggctaccggccgtggtgagttgtgtgcctgggcaggtcttcagccctgacggaccctcgagattccggaaagcgtacaagccagagcaacccctggtgcgactgagaggcggtgcctacatcggggagggccgcgtggaggtgctcaaaaatggagagtgggggaccgtctgcgacgacaagtgggacctggtgtcggccagtgtggtctgcagagagctgggctttgggagtgccaaagaggcagtcactggctcccgactggggcaagggatcggacccatccacctcaacgagatccagtgcacaggcaatgagaagtccattatagactgcaagttcaatgccgagtctcagggctgcaaccacgaggaggatgctggtgtgagatgcaacacccctgccatgggcttgcagaagaagctgcgcctgaacggcggccgcaatccctacgagggccgagtggaggtgctggtggagagaaacgggtcccttgtgtgggggatggtgtgtggccaaaactggggcatcgtggaggccatggtggtctgccgccagctgggcctgggattcgccagcaacgccttccaggagacctggtattggcacggagatgtcaacagcaacaaagtggtcatgagtggagtgaagtgctcgggaacggagctgtccctggcgcactgccgccacgacggggaggacgtggcctgcccccagggcggagtgcagtacggggccggagttgcctgctcagaaaccgcccctgacctggtcctcaatgcggagatggtgcagcagaccacctacctggaggaccggcccatgttcctgctgcagtgtgccatggaggagaactgcctctcggcctcagccgcgcagaccgaccccaccacgggctaccgccggctcctgcgcttctcctcccagatccacaacaatggccagtccgacttccggcccaagaacggccgccacgcgtggatctggcacgactgtcacaggcactaccacagcatggaggtgttcacccactatgacctgctgaacctcaatggcaccaaggtggcagagggccacaaggccagcttctgcttggaggacacagaatgtgaaggagacatccagaagaattacgagtgtgccaacttcggcgatcagggcatcaccatgggctgctgggacatgtaccgccatgacatcgactgccagtgggttgacatcactgacgtgccccctggagactacctgttccaggttgttattaaccccaacttcgaggttgcagaatccgattactccaacaacatcatgaaatgcaggagccgctatgacggccaccgcatctggatgtacaactgccacataggtggttccttcagcgaagagacggaaaaaaagtttgagcacttcagcgggctcttaaacaaccagctgtccccgcagtaaagaagcctgcgtggtcaactcctgtcttcaggccacaccacatcttccatgggacttccccccaacaactgagtctgaacgaatgccacgtgccctcacccagcccggcccccaccctgtccagacccctacagctgtgtctaagctcaggaggaaagggaccctcccatcattcatggggggctgctacctgacccttggggcctgagaaggccttgggggggtggggtttgtccacagagctgctggagcagcaccaagagccagtcttgaccgggatgaggcccacagacaggttgtcatcagcttgtcccattcaagccaccgagctcaccacagacacagtggagccgcgctcttctccagtgacacgtggacaaatgcgggctcatcagcccccccagagagggtcaggccgaaccccatttctcctcctcttaggtcattttcagcaaacttgaatatctagacctctcttccaatgaaaccctccagtctattatagtcacatagataatggtgccacgtgttttctgatttggtgagctcagacttggtgcttccctatccacagcccccaccccttgtttttcaagatactattattatattttcacagacttttgaagcacaaatttattggcatttaatattggacatctgggcccttggaagtacaaatctaaggaaaaaccaacccactgtgtaagtgactcatcttcctgttgttccaattctgtgggtttttgattcaacggtgctataaccagggtcctgggtgacagggcgctcactgagcaccatgtgtcatcacagacacttacacatacttgaaacttggaataaaagaaagatttatgaaaaaaaaaaaaaaaaaaaaaaaaaactgtgcggcggctcgggacccgagaaaaggctttctaaacccaatccgtgtggcgcgcggggcccaggtagggaaagtgccactgggcaacaaagcgtggcccaaagagacctggcgccaggcagaagggccgggttccacccaataaaaaacccgcggggaccccgggggtttggacaatcaaggggggcggggcatacgggcctacaagcggcgcagaccaaagcgcgccgcnnnnnnnnn

SEQ ID NO: 23100 - DNA, 3166 bp, Homo sapiens
  misc_feature 1, 3150, 3151, 3152, 3153, 3154, 3155, 3156, 3157, 3158,3159, 3160, 3161, 3162, 3163, 3164, 3165, 3166: n = A,T,C or G
ncgtccgcccacgcgtccgcgacgccggcgtgatgtggcttccgctggtgctgctcctggctgtgctgctgctggccgtcctctgcaaagtttacttgggactattctctggcagctccccgaatcctttctccgaagatgtcaaacggcccccagcgcccctggtaactgacaaggaggccaggaagaaggttctcaaacaagctttttcagccaaccaagtgccggagaagctggatgtggtggtaattggcagtggctttgggggcctggctgcagctgcaattctagctaaagctggcaagcgagtcctggtgctggaacaacataccaaggcagggggctgctgtcatacctttggaaagaatggccttgaatttgacacaggaatccattacattgggcgtatggaagagggcagcattggccgttttatcttggaccagatcactgaagggcagctggactgggctcccctgtcctctccttttgacatcatggtactggaagggcccaatggccgaaaggagtaccccatgtacagtggagagaaagcctacattcagggcctcaaggagaagtttccacaggaggaagctatcattgacaagtatataaagctggttaaggtggtatccagtggagcccctcatgccatcctgttgaaattcctcccattgcccgtggttcagctcctcgacaggtgtgggctgctgactcgtttctctccattccttcaagcatccacccagagcctggctgaggtcctgcagcagctgggggcctcctctgagctccaggcagtactcagctacatcttccccacttacggtgtcacccccaaccacagtgccttttccatgcacgccctgctggtcaaccactacatgaaaggaggcttttatccccgagggggttccagtgaaattgccttccacaccatccctgtgattcagcgggctgggggcgctgtcctcacaaaggccactgtgcagagtgtgttgctggactcagctgggaaagcctgtggtgtcagtgtgaagaaggggcatgagctggtgaacatctattgccccatcgtggtctccaacgcaggactgttcaacacctatgaacacctactgccggggaacgcccgctgcctgccaggtgtgaagcagcaactggggacggtgcggcccggcttaggcatgacctctgttttcatctgcctgcgaggcaccaaggaagacctgcatctgccgtccaccaactactatgtttactatgacacggacatggaccaggcgatggagcgctacgtctccatgcccagggaagaggctgcggaacacatccctcttctcttcttcgctttcccatcagccaaagatccgacctgggaggaccgattcccaggccggtccaccatgatcatgctcatacccactgcctacgagtggtttgaggagtggcaggcggagctgaagggaaagcggggcagtgactatgagaccttcaaaaactcctttgtggaagcctctatgtcagtggtcctgaaactgttcccacagctggaggggaaggtggagagtgtgactgcaggatccccactcaccaaccagttctatctggctgctccccgaggtgcctgctacggggctgaccatgacctgggccgcctgcacccttgtgtgatggcctccttgagggcccagagccccatccccaacctctatctgacaggccaggatatcttcacctgtggactggtcggggccctgcaaggtgccctgctgtgcagcagcgccatcctgaagcggaacttgtactcagaccttaagaatcttgattctaggatccgggcacagaagaaaaagaattagttccatcagggaggagtcagaggaatttgcccaatggctggggcatctcccttgacttacccataatgtctttctgcattagttccttgcacgtataaagcactctaatttggttctgatgcctgaagagaggcctagtttaaatcacaattccgaatctggggcaatggaatcactgcttccagctggggcaggtgagatctttacgccttttataacatgccatccctactaataggatattgacttggatagcttgatgtctcatgacgagcggcgctctgcatccctcacccatgcctcctaactcagtgatcaaagcgaatattccatctgtggatagaacccctggcagtgttgtcagctcaacctggtgggttcagttctgtcctgaggcttctgctctcattcatttagtgctacgctgcacagttctacactgtcaagggaaaagggagactaatgaggcttaactcaaaacctgggcatggttttggttgccattccataggtttggagagctctagatctcttttgtgctgggttcagtggctcttcaggggacaggaaatgcctgtgtctggccagtgtggttctggagctttggggtaacagcaggatccatcagttagtagggtgcatgtcagatgatcatatccaattcatatggaagtcccgggtctgtcttccttatcatcggggtggcagctggttctcaatgtgccagcagggactcagtacctgagcctcaatcaagccttatccaccaaatacacagggaagggtgatgcagggaagggtgacatcaggagtcagggcatggactggtaagatgaatactttgctgggctgaagcaggctgcagggcattccagccaagggcacagcaggggacagtgcagggaggtgtggggtaagggagggaagtcacatcagaaaagggaaagccacggaatgtgtgtgaagcccagaaatggcatttgcagttaattagcacatgtgagggttagacaggtaggtgaatgcaagctcaaggtttggaaaaatgacttttcagttatgtctttggtatcagacatacgaaaggtctctttgtagttcgtgttaatgtaacattaataaatttattgattccattgctttaacatttgaaaattattttgggtttttgttcaagaaaacaaaactattattgtgatggcatttgaggaagctcaagtaaacactatatactgaataacacccaaatagctttaaaaaattaaaactcaagtaattttaaagnnnnnnnnnnnnnnnnn

SEQ ID NO: 23101 - DNA, 1063 bp, Homo sapiens
  misc_feature 1059, 1060, 1061, 1062, 1063: n = A,T,C or G
acgcggggcctctttccgccatctttccgcgccggtgagtagcactctctgagagctccaatttcatccgtctgccatcggcgccatcctgcaatctaagccacaatggtgcgcatgaatgtcctggcagatgctctcaagagtatcaacaatgccgaaaagagaggcaaacgccaggtgcttattaggccgtgctccaaagtcatcgtccggtttctcactgtgatgatgaagcatggttacattggcgaatttgaaatcattgatgaccacagagctgggaaaattgttgtgaacctcacaggcaggctaaacaagtgtggggtgatcagccccagatttgacgtgcaactcaaagacctggaaaaatggcagaataatctgcttccatcccgccagtttggtttcattgtactgacaacctcagctggcatcatggaccatgaagaagcaagacgaaaacacacaggagggaaaatcctgggattctttttctaagggatcgtaatacactatatttacaaataaaatgcctcattggacaaaaacaaaataaaaactaacacaaaaaaacctccgagggacattatatttcggggggggaaaaacagggggatcgtgagaaacggggccctttgtccaaataagcatggtccccgcggaaccccagcgttcttggacaacagtgggtcacactccggccggccccccaaatcaggcccgaatcatcccacacacgcagggggtcaccggggtcaaggaatccggggaaaagcgggcaaggcacagacgcgatacagaggcaacaacgcagcacgagggtacaacacaagagtacaaacgaagctagcaccggacaagcctaacaacatcagagtcacaacgcccaggaaacacacaacaacacgcgactcgcggacgaccaccagatagctaacgaacggaaagcccacggacgtacagccggcgcacgagcgacgtacaccaacgactacacatcaagcacgccaagccccacacacggcgacgagcggacgcaacagcgcgcgaccagcagannnnn

SEQ ID NO: 23102 - DNA, 1883 bp, Homo sapiens
gatcgtgtcgcccacgcgtccggcgggacttccggcgcgctggagcgttttccggccgtgcgtttgtggccgtccggcctccctgacatgcagccctctggaccccgaggttggaccctactgtgacacacctaccatgcggacactcttcaacctcctctggcttgccctggcctgcagccctgttcacactaccctgtcaaagtcagatgccaaaaaagccgcctcaaagacgctgctggagaagagtcagttttcagataagccggtgcaagaccggggtttggtggtgacggacctcaaagctgagagtgtggttcttgagcatcgcagctactgctcggcaaaggcccgggacagacactttgctggggatgtactgggctatgtcactccatggaacagccatggctacgatgtcaccaaggtctttgggagcaagttcacacagatctcacccgtctggctgcagctgaagagacgtggccgtgagatgtttgaggtcacgggcctccacgacgtggaccaagggtggatgcgagctgtcaggaagcatgccaagggcctgcacatagtgcctcggctcctgtttgaggactggacttacgatgatttccggaacgtcttagacagtgaggatgagatagaggagctgagcaagaccgtggtccaggtggcaaagaaccagcatttcgatggcttcgtggtggaggtctggaaccagctgctaagccagaagcgcgtgggcctcatccacatgctcacccacttggccgaggctctgcaccaggcccggctgctggccctcctggtcatcccgcctgccatcacccccgggaccgaccagctgggcatgttcacgcacaaggagtttgagcagctggcccccgtgctggatggtttcagcctcatgacctacgactactctacaggcgcatcagcctggccctaatgcacccctgtcctgggttcgagcctgcgtcccagggtcctggacccgaagttccaagtggcgaagcaaaatcctcctggggctcaacttctatggtatggactacgcgacctccaaggatgcccgtgagcctgttgtcggggccagtgttcatggagcctcttgagtctgcattcgtactcttagcaaacttggaaaatttgaggccaaattcttcaaatattttttctgtttcttctcttctgtcttctcgtttggagaccacaaacactagatccattgaatttgtcccacagctcacgaatacaccttttaccttttggaattctttttttgttgagacggagtctcgctctgtcgcccaggctggagtgcagtggcgcaatcttggctcactgcaagctctgcctcccgggttcacgccattctcctgcctcagcctcccaagtagctgggactacaggcgtctgccaccgcgccctgctaatttttgtatctttagcagagatggggcttcaccatgttggccaggctggtcccgaattcctgaccccaaatgatctgcccacctcggcctcccaaagaacacaatttatagtgctgtgaaaacagacacctaccaggctctcaatcaaaagtctgtaagagccacattggaggaggtggctggggtcaaaatggcaatcttgtgcagtactgtggtacttaggaaacaaaatcccaactgagggaacccatagcagacatacaaccaatctctcccttaagacatttgacctatttttttttttttttttttttttgagacggagtctcactctgtaacccaggctggagtgcagcagtgtgatctcggctcactgcaacctctgcctcccagtctcaagcgactcccccgcgttaattaattctagaagactctcgagggggg

SEQ ID NO: 23103 - DNA, 1603 bp, Homo sapiens; identical to SEQ ID NO: 22091
  misc_feature 1, 2, 1602, 1603: n = A,T,C or G

SEQ ID NO: 23104 - DNA, 770 bp, Homo sapiens
agggagtcgacccacgcgtccgcacgtgcctcctggtctcagtatggcgctgtcctgggttcttacagtcctgagcctcctacctctgctggaagcccagatcccattgtgtgccaacctagtaccggtgcccatcaccaacgccaccctggaccggatcactggcaagtggttttatatcgcatcggcctttcgaaacgaggagtacaataagtcggttcaggagatccaagcaaccttcttttactttacccccaacaagacagaggacacgatctttctcagagagtaccagacccgccagaaccagtgcttctataactccagttacctgaatgtccagcgggagaatgggaccgtctccagatacgagggaggccgagaacatgttgctcacctgctgttccttagggacaccaagaccttgatgtttggttcctacctggacgatgagaagaactgggggctgtctttctatgctgacaagccagagacgaccaaggagcaactgggagagttctacgaagctctcgactgcttgtgcattcccaggtcagatgtcatgtacaccgactggaaaaaggataagtgtgagccactggagaagcagcacgagaaggagaggaaacaggaggagggggaatcctagcaggacacagtccttggatcaggacagagacttgggggccatcctgcccctccaacccgacatgtgtacctcagctttttccctcacttgcatcaaataaagcttttgtgtttggaacagc

SEQ ID NO: 23105 - DNA, 5231 bp, Homo sapiens
  misc_feature 1, 2, 5231: n = A,T,C or G
nnactgcgaaaggagcagggttgcggagctagggctccagcctgcggccgcgcattcttgcgtctggccagccgcgagctctaagggtcggccccgcccggtccgcccccgcggctccctgccaggctctcgcgggcgcgctcggggtggggcctcgcggctggcggagatgcggccggggctgcgcggtggtgatgcgagcctgctgggcggcgcgccggggcagccggagccgcgcgccgcggcgctgtaatcggacaccaagagcgctcgcccccggcctccggccactttccattcactccgaggtgcttgattgagcgacgcggagaagagctccgggtgccgcggcactgcagcgctgagattcctttacaaagaaactcagaggaccgggaagaaagaatttcacctttgcgacgtgctagaaaataaggtcgtctgggaaaaggactggagacacaagcgcatccaaccccggtagcaaactgatgacttttccgtgctgatttctttcaacctcggtattttcccttggatattaacttgcatatctgaagaaatggcattccggacaatttgcgtgttggttggagtatttatttgttctatctgtgtgaaaggatcttcccagccccaagcaagagtttatttaacatttgatgaacttcgagaaaccaagacctctgaatacttcagcctttcccaccatcctttagactacaggattttattaatggatgaagatcaggaccggatatatgtgggaagcaaagatcacattctttccctgaatattaacaatataagtcaagaagctttgagtgttttctggccagcatctacaatcaaagttgaagaatgcaaaatggctggcaaagatcccacacacggctgtgggaactttgtccgtgtaattcagactttcaatcgcacacatttgtatgtctgtgggagtggcgctttcagtcctgtctgtacttacttgaacagagggaggagatcagaggaccaagttttcatgattgactccaagtgtgaatctggaaaaggacgctgctctttcaaccccaacgtgaacacggtgtctgttatgatcaatgaggagcttttctctggaatgtatatagatttcatggggacagatgctgctatttttcgaagtttaaccaagaggaatgcggtcagaactgatcaacataattccaaatggctaagtgaacctatgtttgtagatgcacatgtcatcccagatggtactgatccaaatgatgctaaggtgtacttcttcttcaaagaaaaactgactgacaataacaggagcacgaaacagattcattccatgattgctcgaatatgtcctaatgacactggtggactgcgtagccttgtcaacaagtggaccactttcttaaaggcgaggctggtgtgctcggtaacagatgaagacggcccagaaacacactttgatgaattagaggatgtgtttctgctggaaactgataacccgaggacaacactagtgtatggcatttttacaacatcaagctcagttttcaaaggatcagccgtgtgtgtgtatcatttatctgatatacagactgtgtttaatgggccttttgcccacaaagaagggcccaatcatcagctgatttcctatcagggcagaattccatatcctcgccctggaacttgtccaggaggagcatttacacccaatatgcgaaccaccaaggagttcccagatgatgttgtcacttttattcggaaccatcctctcatgtacaattccatctacccaatccacaaaaggcctttgattgttcgtattggcactgactacaagtatacaaagatagctgtggatcgagtgaacgctgctgatgggagataccatgtcctgtttctcggaacagatcggggtactgtgcaaaaagtggttgttcttcctactaacaactctgtcagtggcgagctcattctggaggagctggaagtctttaagaatcatgctcctataacaacaatgaaaatttcatctaaaaagcaacagttgtatgtgagttccaatgaaggggtttcccaggtatctctgcaccgctgccacatctatggtacagcctgtgctgactgctgcctggcgcgggacccttattgcgcctgggatggccattcctgttccagattctacccaactgggaaacggaggagccgaagacaagatgtgagacatggaaacccactgactcaatgcagaggatttaatctaaaagcatacagaaatgcagctgaaattgtgcagtatggagtaaaaaataacaccacttttctggagtgtgcccccaagtctccgcaggcatctatcaagtggctgttacagaaagacaaagacaggaggaaagaggttaagctgaatgaacgaataatagccacttcacagggactcctgatccgctctgttcagggttctgaccaaggactttatcactgcattgctacagaaaatagtttcaagcagaccatagccaagatcaacttcaaagttttagattcagaaatggtggctgttgtgacggacaaatggtccccgtggacctgggccagctctgtgagggctttacccttccacccgaaggacatcatgggggcattcagccactcagaaatgcagatgattaaccaatactgcaaagacactcggcagcaacatcagcagggagatgaatcacagaaaatgagaggggactatggcaagttaaaggccctcatcaatagtcggaaaagtagaaacaggaggaatcagttgccagagtcataatattttcttatgtgggtcttatgcttccattaacaaatgctctgtcttcaatgatcaaattttgagcaaagaaacttgtgctttaccaaggggaattactgaaaaaggtgattactcctgaagtgagttttacacgaactgaaatgagcatgcattttcttgtatgatagtgactagcactagacatgtcatggtcctcatggtgcatataaatatatttaacttaacccagattttatttatatctttattcaccttttcttcaaaatcgatatggtggctgcaaaactagaattgttgcatccctcaattgaatgagggccatatccctgtggtattcctttcctgctttggggctttagaattctaattgtcagtgattttgtatatgaaaacaagttccaaatccacagcttttacgtagtaaaagtcataaatgcatatgacagaatggctatcaaaagaaatagaaaaggaagacggcatttaaagttgtataaaaacacgagttattcataaagagaaaatgatgagtttttatggttccaatgaaatatgttggggtttttttaagattgtaaaaataatcagttactggtatctgtcactgacctttgtttccttattcaggaagataaaaatcagtaacctaccccatgaagatatttggtgggagttatatcagtgaagcagtttggtttatattcttatgttatcaccttccaaacaaaagcacttactttttttggaagttatttaatttattttagactcaaagaatataatcttgcactactcagttattactgtttgttctcttattccctagtctgtgtggcaaattaaacaatataagaaggaaaaatttgaagtattagacttctaaataaggggtgaaatcatcagaaagaaaaatcaaagtagaaactactaattttttaagaggaatttataacaaatatggctagttttcaacttcagtactcaaattcaatgattcttccttttattaaaaccagtctcagatatcatactgatttttaagtcaacactatatattttatgatcttttcagtgtgatggcaaggtgcttgttatgtctagaaagtaagaaaacaatatgaggagacattctgtctttcaaaaggtaatggtacatacgttcactggtctctaagtgtaaaagtagtaaattttgtgatgaataaaataattatctcctaattgtatgttagaataattttattagaataatttcatactgaaattattttctccaaataaaaattagatggaaaaatgtgaaaaaaattattcatgctctcatatatattttaaaaacactacttttgcttttttatttaccttttaagacattttcatgcttccaggtaaaaacagatattgtaccatgtacctaatccaaatatcatataaacattttatttatagttaataatctatgatgaaggtaattaaagtagattatggcctttttaagtattgcagtctaaaacttcaaaaactaaaatcattgtcaaaattaatatgattattaatcagaatatcagaatatgattcactatttaaactatgataaattatgataatatatgaggaggcctcgctatagcaaaaatagttaaaatgctgacataacaccaaacttcattttttaaaaaatctgttgttccaaatgtgtataattttaaagtaatttctaaagcagtttattataatggtttgcctgcttaaaaggtataattaaacttcttttctcttctacattgacacacagaaatgtgtcaatgtaaagccaaaaccatcttctgtgtttatggccaatctattctcaaagttaaaagtaaaattgtttcagagtcacagttccctttatttcacataagcccaaactgatagacagtaacggtgtttagttttatactatatttgtgctatttaattctttctattttcacaattattaaattgtgtacactttcattacttttaaaaatgtagaaattcttcatgaacataactctgctgaatgtaaaagaaaattttttttcaaaaatgctgttaatgtatactactggtggttgattggttttattttatgtagcttgacaattcagtgacttaatatctattccatttgtattgtacataaaattttctagaaatacacttttttccaaagtgtaagtttgtgaatagattttagcatgatgaaactgtcataatggtgaatgttcaatctgtgtaagaaaacaaactaaatgtagttgtcacactaaaatttaattggatattgatgaaatcattggcctggcaaaataaaacatgttgaattccccaattaataaaaagtaaataaataaacttcaacactctttatgataacaacacn

SEQ ID NO: 23106 - DNA, 388 bp, Homo sapiens
acgcggggactttataccagtcatgtggcagaaatcaggcctgctctgtgaatcggctttgtgcagatcatgaggcgcacctatgttggcagcatgcctggtcgcatcatcaacggcttgaagactgtgggagtgaacaacccagtgttcctattagatgaggttgacaaactgggaaaaagtctacagggtgatccagcagcagctctgcttgaggtgttggatcctgaacaaaaccataacttcacagatcattatctaaatgtggcctttgacctttctcaagttctttttatagctactgccaacaccactgctaccattccagctgccttgttggacagaatggagatcattcaggttccaggttatacacaggaggagaaga

SEQ ID NO: 23107 - DNA, 459 bp, Homo sapiens; identical to SEQ ID NO: 21058
  misc_feature 1, 2: n = A,T,C or G

SEQ ID NO: 23108 - DNA, 2140 bp, Homo sapiens
  misc_feature 2140: n = A,T,C or G
tagggccgttacctgtttccggcagtcgacacgctcttcgcttctcggggcttgtctccgtgtcctccgtctcagttgtttctccctctctatcctcctctgtctcagtctccccagccttggggccggtgcctcttccgggcttcggcgaatgagacctgcggacctgcccccgcgccccatggaagaatccccggcgtccagctctgccccgacagagacggaggagccggggtccagtgcagaggtcatggaagaagtgacaacatgctccttcaacagccctctgttccggcaggaagatgacagagggattacctaccggatcccagccctgctctacataccccccacccacaccttcctggcctttgcagagaagcgttccacgaggagagatgaggatgctctccacctggtgctgaggcgagggttgaggattgggcagttggtacagtgggggcccctgaagccactgatggaagccacactaccggggcatcggaccatgaacccctgtcctgtatgggagcagaagagtggttgtgtgttcctgttcttcatctgtgtgcggggccatgtcacagagcgtcaacagattgtgtcaggcaggaatgctgcccgcctttgcttcatctacagtcaggatgctggatgttcatggagtgaggtgagggacttgactgaggaggtcattggctcagagctgaagcactgggccacatttgctgtgggcccaggtcatggcatccagctgcagtcagggagactggtcatccctgcgtatacctactacatcccttcctggttcttttgcttccagctaccatgtaaaaccaggcctcattctctgatgatctacagtgatgacctaggggtcacatggcaccatggtagactcattaggcccatggttacagtagaatgtgaagtggcagaggtgactgggagggctggccaccctgtgctatattgcagtgcccggacaccaaacaggtgccgggcagaggcgctcagcactgaccatggtgaaggctttcagagactggccctgagtcgacagctctgtgagcccccacatggttgccaagggagtgtggtaagtttccggcccctggagatcccacataggtgccaggactctagcagcaaagatgcacccaccattcagcagagctctccaggcagttcactgaggctggaggaggaagctggaacaccgtcagaatcatggctcttgtactcacacccaaccagtaggaaacagagggttgacctaggtatctatctcaaccagacccccttggaggctgcctgctggtcccgcccctggatcttgcactgtgggccctgtggctactctgatctggctgctctggaggaggagggcttgtttgggtgtttgtttgaatgtgggaccaagcaagagtgtgagcagattgccttccgcctgtttacacaccgggagatcctgagtcacctgcagggggactgcaccagccctggtaggaacccaagccaattcaaaagcaattaattggcttaggacccaatttccatagatgcaaatggcagttacagacaggttaacagaagctactgaagtctacagataatcaaaaaacttaatattctgttccctaccttttttcacttttcctcctccaaagagcaaaatgaaaattttgccttagctactgcagtggaaagagcactgaactaggagttggaagacaaggatgtggtcctggctctgcactggcttgcttttggaccttggatgtgtcacctgaactctctggacctcaggtttccatctgtaaaatgagagtattggttctaagatttctcatcttctcatccctaggacaagcatagtgcctgcatgcttcatgatcagtaagtcctggctgcataaaggactctgatgtcaaaatggaaaccaggggacttaccttttcacatgacttacccctcatccgagtgtgaggttacaagcaggtgtcatggcaggaaggaagaccagatctgtatgatttgttccatttttaataacaaaaatatccacacccttttaataatgctcagagttctgtaggctctctatcctagaggaattgagcaaaacataatggtcacn

SEQ ID NO: 23109 - DNA, 730 bp, Homo sapiens
  misc_feature 1, 725, 726, 727, 728, 729, 730: n = A,T,C or G
nccatagtccttaactattacacaacttcaaccaacctttctacagggtcttccctctgtcagtattacagaggcccatccattccctagtttcttgttttcatcaaccttaattaggctaatctggtgttcagcacatgggcctccaccaacttcacacacacacacacgcgctcatcacagttggatacaggcacacaaagatgggcttggtacttgtctaaggctctggcggctccgcgaatctcatgtgctgggccatcatggacgagagtggtcttcagcaccgcttgtaaagcagtgttaacaaccatcacaccgccagcagcaatgccctcctcagccaccaaggcaggccacaggtaacgagtgatgccccatcttgaacgcacccaagcctccgcctccataactcaacagcagcagggaaaaagcatggtctcaattctcttgacaaatctcagaggtattatactcttattccaactacatctccctccccaaagaagcgcacacaaaacaattttaaaacttatgttttctacggaaaccttacctcaaagtgatgcacaaaactgaaatttatatggctgcttaaatgtcacatcctggctcctagcagggaaacaaaacgctctgaagagaggatggttcctgcttgagggggaaaaagtctgtctttcttagcagtgctccttcccacaataaacaaatgatccaggaannnnnn

SEQ ID NO: 23110 - DNA, 2619 bp, Homo sapiens
  misc_feature 1, 2, 2604, 2605, 2606, 2607, 2608, 2609, 2610, 2611, 2612,2613, 2614, 2615, 2616, 2617, 2618, 2619: n = A,T,C or G
nnggaaacaggacctgaagacccttccagcatgccagaggaaagttcccccaggcggacgccgcagagcattcctggtgttcccaggacaccagactgcaataactggaggcgcctccttcctgcccacccttcgctcacgccccagcgccctctctgaccagcctccgcttggtggccttcctctggccgtgtgatgaggtggttgctgtctccataggggccagctccccagggcagactcacgtgcccctctgaggctcagaaaatgcccagcccttcctcaaaatgagcagccacccatgactttgtgggctccttgttagcctgagaccaggctttgcagaggggcggggggtgaggcttagcccagaaggagaactgagcaggaaaccaaggctcttctctgtcccctgcccttcccctcctgccagggggaggctcaggttggtccccgagtgccgcctgtactcacaaaggctgcctttcctctagagtcactaattttacctgatgctatgagagaatcatattgaagatgaaatgtctaatatataatgtatattttaaagcagagactattttggtggataggtgggagggagcaaggggagtttgagggaatcagagcttgatgctactgtacagaactggacaggttgggccggcagtggtggggccagagggctctgtgctctaggagctaagccagcagcccccgagaggggacttggctgggcctttcctatgggcaaggcccagtgctcttcctgcccaccagggaccatggagcagtggcaccctatggggctatgatccctaggcctgggcctgggcctgcctgtggcccagagctaccctgggagtgtcagtgctagcagcacagctacctctggtggcaggagaagagaggcccagcacagcagcaggccaggccttcctgtccaggtctgcatggagcactcggtgacccagagcagggactggaggcacccccagccctgccccaggccacagcaggacaggccgggacaggcctcacccaaggccaaggctggcatcagccaatcattcagagctgaggccctgggcctagcctgcccttctcaggtgccaataccaccccagccctgcccttggcctcactttttcccagcaataagtggggttcaccacccgcctcgggaatactttccccttctaaatgggacttgctgttacctcaggaggctccttagtgcaaatatgaccctggtcagggctttgccaccgttgaagccctgcagaaggtgcaatgtaggggttctggggccacagaggagaggccacttcccaccaggacccccaacatgaagtctaggcctcaggggctcccgcccttcttcctccagcagcgggaactgccactgctctcccaggccctgttctggaggctaaccttggttcctggagagtgtgcccctccaccctccctccagcagccctgatcacaccatgagagccaggaacgggtcaccctgctgaagatcactctgtgccctgggggaggagccaagccctcaccccacaaggggcaggtgggggcttggttgctgacccggcccaagtccccacagagcaccttctgtagctccagcttgtctccctggcttctctttgaaggagaaaaatgtaaaatatgcactgagaaagccagccccgcctgcttagtcagccccggcagcagggcagccatgggaactcaggaaaagcaggaaccctttccaaaagcccagagatgccctgggctcagatctgtaattctcccaggagctgtgatagagcaggccacacaaagtccctacgcctccctgctgcctcccccagatgcatgtgatggcatcaccattccccaaattgaatatcagcatgcggcctgaccagggactctttagatgcatgaatttatttatatgaaggctctcacagagacacacacagcacttcagtagcatttgcattcctggttaaagaatcaccaatatttaaaataaaaactttcctgaaattgggactgtcatgttatccagaagggctggtacatccgcccaccatgtccccctgctgggtcaggagccaacacaggaccctgcgtgtgagcgtgcctgacatctcacgcacggccactccagagccggtccctgtccttggaaagctgtgaagccttgcgttgagttccttctaactacaccagcgcaggggcgtggaggaactgaggtttggaaggaatgccaggtctcgcacagcttggctcgagaaggtgagaggaaggcaaggccagggaggggaccagagaggctggcacacaagccaagcaccacgtcaacacagcccagtccatacagaaatgggtttcatgcctgaaaagcttttacagaaagatgcgcctgtagccagtgaaagcggaaactaaggctcagtcctgcgagtgaggggtaagagcctccctccttccaagagaccagtcccacttccgaggggggccccggagccgtggggtctaacccggcccccggccgggcccccctctttcccgggcacgggcgaaccccgggggtctggcccnnnnnnnnnnnnnnnn

SEQ ID NO: 23111 - DNA, 4859 bp, Homo sapiens
  misc_feature 1, 2, 3, 4, 5, 6, 7, 8, 9, 10, 11, 12, 13, 14, 15, 16, 17,18, 19, 20, 21, 22, 23, 24, 25, 26, 27, 28, 29, 30, 31,4859: n = A,T,C or G
nnnnnnnnnnnnnnnnnnnnnnnnnnnnnnncagagggcatggcgacgggtcgggacaccagtgaaacttgaaccgggaagcgggaggacgtagagcagagaagagaacatttttaaaaggaagggattaaagagggtgggaaatctatggtttttattttaaaaaagaaaaaggaaaaaaaaaaagtcaataacaaaaaacccagctcaagaacccattctacgccaaactggaaaggagaagagagcaacaggaagattccagaaacggggggccccagtttttgaagaactttatgaacttttcaaagattattttcatatggcagcaagtgatacggaagactgctgtcagggacacctgatatggaaatcaaatagatttttaattaattgaacataagatttagggatttttccagaactcgaaagggtcaacagccctccagaatgtcgggctgcagcctgaggaggctgatgtttggagctggtgtgggattggcgaagcccagtccgggctccctagtcaggaaagacgggggacggccaggctgctggaaggcccccgggggcgcggggcgagttttctttttctgagcactctggataaatccctaagcaacgttgtttctcaaatgtcattaataatgtgtgttgcaaactttaggtttttttcttttctgaaaatgtattttctctttgaatccacccctagtcgcgtagcgtagggctagcggtcgtcacagacaccctagtagaatgtagcactcagcacccttgtctcctaccttgtgttcaactccaatgataccaatagaatattcctcaatgtaattgcacaaaaaaaagcgatataacataggcatgtaaccaatgtggcggtgcaggtgtgcgggtgagcgagcacgtgtgggtgtgcacgcgccgccctccccgcgtggccctcggcgccgccaccctagctggcgcagtcttgacactgcatccttccctcctagtgccttaccgagcgacagacgcggcgtgagggtttacttccactggtactccaagaaactgaggctagtcagacacaatctcagctcttctgttgtgctgttgtaacagtttacgctggccttttttttttctttttctttttctttttaaaatgttaatgcccgttgtctttcctgggctgtttgctagcggaaggatgccagggaagccagcaggagctaggagagagtccgtggatctcgaaagaaatatgggagacagatgcccggcgggtgcgtctggagatggggacggcgggagttgagttgtggcagtagttgagttgtaatttgtgggcggaggcccagagagactccccacccttcacccctgccccactctgtccccagttccgccatttgtgaggccagaggtttccggactgttggcctcgccaggcagccgtctcccgccccaggcggcatcccccagtccctcccgcctccacgagagcctggagctctcagcctcgcccggggctccactctctcctccggctccctgggctgttttgctctaacgatcttgccagatccctccctctgtagacaaccaccaacctctgtttgctgttgaattctctcctcacattacccaggtctgctcaagacatgattttggttttggtttctgagggttctagtgggcagaaggttggagggacacttatgagggtggccgggggtctgacgctgcactttggaaaaactcacacagttgaatttccaaagaaatctgccctttgccctctttgcacctttgatacattctggaagttttctcaggctttggacacttctggggatggaggtgtggagaagtggggagttccctctcttcatagtaaataactctgaaatatgtgaatgtgaatggcaggagaatctggccaaggatggggccgaaaagggtggttctaattgtttgcttctgatgttgagtctttagctgaccccacaggcaggtttccaaggtgcaaagagatctttcccgagtcagcggccccatcctcatcctccctccctttacttcctcactgtgcagtctccctcaaggatctactgtgaaaggtgtgtttgtagtgatatccaacctaactcagtaacgaagtcgttacttagctcttagctgtgaaataactctggaaacttccccaccccaaccataaattcttacttataaagaaacaggtccccaaactggaaacagcttagtccaggcctcagcgagaaggaaggacaccatgactgctccatgctgggcacagccgggcagtcttgccaagtgcctgctggaggctgtgccggcaagaggcctgcagcaaggagattcccttccctcgggccattatcaatactgtctttatctggaggtggggaagcgcagccctctgagacagcaggacaatggtcagttcagagagggtgagggcagcaaacgcttcagaggacacagaagccagaggacccccccccgccccacagctgggtcagcctggaaaatccatctattagggactttttggcagccagatggcagcaatagcccattaggtctcatcccgagttccaagtcttggctgcaaatgagcctcagttcgccttactggagagcacccccagattcctgggcacagttcatttccagccctttctagatctgatcttttagggggaaagacagcttaaaatgttcttttcattttaaagaaaattattctgtctgcttaagttggaggctacttactctttcacctgacattttctttccttttattcttccagatcaggaatgaaatttccatgctgctcataaagataatattattgtactaattatttttattaccattgtaattatgatcattatgttgatattttagtcagggttttaaatgcacatttattccaagtatctttgtgttttctctttaatatttaaacttattctctctgtgagtatataagtagactggagggacatccagatgtccagttttgtcaggcaaaaaaaaaaaggaaagacttaggaagtaggaaaattgtttctgtcatctctatcccaacaagagacgtcaagaaagatccaccacagaacaaaagtttaaagaagaatcaaagccttgattgggcttctgacaacatggtcaccatcaaggttgtcattttctagatcccagaggcctgggatgcgacgtcaggtggcatctcatgggctcggggaatgtcgagtcactgactgtccagcccttagccagcttctctcccacatcctcagagctctcctgtgcttctgaaatctgttaactaaatctttggcttgcctctggtatttaagcaagaaaattccctcccagaggtgaccccatccgcttccccacaatccatccttttgccatcggcgcacctggggcgtggcttaggttcttcaatgcagggacatttgccccctcccagaagctgctgggcacagtgaggtggcgtaagagtgactggcaggtggtaccttccccaggaaatttcaccacaccacccagttcctcagcctgccccctccccctgtgatgcatgcccccagcacccaattctagccagctggaagtgggtggagggacagcaggaggccagagaaaccctgaacaaagctgggcggctgctcaggcatcacaggctgcaccccctctgaaagcatccccactgggctccggccacatcttcagtgcactgtgctgtgtgcgctgggtgctcacacgctgttcccagacccacaaagtgctaggccccagttgaagaaaggggtgaaatagccagcttcaccgaagggaagggaagggaagtattgggcgatgccagccccacagacgctcagcaaacattagtgcacattctcctagtcctcacccaatggcctcctctacccccatgcatggagctgccacatcagaagccccaagagaagctccctgcaggagaggccagctccctggatgcccaattgcatacctggccgaatctgccattgagtcaccttagcaaataggctgctgtcactaggaccaagctctcaagcagagggatgccaacctagtccttacttagcccacgaatcatctagagcatcctctagtcttttgtgggctccctccttcccatttgaagagacattgttcagaggaagaggggaagatttgaaatgtcaggtcacggaggagtgtttaactggagcctggtgaaccgcagggcaatttgcttctgctcactgggttctgactggcccgtctggacgtgggcccccatgtctctgtgcttagggcctcttcatgatgttttggatgtttccaagggaagtgggtgagcagatcaaggggtgggagagtcgaggcttgatgccagttaatactgtgaagtggagcgtgcggtcagtggaattcagaggaaaaagaagggttggagcaaagcggcattcatctcctggactgttagcctttctagtcttcctggtggctgaggtgttcacgggctgggggagccagctgacctttgtcctcttcaacctagaagactcagcccccccagacaccaacgtgtgagacggatggacatcacgaagggaaggggagattagcccactgctgacagaacgatttcccttggttggaccttgggaatggcaaacactccttttggaacaagcttggggtggaagattaggccgtgtgagcgtgtgtgagtgagtggaacaaactttcttggaaaccggagggagggagatgaagaggctttcggaaagattactgatggctcatggttgagagagcgacn

SEQ ID NO: 23112 - DNA, 1189 bp, Homo sapiens
  misc_feature 1187, 1188, 1189: n = A,T,C or G
gcgtccgggccgggccgggcccctagtgcggtgttgcgggacggggccgaggcccggtcggttggggcgtgggggcggagaggatggagcctccgaggcgttaggcgactctgtcatctctgggcgtgcagccgtcgtttcctggctgcggcccgtgtgatggtgccgggaggaaggaaagcgcagtgacagtgcctaagttggagcctggggttccgggggtgaggaggcccgcggacggcggatctggcgagctggccgcgggctggtgcgagcagtcacaataggaggcggcggcccagcgaggatccgcgggagctgcccggcagggcggagcctcccctcgcagagtgaagatagtccaagtcctaagagacagcgcctctctcattcagtctttgattatacatcagcatcaccagctccctcaccaccaatgcgaccatgggagatgacatcaaataggcagccccttcagttcgaccaagcaacatcacttctcaggggaacgatgcaacacacctgcacgcaacagaagaagtcctcctgtcaggcgccagagaggaagaagggatcgtctgtctcgacataattccattagtcaagatgaaaactatcaccatctcccttacgcacagcagcaagcaatagaggagcctcgagcttccaccctccgatgtatctccccgtctgctacatcctgctgctcatccaccccagcagatgcagtcatggttgacatacatgatcagctccatcaaggaacagtccctgtttcttacacagtaacaacagtggcaccacatgggattccactctgcacaggccagcacatccctgcttgtagtacacagcaggtcccaggatgctctgtggttttcagtggacagcacctccctgtctgtagtgtgcctcctccaatgcttcaggcatgttcagttcagcacttaccagtaccatatgctgcattcccaccccttatttctagtgatccatttcttatacatcctcctcacctttctccccatcatcctcctcatttgccaccaccaggccagtttgtccctttccaaacacagcaatcacgatcgcctctgcaaaggatagaaaatgaagtggaactcttaggagaacatcttccaggagcccacccccagcacccccatctgttaataaatatctcaacnnn

SEQ ID NO: 23113 - DNA, 937 bp, Homo sapiens
  misc_feature 1, 2, 3, 4, 5, 6, 7, 8, 9, 937: n = A,T,C or G
nnnnnnnnnaggcgccaccccgcagctgactttagcacggcccccaacatcccaggaacaaaaatcggcggccgggccagccgaaccccacgccagtactccccccacgtgaggccatctcctgaactaatctggggtgagactgggaaaacaaacatgggtcaccataaatgagagcctccctgacagtgaagatgcacagaaaggaaaggagactatggctgcttcctagaatgtcttcctgctgctggtgttactgctagagcttcctgttgtggggctccatatggtcccctattcttcccaccactcatgaaacaccaagagcaggttcagagtgaccacagccaagccccagctctgccagcaggcccccatcttctcctgctctgatgtggggattgtgcggttggcttgtttcctggcttctctcttcttcctggcatctctcttcatgttgctaggctcttggtgaatttgtcctgcctctgttcctccacagctccggctcctgtatgaatgcaatcccgtggcctacatcattgagcaggcaggaggcttggcgaccacggggacccagcctgtactggacgtgaagcccgaggcaattcaccagcgagtccccctcattctggggtcaccagaggatgtgcaggaatatctcacctgtgtgcagaaaaatcaggcaggcagctagcgagtttgaccccacatgccctcttctgtttgtcttgcaccttgtctaaggaccctctatctatcccaaactatcttcttcttcctacccctccagccgcgctgcaatgtccaccgccaccaccaaccgcagcgaggcgagccgcgccacggtgccgcggctcaagcctccagcatacgacctgtgactccttttcctggtcttctaagccgggcactgagcagctcaatagaaacacan

SEQ ID NO: 23114 - DNA, 2178 bp, Homo sapiens; identical to SEQ ID NO: 22304
  misc_feature 1, 2, 2177, 2178: n = A,T,C or G

SEQ ID NO: 23115 - DNA, 2658 bp, Homo sapiens
  misc_feature 2479, 2480, 2481, 2482, 2483, 2484, 2485, 2486, 2487, 2488,2489, 2490, 2491, 2492, 2493, 2494, 2495, 2496, 2652, 2653,2654, 2655, 2656, 2657, 2658: n = A,T,C or G
cacgcgtccgggctgaaccagcgagaggacggcccggctggctctcaggcctctcccggcgctcccttccggaccggtgagtgagactcctggggccacgccttgtgaaattctgaggcttcttttcagggatcgaaatcccctccggctccgccctgcgcgttgggccccgccccagcgggtcatgaatatgcaagtgagaggcctgggtttaaaggcgtcggcgccacgcgcatatccctgctcggcgctgcccgcccagttcctgttcccagactgaggcccagcccccttcgcccgtttccatcacgagtgccgccagcatgtctgacaaactgccctacaaagtcgccgacatcggcctggctgcctggggacgcaaggccctggacattgctgagaacgagatgccgggcctgatgcgtatgcgggagcggtactcggcctccaagccactgaagggcgcccgcatcgctggctgcctgcacatgaccgtggagacggccgtcctcattgagaccctcgtcaccctgggtgctgaggtgcagtggtccagctgcaacatcttctccacccaggaccatgcggcggctgccattgccaaggctggcattccggtgtatgcctggaagggcgaaacggacgaggagtacctgtggtgcattgagcagaccctgtacttcaaggacgggcccctcaacatgattctggacgacgggggcgacctcaccaacctcatccacaccaagtacccgcagcttctgccaggcatccgaggcatctctgaggagaccacgactggggtccacaacctctacaagatgatggccaatgggatcctcaaggtgcctgccatcaatgtcaatgactccgtcaccaagagcaagtttgacaacctctatggctgccgggagtccctcatagatggcatcaagcgggccacagatgtgatgattgccggcaaggtagcggtggtagcaggctatggtgatgtgggcaagggctgtgcccaggccctgcggggtttcggagcccgcgtcatcatcaccgagattgaccccatcaacgcactgcaggctgccatggagggctatgaggtgaccaccatggatgaggcctgtcaggagggcaacatctttgtcaccaccacaggctgtattgacatcatccttggccggcactttgagcagatgaaggatgatgccattgtgtgtaacattggacactttgacgtggagatcgatgtcaagtggctcaacgagaacgccgtggagaaggtgaacatcaagccgcaggtggaccggtatcggttgaagaatgggcgccgcatcatcctgctggccgagggtcggctggtcaacctgggttgtgccatgggccaccccagcttcgtgatgagtaactccttcaccaaccaggtgatggcgcagatcgagctgtggacccatccagacaagtaccccgttggggttcatttcctgcccaagaagctggatgaggcagtggctgaagcccacctgggcaagctgaatgtgaagttgaccaagctaactgagaagcaagcccagtacctgggcatgtcctgtgatggccccttcaagccggatcactaccgctactgagagccaggtctgcgtttcaccctccagctgctgtccttgcccaggccccacctctcctccctaagagctaatggcaccaactttgtgattggtttgtcagtgtcccccatcgactctctggggctgatcacttagtttttggcctctgctgcagccgtcatactgttccaaatgtggcagcgggaacagagtaccctcttcaagccccggtcatgatggaggtcccagccacagggaaccatgagctcagtggtcttggaacagctcactaagtcagtccttccttagcctggaagtcagtagtggagtcacaaagcccatgtgttttgccatctaggccttcacctggtctgtggacttatacctgtgtgcttggtttacaggtccagtggttcttcagcccatgacagatgagaaggggctatattgaagggcaaagaggaactgttgtttgaattttcctgagagcctggcttagtgctgggccttctcttaaacctcattacaatgaggttagtacttttagtccctgttttacaggggttagaatagactgttaaggggcaactgagaaagaacagagaagtgacagctaggggttgagaggggccagaaaaacatgaatgcaggcagatttcgtgaaatctgccaccactttataaccagatggttcctttcacaaccctgggtcaaaaagagaataatttggcctataatgttaaaagaaagcaggaaggtgggtaaataaaaatcttggtgcctggaaaaaaaaaaaaaaaaaaaaaaaattacagtcgtagggcctcgaaaagtaggccaacgcaggggccaacccgcggaaacgggttacaacccannnnnnnnnnnnnnnnnngggggggcccttaaattttttaaaaaaaaaaccccccccccccccccccgaacccgaaaaaaaaaaaaaaggccatgggggggggaaaccttttttttggccctttttaggggtccaaaaaaaagaattcccttcaaaatttccaaaaaaaaaccnnnnnnn

SEQ ID NO: 23116 - DNA, 160 bp, Homo sapiens
  misc_feature 160: n = A,T,C or G
gtgtggggaccccacaatatccaagggaacctggccccaaaactcatgatctttcccctttaccgtgctgcctcttcaagactgagaatctgtccttgatgggatttgttcaggtacctcggccgccaccgcggtgggttcccattcgacctatagtgan

SEQ ID NO: 23117 - DNA, 1979 bp, Homo sapiens; identical to SEQ ID NO: 20196
  misc_feature 1978, 1979: n = A,T,C or G

SEQ ID NO: 23118 - DNA, 3198 bp, Homo sapiens
  misc_feature 1, 2, 3170, 3171, 3172, 3173, 3174, 3175, 3176, 3177, 3178,3179, 3180, 3181, 3182, 3183, 3184, 3185, 3186, 3187, 3188,3189, 3190, 3191, 3192, 3193, 3194, 3195, 3196, 3197, 3198: n = A,T,C or G
nnccggcaccgggcccccccctcggaaataccgccagaggcggcgtggcgcgggcggtgaggacggacagtcaccgacttagtccagttccctgtgatctcaaaacaattgttgcagcaggctcctggcagtctcaagcagttcatcttcttggtgtactggtttcctattgtgattttatcatggaaaatcaattggctaaatcaactgaagaacgaacatttcagtaccaggattctcttccatcactgcctgttccttcacttgaagaatcattaaaaaaataccttgaatcagtgaaaccatttgcaaatcaagaagaatataagaaaactgaagaaatagttcaaaaatttcaaagtgggattggagaaaaattgcaccagaaattgcttgaaagagcaaaaggaaaaagaaattggctggaagagtggtggctgaatgttgcctatctggatgttcgtataccatcacaattgaatgtcaactttgcgggtcctgcagctcattttgaacactactggcctccaaaggaagggactcaattagaaagaggaagtataactctttggcataacttgaactactggcagctattaagaaaagaaaaagtgcctgttcataaagttggaaatactcctctagatatgaatcaattccgaatgctattttctacctgcaaggttccaggaattactagagactccattatgaattattttaggactgagagtgaagggcgttccccaaaccacattgtagtgctgtgtcgaggccgagcttttgtctttgatgtaatacatgaaggatgtttggtcaccccgccagagcttctcagacaactgacatatatccacaagaagtgccatagtgaacctgatggacctgggattgcagcattaactagtgaggagcgaactcgatgggctaaggcacgagaatatctgattggtcttgatccagagaacttggctttgttagaaaaaattcagagtagtttactggtatattccatggaggatagcagtccacatgtaacaccagaggattattctgagattattgcagccatccttattggagatccaacagtacgctggggtgacaaatcctataacttgatttccttttctaatggagtatttggctgtaattgtgatcatgctccttttgatgcaatgattatggtgaacatcagttattatgtggatgagaaaatttttcagaatgaaggaagatggaagggttcagagaaggtacgagatataccacttccagaagagctcattttcattgtggatgagaaagttttaaatgacatcaaccaagctaaagcccagtatctcagggaggcatctgatctacagattgcggcttatgcctttacatcttttggcaaaaagctaaccaagaacaagatgcttcacccggatacgtttattcagcttgcacttcagctggcctattacagacttcatggacaccctggttgttgctatgaaacagctatgacaagacatttttatcatggccgtacagagactatgcgatcatgcacagttgaagcagtgaggtggtgccagtccatgcaggatccttctgtcaatcttcgtgagcggcagcaaaagatgttacaagcttttgcaaagcataataaaatgatgaaagattgttcagctggaaaaggatttgatcgtcaccttttaggtctcttactcatagcaaaagaggaaggtcttcctgttccagaactctttacggacccacttttttccaaaagcggaggaggtggaaattttgttctctcaacaagtctggttggctatttacgagtccagggagtggtagttcccatggtacacaatggttatggatttttctaccatatcagagatgacaggtttgttgtggcctgttcagcctggaaatcctgtcccgagactgatgcggaaaagctagttcagctgactttttgtgcttttcatgatatgatacagctgatgaactctactcatctttagagatgaatcatctattaagcacttaccaaaacatatcattaaactgagtgctgggagtgagttggtaatatgagatgggaaggaatgttgacttgctaacattcctttaacaagttaagaaaacttgttaaatgtagaaattagtagaatcatgctctctaaatttattctgccatagaaggtagaaatatttttaagctcctctgatgcagcagcaatgcaaattatgacatagtgaatatagaactatgcagtatttaagcctcaacaatccaaatctacaaactttaacaatgcaagtcttactctaatttttaagtatttttgttggtacttacatgggttataaatcctctctctggacatcaatgtagagtccatctttcaagcactttaatttttttagctgccaaagggtatgaattacattattgtatgctaatttccctgaaatcaatgccttctatgttcaccacagggatacaagcctgttatgtttgatgggaaagaccactacaatctaatggtgatctaaaataacttttttgggctgggtgcagtggctcatgcctataatcttagcactttgggaggccaaggtaggaggattgcttgaagctaggagtttgagaccagcctgggcaacagggtaaggtcctgtctctacaagatcaaaaacttagccgggtatggtggtgcatgtgtgcctgtagtccaagctacttgaaggctgagacaggaggatcggttgagcccaggaggttgtggctgcagtgagctgtgatgtgcccttatgctatagcctgggcaagagcgtgagaccctgtctcaaagaagaaaaaaagagaaaaataactcttttgaacaaacagacaaattagctagtagtatggagatgtataccctctattacacacataaaaccgtaacaaaattcattgtggtgtattataattagttttgtgaatagaaaaataaagcacttatgtttaaatttgttacagtgacttttaaaggattaatgttgaatcacattgtcagaattttttcctcctcgctgttcaattttgtagtttttactctcaaaaaatgaaattctcaaaattatatagctttttgttttgtttgaataaatgattcattcctgtnnnnnnnnnnnnnnnnnnnnnnnnnnnnn

SEQ ID NO: 23119 - DNA, 841 bp, Homo sapiens
ccacgcgtccgcgtgcctcctggtctagtatggcgctgtcctgggttcttacagtcctgagcctcctacctctgctggaagcccagatcccattgtgtgccaacctagtaccggtgcccatcaccaacgccaccctggaccggatcactggcaagtggttttatatcgcatcggcctttcgaaacgaggagtacaataagtcggttcaggagatccaagcaaccttcttttacttcacccccaacaagacagaggacacgatctttctcagagagtaccagacccgacaggaccagtgcatctataacaccacctacctgaatgtccagcgggaaaatgggaccatctccagatacgtgggaggccaagagcatttcgctcacttgctgatcctcagggacaccaagacctacatgcttgcttttgacgtgaacgatgagaagaactgggggctgtctgtctatgctgacaagccagagacgaccaaggagcaactgggagagttctacgaagctctcgtgctgcttctccagtggctcacacttatccctttttccaatcggtgtacacgacatctgacttgggaatgcgcaagcagtcgaaagcttcgtagaactctcccagttgctccttggtcgtctctggcttgtcagcatagacagacagcccccagttcttctcatcgttcacgtcaaaagcaagcatgtaggtcttggtgtccctgaggatcagcaagtgagcgaaatgctcttggcctcccacgtatctggagatggtcccattttcccgctggacattcaggtaggtggtgttatagcggacgcgtgggtcgactccctat

SEQ ID NO: 23120 - DNA, 3519 bp, Homo sapiens
  misc_feature 1, 2, 3516, 3517, 3518, 3519: n = A,T,C or G
nnaacctttcaaacttccccgaaatgcacttgtggtcagcagctagcggtcttttgtttggggaaaaaaggagtagcggctaagagcggaaccctgacttctcaaaaagcactgcacagaggaggaggcagcagaaccccatgggctgttttgggagagggactgagtacagtgcaacactactcaaactgtggttcacaaagcagcaacattggcatcacccaggtagaaaggctcattcttgagcctaccgaaggccttctgatttagcatttttgcagataggacccagaaatctgcatttcaacaaaatcccaagttcagcttcttaggactctgcacttccccagaaggaagaattaaaaatgaatatgttcaaggaagcagtgaccttcaaggacgtggctgtggccttcacggaggaggaattggggctgctgggccctgcccagaggaagctgtaccgagatgtgatggtggagaactttaggaacctgctgtcagtggggcatccacccttcaaacaagatgtatcacctatagaaagaaatgagcagctttggataatgacgacagcaacccgaagacagggaaatttaggagagaaaaatcaaagtaagttaattactgttcaagacagagaatcagaagaagagctttcttgttggcaaatctggcaacaaattgcaaatgacttaaccaggtgtcaagactccatgatcaataattctcagtgtcacaaacaaggtgatttcccttaccaggtagggacagaactgtctattcaaatttctgaagatgagaactatatagtaaataaagcagatggtcccaataatactgggaatccagagtttcctatcttgagaacccaggattcttggaggaaaacattcctgactgagtcacagagattgaacagagatcagcaaatttccataaaaaataaattatgtcaatgtaagaagggtgttgatcccatcggttggatttcacatcatgatggtcatagagtacacaaaagtgaaaaatcttatagacccaatgattatgaaaaagacaacatgaagattttgacatttgatcacaatagcatgattcacacaggacagaaatcgtaccagtgtaatgagtgtaaaaaacccttcagtgatctctccagctttgatcttcatcagcagttacaatcaggagagaagtctcttacatgtgttgagcgtggaaaaggcttctgttacagcccagttcttcctgttcatcagaaagtacatgtgggagaaaaacttaagtgtgatgagtgtggtaaggaattcagtcagggcgctcatctacagacccatcagaaagtccacgtgatagagaaaccatacaaatgtaagcaatgtgggaaaggtttcagtcgtagatcagcacttaatgttcattgcaaggtccacacggcagagaaaccttataattgtgaggagtgtgggagggccttcagtcaggcctctcatcttcaggaccatcagagactccacactggggagaagccattcaaatgtgatgcatgtggtaagagcttcagtcggaattcacatcttcaatcccatcaaagagttcatacaggagagaaaccatacaaatgtgaggagtgtggtaagggcttcatttgtagctcaaatctttacattcatcagagagtccacacaggagaaaaaccctataaatgtgaggaatgtggtaaaggctttagtcggccttcaagtcttcaggcccatcagggagttcacactggagagaagtcatacatatgtactgtatgtgggaaaggctttactctgagttcaaatcttcaagcccatcagagagtccacactggagagaagccatacaaatgcaatgagtgtgggaagagcttcaggaggaattcccattatcaagttcatctagtggtccacacaggagagaaaccctataaatgtgagatatgtgggaagggcttcagtcaaagttcgtatcttcaaatccatcagaaggcccacagtatagagaaaccttttaagtgtgaggagtgtgggcagggtttcaatcagagctcacgacttcagattcaccagctgatccatacgggtgagaaaccatacaaatgtgaagagtgtggcaagggatttagtcgtagagcagatcttaaaattcactgtaggatccacacaggagagaaaccatataattgtgaggagtgtgggaaggtcttcaggcaggcctcaaatcttttggcccatcagagagtccacagtggagaaaaaccattcaaatgtgaagaatgtgggaagagtttcggtcggagtgcacatcttcaagcccatcaaaaagtccacactggagataagccatacaaatgtgatgagtgtgggaagggcttcaagtggagcttgaaccttgacatgcatcagagggtgcacacaggagaaaaaccatataaatgtggggagtgtggtaagtacttcagtcaggcctcaagtcttcaacttcatcagagtgtccacacaggagagaaaccatacaaatgtgatgtgtgtggtaaagtcttcagtcggtcttcacaactacagtctcatcagcgagttcacactggggagaaaccttataaatgtgagatatgtggtaagagcttcagttggcgatcaaatcttacagttcatcacagaatccatgttggtgataaatcctataaaagtaataggggtggtaagaacatcagagaatccacacaggaaaaaaaatctataaaatgattctttgtgaagactcgtgtcatttgaattcttccagttatcaagtctcaaagtcagtgtttcagccgtagctcctcatgtcccagtggtccaaagacaacaaaacaatctttatgattagcatagcaagggcttctttagtcagaaccttgacctttataaaatgttacttagaagaggggtgttaagagtgaaatttttctcaggccttttataaaagtatcatggtggacatgccaaaattaagtgtccactagaatgttaactccataaagacagaaactttgttcactactgaatctacataatcttaccattgcatatacttcacaggtgctcaatatttgttataggtcctttttgaaaattatgtgtgagatcacctggcagaatatcatgaagtttgttaaccggaaactggaaaggtagccctttaataagaattaagtcgggaggacccttgacatgtcgaaaaagccctcaataatgtaatccccagtggtgcatttgggattgtctggtgattagatactgtcctctttagacgcaaattcaagtggggccttctccccaaggtttcatttacggggtatcacgcgcaagagatattttggaatatttattcgcgcatatgcagacacacaacttcaacacaagaggggaggagcgaaaccacaagaaaagaaggaacacaaacaaggagaaaaacaagaggaagacgatcacaaagaaaagaacnnnn

SEQ ID NO: 23121 - DNA, 2956 bp, Homo sapiens
  misc_feature 1: n = A,T,C or G
nctcattctaataatgagaaggccctggctgatctttctgggatttagagggaaaggattttttttttttttaagatggagttttgctcttgtcacccaggctggagtgcgatggcgcgatctcggctcactacaacctctgcctcccaggatcaagcaaattctcctgcctcagcctcctgagtagctgggattacaggtatgtgctaccacccccagctaatttttatgtttttagtagagacagggtttcgccatgttggccaggctggtctcaaactcctgaccttaagtgatccaccctccttggcctcccaaagtgttgggattacaggcatgagccaccatgcccggcctgctttctcagtttggatctttaagctccaaccccagaagcatgaaagtcacacatgttaaaaaatactgtttaattttctagtaatgtcctttaaaaaaagctgatacatttgagatttttttttaatcttctcagatctgcctctgaaaccactgcaaagcagctatgcaacttaatttttcagtactcatatatgtattaatggaggaaaagccactctgaggaagcacgccaaggacatgtccccacgtgggcacaccccatcagcactgggtacccaggaatgtgaatgcaaccctggcatgttcacagctaacattatgcccttgcattcttttttgctgtgaggaacaatatgatcacacagcactgaaaacggtagacacaaagggcctgcctttttctttctcatttttgcctttccagcttgcacttctattcctactccagtgacccatttattccccagttacccataatgaaaaatagttctgtcatttactgagccttacattcaaatgcaaatgacggactttataaaactgctgccaataaggtacaatgttcattgatacaatacgtttcaactgcaggtatgttgagcacacaagcaatcaccgtattgtattagagacattttattgaaaatgcgaaaataggaaatgtattatagcctaaaataaattacataacatatacagcatatatttatatctttaaaatatttttttgtttaggttctttcagtctaggaattctgactaaatcaatttagtgaaccgtgtctataatttttttaaaggaaaaaacctgctttccaaaacttagaaaaatatactgcactgcatggatttcgaatgcgttatttcagggaggaccacatagtgactctggtatcgttataaaatgtcttgctttatcgtatggtgtgggagggaagtaccgtagtacattctcaattacctgtaccgcagagttatgactaaggatagcagaaccaggtaatatatctacttcaaaagttaccctacagcaacctggcattagaatgctggatgagacttaaagcttcagttcactgtaaaaactaaaatgcaaagttaggatgctccatgtgactcgctctaatgcgaccttcaggaaaggcgagggaaaagcaagccttcaggaaaagtcatgcggcagggtctggaatctggagatgcgcttttgtgacaatttaaaaaagttagctcatgtatatacacggtgggggtgagaactgacagcttgctcagatctaggagaacgcagagtgaaatgctatcattcaaccatgtcagtttgctgcccccggggcatttcaaaccaaacctttctacgggagattctgtccatctgtcagcctgctgtggtcacaggtctccgttcctcagtgtgaacggggactccgggctgcagcgtgccacccgcctcctgcatgctggcgattcgctcagcttcgcgtgccggtgcgctgagctccgttgtgtttgtccttcctgtgggcttctgtgtccgggcgttgttgccgcatgtgtgtcgtagcggggccgctcttgtcgctgctctctagtcgcttggtgccttcgtgtcgcggcgtcgttccggtcgccgggccgcctgcgcacgtcgttccctgggtgtcctcgcgggtctttcccggggtgtggttcccctcgtctcgccggtgttcagcggtttcttgtgtggctctcgtgagtcgggcttatgagctccggtgctgtcgtggttctgtacatatcctcgttgtggccagtctctgaggtcccccccttccatgtgtgtggcatgcccgtagtgtctagtagtttttacgcgtgtcctgtgtttcaagccctgcgtgtcctttccggttttctgctctagcttttagggtcgttgatttcgttgtgggaggagcgctagtagatgtattgcccgtggtgctcatgccgtggacctgtcgtgtgccctgcaggtgcccattgcgtcccggtgccggtattcattctcctctctcatttgccgcgaggtcctgtctacctcctctgtcggaggcatgtctgtcatggcagattcttccccctcggtgtgccgactcattctccatctgcttttgctggcttccggtagacatagcacgcagcggtatggcgaccatggtggattctgccacaagcccgccaggagggagcccactcccagggtcgtcaccgtgcacccccaggtagggtaggaccacgaggctgcgatgaggacgatgatccgcagcacagagctgggggcaaggacgaaggttttcttcagtgtcatcagccacccggtgagatgccgccctcactgtgagctggaatctgggaagaaggagaagatccgcaaagtacctaaacagagttctgcaaaggcaaagtccactccgatgatgtctatcaagattttctcagacacgttgggtgtccaaaacatcacgaaacagagcggcctgactgggtggtgggcatgctggtcccagatctgccgcctgcttgcttgactctcttctgaccacagaggccctggtccattagccatgtctgt

SEQ ID NO: 23122 - DNA, 891 bp, Homo sapiens
  misc_feature 889, 890, 891: n = A,T,C or G
acccccttttcactcaaagatgtcccggattggataataaattacatagctataccctgtccacggcgtgggtcgacccacgcgtcgcggatttatttatagttgtcacacggtcgaatagctccttcttctcagtaatacaagctttttggtttgaaatatggatcctcttcccagcataataatgtgattttttattcattttatgtattatattcacatttttacttaaaggaaaatgctgcgtattgtgatgaaatgctcgtcttgaggaaaaatttcttaaagcaaaagaagaaagaaggtacttgctaaagaagctcctccagcttcaggctctaactgaaggggaagtacaggctgcagctccttcccacagttccagttgcccctgacttatggtgtggccagctctgtgggaactatacagggagctgggcctatttcagggcccagcactggggctgaggaaccacttgggaagaaaactaagaaggagaaaaaagaaaaaggcaaagagaacaacaaactggaagatcatcaccgaccgacctggctttcatgatgagagtgccatctaccccgtgggctatgcagtactcgaatatatgccagcatgaagtgcccagaccagaagtgtctatataccgtgtcagatcaaggatggtgggtgtgcaggccctcagtcttgaaactttgttccctgaagatgaccccccaagaatgcaattgtcaagctcttctgcagaatggctggtcatgcaagaaactgttcagggatataagcactactatggggaaactatgctatactgttccaactggacaaattttggatttttcatcaacatcacaactgatccaaaggcaggatccaaagcttatacannn

SEQ ID NO: 23123 - DNA, 628 bp, Homo sapiens; identical to SEQ ID NO: 23055
  misc_feature 1, 2, 3, 362, 621, 625, 626, 627, 628: n = A,T,C or G

SEQ ID NO: 23124 - DNA, 831 bp, Homo sapiens
  misc_feature 1: n = A,T,C or G
ncgtccgcccgcatggagtgcaatggtgcctcgaactcttggactcaagtgatccttccacttcagcctcccaagtagctgggattacagctgtgtgccactgtgcccagctgagagtgggttttaatctgagcatgggggcagctatgattccccgtagcacctggggtgagaccaggtcctggctccactcaccctgccaggatctcgtggtctgacaccttcacactggacacgccatctctggcctcatccagcgtctgcactggctcaggcctccgtgagcggcaatcccaacagcggatactggaatcaatagagcctgtgaggccagcatgatggtgaggtcaggtttggagggggagggcagcaccctgggcccccgtgcttaggccccagactcaccggacaggataactgtggcctcttcattaaactgcaccgtgttcaccttctgagaaagttattgccactcagaggaggctggactttgcaggactgggataaaggcagggctcccagtgtcggttaaagcaagggcgaaggggaggtgaaaggttttgggggaacagcaaggacaggggttggtgactgcctagcctggcatgcggagtgggggatcgtcatctggggaagggatccttacggtgtaatgggggtggccgtgtcaccacctatgcgctaatacgggtcccctccactcaaatgagggtctccaggctttcactcacccctgcgtggccccggaatttgcgcacgacctgccctgatgccacatcccacagaaccaccgccttgtccccgccgccggagcagagactactgttgtca

SEQ ID NO: 23125 - DNA, 916 bp, Homo sapiens
  misc_feature 910, 911, 912, 913, 914, 915, 916: n = A,T,C or G
cgtccgcgggggagtggtaggtgggggctgcagctgccggacccaggtgcggaagtgcgagggcccaggtggctgaaggggccgttaggaacatccaagcggtggggcacaggcagatccccgacctgacctggaccacccttctcctcttggcccgccccttcaactcgcctccgcttaggtctggattggccccgccccctgacctgagcctggtccttcttcaggcactgacccttgacctccggtggctcccccatctctcaggcgcgatggctacgggcgcggatgtacgggacattctagaactcgggggtccagaaggggatgcagcctctgggaccatcagcaagaaggacattatcaacccggacaagaaaaaatccaagaagtcctctgagacactgactttcaagaggcccgagggcatgcaccgggaagtctatgccttgctctactctgacaagaaggatgcacccccactgctacccagtgacactggccaggataccgtacagtgaaggccaagtgggctccaagaaggtgcggcttggaagtggatgccattcaccaacccggcccgcaaggacggagcaatgttcttccactggcgacgtgcagcggaggagggcaaggactaccccgttgcaggttcaaataagactgtgccggtgcctgtgtacctcggagcaggagtaccagctttatctccacgatgatgcttggactaaggagaactgaccacctcttgagctcagcgcgtttgactgcgttgtggtaaccatgacggtatgacccccagcagtccagaacgttctgtggaagactgagggggctaccctctggcagtgcacgcggggcggccgcctaacaccgtgggggacagagggggagtggcctacggcccacnnnnnnn

SEQ ID NO: 23126 - DNA, 531 bp, Homo sapiens
  misc_feature 1: n = A,T,C or G
ncaaagttgataatctgtagtgaccaatgattgtactgaacgactagattagataactcggtagatcatgactgttcctcgtgtgaaattttgtttcctcccataaagattttggatcacttaccatctgtaacaaaggaatcatcacttagagcaactcaaccaagtgaaaatgataaacttcagaaagaactcaatgtacttaaatcagaacagaatgatttaaggctacagatggaagcccaacgcatttgcctctctctggtttattcaactcatgtggatcaggttcgtgaatatatggaaaatgaaaaagataaagctctttgcagtcttaaagaagagcttatttttgctcaagaggaaaagatcaaggaacttcagaaaatacaccagttagagctacagactatgaaaacacaagaaacagaggccatggaggacgaggagagacagaagaagctggaggccggcaaagccaagcttgcccagtttcgacaaagaaaagctcagtcggatgggcagagtcct

SEQ ID NO: 23127 - DNA, 681 bp, Homo sapiens; identical to SEQ ID NO: 20120
  misc_feature 1, 2, 12: n = A,T,C or G

SEQ ID NO: 23128 - DNA, 966 bp, Homo sapiens; identical to SEQ ID NO: 22070
  misc_feature 966: n = A,T,C or G

SEQ ID NO: 23129 - DNA, 582 bp, Homo sapiens
accagctagtggacaagatagtgcactgcatgagaccgttgatacagccagaaaacagggagatcttgaggcatggcagtatccggtaatgttacaaccgataccggccgggaaagggccaggaaagggagtcaagcaggagcgtctgtccgaacggaggctaggtaagaatatttcaccatgaaaatgttaaaagacataaaggaaggagctaaacaatatggacccaactctccttatatgagaacgttattagattccattgctcatggaaatagacttattccttatgattgggaaattttacctaaatcttccctttcaccctctcagtatctacagtttaaaacctggtggattgatggagctcaaactcaggtaagagaaaacacacaagcacagccacctgtgcctgtttcttttgaacagctaatgggagttggccctaattggggttgattagaaaattaagcagtaatgaagaatgttgccattgttcagctgtgcactgtgtgcttacaggcatggaaaagaataagtgttacaggggaaaaatatccttctttcagttgtttgactaac

SEQ ID NO: 23130 - DNA, 391 bp, Homo sapiens; identical to SEQ ID NO: 22233
  misc_feature 388, 389, 390, 391: n = A,T,C or G

SEQ ID NO: 23131 - DNA, 1432 bp, Homo sapiens; identical to SEQ ID NO: 22032

SEQ ID NO: 23132 - DNA, 564 bp, Homo sapiens; identical to SEQ ID NO: 22496
  misc_feature 564: n = A,T,C or G

SEQ ID NO: 23133 - DNA, 1082 bp, Homo sapiens
  misc_feature 1, 2, 3, 1081, 1082: n = A,T,C or G
nnnaccacaggacaatcccattagatgtatcccccaaataggaaaagttaatttccccaaccttaaactgctgggcttaaaattgagctcacgggaaaggaatccaaaagcctccccgcgtacttgggctttttgttgtttactacttgggaaattggcatgtattctgcaaagacttgttttaggccagttttaccccatctgctaaacgcaatgcatagtctgtatcaaccagaagaacccatctctaaaaacatcaatgttgatagtcaaagaccactgtgttagaaccaaaatcaggtcttgtatgattacatacatcagacagagcaatggtggcacaggctgagcatgacaatggctcatatgtttgacgcaaaagtaaacaaattcatggatgcattcaggaggaatgccttgcatggacaagggtaaagttcaatttaaaataaaagctccctaatattctcatagggcaccagctctaaaccggtctgtagaagagcttttgggctgaaacatctgccaggaacattgccaatcccatcactaccttcatttcctagtgcaaatggaaggtgcagctgtttgaaggtgctttttaaaagatcaaaagatgacttgaagagataaaaatgtttaaaaatgaacaaatctggcatggtggctcatattgataatcccagcactttgggaggccaaggtggaaggactgcttgaggccaggagtttgggaccagcctgggcaacatagcaagacctcgtctctattaaaaaaaaatataaataaatacacttggagagtttttggttttcagaaattaaagtcaggaatttcattagtacagaaattaaaaataaaaacctactaccaaaccaaaagaccactcatataagcaatctggccataaaatacctagaaagtaatattgaggactgatgtatcaaggagccaaatgaattccttgaccatttctagttggaccaggtgccatgagatacagcattcagaggaagtgtccatttttagaggatcatatgaagaatgaagcctggcagtgatttattttttaataaagcnn

SEQ ID NO: 23134 - DNA, 745 bp, Homo sapiens; identical to SEQ ID NO: 20943
  misc_feature 1, 2, 3, 4, 5, 6, 7, 8, 9, 10, 11, 12, 741, 742, 743, 744,745: n = A,T,C or G

SEQ ID NO: 23135 - DNA, 940 bp, Homo sapiens
  misc_feature 1, 939, 940: n = A,T,C or G
naaggaaagcgaatatgctaaagacgacgactgaccgaggacagtagttgtcctttgttcaacatgttgttccccctgctcttcctgctccggggtgtgccacccctgtcgattggaataggctctcgccctgaatttccctctctatacgggtgccatttcataatctagtgtgcgcttttcttccggtctggataggatggctgtctacttttgttgggtaaaaaacgattgaagggtaacgcagtctttggctcaacagccgaaatccttcgatacgacatatcatctttattataatcctgcatcttgaatgtaaattccgaatctgtgtcactttcaaaaccttcacgcccccctctcaacgtgatatcagaggagcagcttgtcaatgacctcgagcccaaagagtccaagctttcaaaggaatcttctctcttatggtgccttggaggagcaagaaattctccacgttcaggacaccagatgtcaccgtagccactgtccctgccacttcttttcaggaagctggagtcttcgagtgccttcgtcagtgcttgtcctaaaagattctcaaacgctttcaaattaagatggggaccattatagtacgggttgctttgtgcttttcttcccagccagtacaatgttatcaaaacatttttcactctcctgtcagtctcttcttgcctgcccccacacccagcttccagcccatgcctccatggttaacagggaatctgaaattcttcaaggggcttgagcagaggtaactgcccagttcaaactccaccctgctaccagaataagtatccgccttgctttgttgcccagaacaactgcaactcatgagtgattctgtccccagccctctacttcctgaggccacttcccagagcaatgcatggattcttcctacagaccccacccttcaaaagnn

SEQ ID NO: 23136 - DNA, 10676 bp, Homo sapiens
  misc_feature 1, 2, 3, 4, 17, 30, 41, 10669, 10670, 10671, 10672, 10673,10674, 10675, 10676: n = A,T,C or G
nnnnaccatggttttancttaatgggtaanggcttccccanatcaacaaccagccagggtggtggtggtgtgtggtggtggtattatattattaccaccacacaccaccaccatattatatattaccacacacatacacacatatatataccacacacacacacaacttggcacatttaaaaaccatcttttctcttataagaacatctaaaacatatatgcatatgtatgtctgaaaagacaacaaagctttttaaattttatttttaaagagacagtatagtctgttaacttctggtcaagagagtaggaaggaaggagacaccctggatatacctcctgatgtcattcaggagggtgagggaagatgggctaggggtgaagagaaatatactgtctctttaagaaagggacattgaaaactgtacaattaagaaaacaagagtagtgttttcaattgataatctatactcacaacaaatactctgataggtgaatactgctgaacagtttatgtagtgacttttgttgcaggggtgggtttagagttctttttatgtaggtttttaaatgattttattttgaactgaatctccatttgcacagcacagcagacacacaagaactacagcgcattaaaaacagcatgtgtgctggcgggggcctggctttctcattagaaaaaaatatgtttgacaggttatgaagggtaaaacaaaaataattgcaagaactaccgtgcccttctgaccccatgggggccttccctatcccatgattccattttggggagtagaggtagggagggggcagcagttacaagtgctttgagctgtcaactcacattttactttgacctggttgggcaagaaaggagagacaaacttccctagtcaggtatctaggaagaagcctcagctactgtttctgtttaaggtctctggggtagctcttggagccaacagagaatagatggggtaggaatagggatcctggccctatccctttggattttgagttatacctgggtataggaagcagcttcttcgcaatgcctgtgggatctgaggatgacagaaaaacctaagctgtggggtggggcaaatgctataaagtaccagtaggttctggtcatcaatgtggtcctccctcctctctacattattaacccttaaggtgaagcaatggagaagaaaattaattaacctgaactgtcttggacagaaccctttcctctccctctccactagctccaaggcttattaagtacctaatgtcaacaacatggccccattccccttgcccagatggacccttcccacccctgtctatacccagagagcaggaggcaggactgattagctccactggatcccagatgcttgaggttctcattctttgagggtcactttcgaaagctgttttctgggataaacaaagtacgccttcgcagtttcctgcctgatccttcctccagcaagtaggtcacatcaatggcattttttccagggattttttcaaggagattgagcaagatctggttgagtcgttcccgttggttatgccgtcgttcctcaggggtacaggttgactggggttcttgactactttcctctgtttttttttcaccctcactgacgttagcagtggccccttcccgttctggctcctccaggctgggtatctcattggctgcttgctcttgactggctagaacctcttcaatcaagggtagagcatcatcctcctggcccaagtcttttaggggtggctttgagcgctcagacttccaggatgatcgtcctccattcctcttgtagttgtctgggacgtaatgaggcgagaaatcttttttgggagtgagcttcttggggaagtgatcaaaagcatagggtttggtgcagacaggatagcggttccggtggatcttgtaaaacaggtgtgctgacttgtcaagccgataatcacagatgtacacatcttgctcctttactcctttgggtctccctttacaatacgtataaaggtccaacacacagcaggtccccactacagcctccaagggaatgatctcatagagtggcacccgaaatagttcattatgatagaaccgacgggatggagagtggtgtgtttcgtggggacggaaataatggtgaccaaaggcaaaccgttcctctttttcattcttccaaagcttctcaatgcgaaagatgtcaagtttatctcggttaatgtgagataacagtcgataggactgacggaccgggtggccatcaggggtgcgccgactatccctcatcagatacacacagtcaccctgacgaagcagcaagtcatctcggagcaaacagatgaagtagacacagccaggttgggcatagtggggccgagggatcatgggaacctccctgtccacaggccttgggtcacactgctcacaaaggtagtgctccacatctgagttcactcccatacaatcacagtgctgccataccatgcacttgtcacactggatcatgagaccttcatcgttgtagaggccacagatacagcgaataacatcgtcgtccttctcatgcccattctccttttcagagactgaggtctcactgctgtctgcctcacttgctgtctctcccacaatctcatcaatctgggctgatgcctcatgccgggcattgtaataggcctttcgtagacgacaaacatctctcccaactggggatttacgcccatagtacttctcagcattccgaaagactttgagcatgtcagcatcaaaagcttccactgtcttatagtaaccagtgaggatctgcttctctatggtgataagatctaggggatcagagatcttctcataataatcagcattctttttctttgggggaaggttcaaaagtggagctgccagtgcttgccgggaagaatctttataagagatgataccatcacaaatttctttgaagatctgggctaggcgggctgcccgagccacttcaatattttcctctgcagctgccaaccgtcttgttcgaacagatcgagctgtctgcagggcagagaactgggtcatgaagacatcagacttgatattcccatcatctcggcagatcccattccaacgggtatataatgatgctgagtgaatattatcactggtgtgctttacttcctcctgtttttgacgaatcttctcccagtttcggaccaagaatacatgatgctttaacacaaagttcctttcacgattggacattggcttcatctgtaattggggggtcaatctagttggggtgttgatattttcactgggttcctcagagagatggcctctccttttcttcagcttgtgcttagactttctcttctcttttgaccgtccagattttttgtgtgtggccatgggctggctgtttttgctgctggtgagtccattcacacgctgactcttgcctccgatgattcctcgacatttctcaaagccacacttacaaagttgctgtttttccacattgaaggaatgaaagttataatcataagtgagttcagtcccagctggcatgtctttaagagcatagagtccaatccggtatactccattaacagaccatttctgcatttcacaatttgggtcacagctatggttgatgaatcgggcctcatttcccatgcggtaactgtcaatcaccatcccactatccaggttcaggcagtagtggtcactgtgattatgatactgctcaatcatcctgttcctgaactcctgttcactgacgacctcccctaggtattcaatgatgaactgcccagcttttaggggctctttggttctgattccccaacctttttcctcagctcgaaatcgttctagacattgcacccattcatgcctctgtatcctctggttacagcattgctcgccacatgggcaagtgttgggggaacactcagcaaagatcattctattgaggcagtcatcaacacagcccttcctggtgtcatcatctggcttcttacagttacaggtggtagcttcgtaaccagaaaggggtttgacatcaacgtagacatttgaacgaattttcttatatagtgggacatctggctttttgtatagctgattgtgtttccactgccaaaggatatcataaggaagctggaagtcaattctcttttgtcttagatactttcctgaaacaaaaaacacaacatgaatgggcgctggaaataatccatattcatgctctcctggagtatactccagcttctctttctttaattggatcaatcgactctttgggtctgtagttttgtaaacgtcagaatacagccctgctttctgatacttcttctttgggggacgtgggggcttcttttcccttgggatgagagaaagcacaggctgcaaggtactttcaggttcagaaggtttagctggggtttcagaaggactgggaatctcaactggtgcttcattaaagcttttattattctcttgctcttcttcctctggtaatggcttctgcttttttctggtctgttcttccaatagccaaccttttctcttcaacccctttttatgttctgggttcagatttacactctgaacaacagcctcaattacatctgtaactgtgtcaggactgaggtgcagtgctgctccttcctcgtctctgttcaattctgggttgacaaactgagcagcctggaatgcttgcattgatacgacagcctgaaggggacatttccgaggtcgacctggcctacgtttcacaaagttattccctgtcctggcctgcctttgaagttttttggcttttaagattttattgacatggtctaggtttttctttgtggccaagattttgtcgtaattgcacattttccgagcttggcgttgcatagcttccactacacttctcttgatatgatggggggaacagctgcttgtcaacttttcagataggagtgagatgctattattgcaagagtcacttgcgactgcaggcactaaaaggctgtctggttttcccagggttcggtccttgctgtggctacggcctggactggaagaaggtggtgcagaggcagttgcaatcacagcatcaatacttttctccatgggctcttggtcctcattttgtaccatccgctgcagcagactatccacagagtcatccccagaagcaactaatcttggacttcgagagggaactccgtttactgttgaagaagtactctcagatgaagaccttttccgggtagggctacaatttgtgctctctgatggccgctgggagggtttatcagaggttggctgggagcctgccaaagtctgtactgccctttcgttagaaggcagtgactcctttctgtgaagccgatttagtgaagtgtcctgtgcagaaaagagtccagggctgtcagttaatttcttccggccactggagttagggtttgaaactctgcagctgcctattgcacttgtgaaaaggtttgtatgttcatcactgctggctggctcagagttgggagtgaatcctccaagggataagcttggagaactttctgaacagtcaatctgtaaaggtgtctgcaatcccaaggccaatggactagattctgaaggctctcggtggacccactgttcctctctgtttattaagctttttgaaggagagagatgagggcaggacatgtgacaacggtgcttttccttatgcttatatcgctctccaacagcatcctttccaaatctatagcgcttcaaagattccaggacagatcgggaagagccagtgtccatagaaacctggggttgttcagaagaacggtgttctctgtgtttgtgacggtgcctgtgtttgtgctcaaccatccaaccataggccatctcaggaggaacactggggtaggtactcatggaaaggaggggagtcctgctggttgtaagaaaggcctcctgtcgaagtagcttatgctttttcttatggtatttggcaggattgagaagtaaatgaccagcatgcatataggaaggaggtggaagtggcgtggtgaaagaaggagatggaggaggtggataaagagtgggaggataccttccatagtaacctaatcctatgggagcagctgtaaggggtgaaggagagtaaggcataccataagatggatagaatccagtactagaaagaggaaaactaaggctgtgcataaaaggcatttcagccattgcctccctcatcttagggggtctccctcttttcttttttaagtcaggttttcgaatgtagtgcaaagggtctaaggggaaagaaggatgtgtatagaaactattaaagttgattcgaaagatagttggcagaagatctcgggggataaaatgatgacttcgatgagtgatccgaatttcacttaggcgacttattagttcctccagctctgcaataaagtctggatcctgtctatttcgaagctggggatatttctttttccgttttcgtttctgccttttcatcttgtcatagctgaggtaatcatgattcctgcgcttacatttgtgtttatgtttttctttaagactgcttagcactgtagaggtttcagggggaatcagagaaacatgctcaaaagaatgcctcctctttttttgcccacaaaatttctctgccctgtctgatgtgctgttattatctgttccaattccactatcactgggaatggtctcatcactatgagactcactgattggggaaggagtagcttcttttagagatgtgagttcactcaagtgcgaaggagaatttggcaacaaagtaggaggagataaccgcctcctcccctttgaggccttcttcattgcaagagtctgaatcatactgccctgtctggagtgtaaatgcaaatatggcactgaactgggttcaacaaaacctgcatcactacttacagggctctgacctccactagtcccagaagactgagagcaaataggtgatggaagaatctcagaactactagcagatgaaggcagtaatgggggaagaatctgtcctaatgctgacccagctgcctgttgagctgtttgctcaagaacagcaaggctagtaggactaccagaaagaataccatttaagacagtttttggtttgcgacctcttctctttcctatataaatggttcctttcttgctgacatttatctgttggcccaatttagagccaaatgtggcagcaagacttgataccgtattatggagtttggattgcactttccctttattacttgattctacagaacttgaaagaatctgattcaacagtttctttctctttaaagtcttcattttatttattttgcggataattgttttcattaattgtccattgtttctcttggtaatttttttatctggttccatctcaaggtcactcatactacagacacttggcctatgactgtcatctaggtcatctggatcctgaagttgatcctcgctctcaaagaaatcactgctacttctatggttgtcactttcagattctagcttgcttggactttcagtggcaacaaatggagccactgacagtacaggtggcttcatcttgactggtgacctcatttgcctcttaggcctgcctctcttttttggaaaaggagacacagacagaccttgtttgaaggaagggatttcaatttctggctgtaaaattgggggttcttgttcttccttagactgtaaagaaaacactttagaagcagggatttttaaagtccttttaggtggcccttccagttgaggcatctccttagatttaggccttcctcttttgggcttataaatatcagacaaaaggtcactagagacacacatactggaggatagtttgtgagtagcaaaagacttatgagatggtttttcactatcagctaagagagcaagagatggagctgtggatttgctcaactttggcaatcggcgtttaaggaagtcatgatctacaaatgaagggggtccaatgtttttcataaacttggctggctcagaattactatttgatagtgagctacatgaaacgtttttaaaaagctctgatctttctaattctagcccttttggagaccggcatgtgcttcttgccaccactttagtccaccgaggttttcttccttttcttttttttaatggtttggactgcaaactagtacttaggctttcagcaacttggcagtgtttgtctgatgcagatactgcacccagttttaaaaaaggcttattactaaataaactagtgaagttaacaactgaaggagtaatagtatgaatgctggattcagaagtcaaacttggcttttttccaagggaagagcttattcttggaatatctatatgggtagtttttgaatcatttacctctttatcaatccctttacattcaatacttatactatgaccaactgacctatgaccaacgttcaagtgggtactttcagaagtaaactggttctttccaacagattcagaaatttcttcgattagttctgtagtagaacttaaaagtaatggattaggagccaactgtgaagaagtttcagggggacttctggttaaaggattaacagatacagtaggtgatggggaagggagattgctttctcctactgcactgaatggggatttagcggtagatacatcagaagcacctcccattttaaagtccggagaagtgcaatatacaggaggctgcttttcatgctttgaggtttcataagatcccttttcactggatgagaaactgtcttgctgaatgcatgttccttcattaaacatttctttctccaaattaatgatttcttttcgtactgagaacttttccaatatgctttctttattctgccgtacaacattcttttcaaaagttttgctggtggcactatctttcagggattcagaaagttcctgactttcctgattattgatgtttgtactacaagaagccttaagcggttcctgagtggggagcagtgcttcggctttaaggtttatggcatctttactgatcagacctgccaaaggacaactcattagtttctttccaatgtccttattaaccaatcccattgctgaacttgctacaatcttctttgcacagtccttggccactaggccaacagtagaacccaatttctttcccaaatctttattaaccagtccaaccacagtgccaagtcctaacttcttgccagactctttatgcactaaacctggaacaataccaattcctagcttctttcctgaatctttgcttagcagtcctactgtagtgatagttcctggctttttgcctaagtttttattaatgaataccgctgtagtgccagttcccagttttttcacagagtccttattgaccaatcctactgctgcattaaacactggctttttcccaggatctttagttaccaatccaactgctgtgctgatggttggcttttttattaagtccttatgtattattccagctacagagccaacacctgctttcctgatcaaatccttgctaaccaatcctgctgtagtgccagttcctaacttcttcggttttgtcttggaagacttggaaggaggacaggtagcaatcagctgtgccaacttttctgttacactagttcctccattaagtaatgctctgtcctttaaatcaggatcccggctaccaagaagagtagatggcgttgcattaatataatctgccatttctgagtgtactggagacagcttcttagacaaaggattgttttctccctgtgaatgaagacggatgacttcttcagactggcattcaatggctgcaacatcatctgctttcttgtacaactttgaagggtctcgttttgaaggacagtgttcattcttttcatccgtcatctttccacttttaagtgctttccttgggtgcttaatagttgtttttatggcaggtcgacatacatagttctccaagttctttggaggttttttagttctcttagcctggaggccaattttcaattttaaatttccctctgaaaagtttgtttctttcactgaaaactgttgctgtgcatcagtcaaaccatcatctttcccagcttcgatgtttctttctcgattccgtttgcgaaggtcctcttcctcctttgtgtttttttctagctctacttctctcttactgaccaatgtgccagtactgatggcagaaggactctttcttgaaaaaccttcggaatcagaacccaatcctaacatagcagtatttctagggtccatcacaagcgtatgttattgccaaggaatcttatgaaaattttacagaactgtgttccataaaaaacaaggatctccaaaactcgaaaccagcatctttctcgtgtcggaggccgaggccgaggccgagagcgatgagagtgcagggaagtggggaagagggggtggccgccaggctcctccgcttccctgggtccacggcggatccctcccgcttgtcaggaggcggccagcgggtaagctgactggcggaaatgcgagagaggagaagggaaaggtggaaggctaaagggggcaaactgaggggaggcgggtcccgcaaccgacactgggatcgtctcccctcgcaaagcgaannnnnnnn

SEQ ID NO: 23137 - DNA, 1094 bp, Homo sapiens
  misc_feature 1, 2, 3, 1093, 1094: n = A,T,C or G
nnncgacccacgcgtccggaacgcggacgttgcaccgtgatcaattttgtccctttggaggcgccgttacggtccacgccccgctcgcgtcaagactgtaacgggctggtggtggagaaggacgtgccgtgccgctgggttctgagccggagtggtcggtgggtgggatggaggcgaccttggagcagcacttggaagacacaatgaagaatccctccattgttggagtcctgtgcacagattcacaaggacttaatctgggttgccgcgggaccctgtcagatgagcatgctggagtgatatctgttctagcccagcaagcagctaagctaacctctgaccccactgatattcctgtggtgtgtctagaatcagataatgggaacattatgatccagaaacacgatggcatcacggtggcagtgcacaaaatggcctcttgatgctcatatctgttcttcagcagcctgtcataggaactggatcctacctatgttaattaccttatagaactactaaagttccagtagttaggccattcatttaatgtgcattaggcacttttctgtttatttaagagtcaattgctttctaatgctctatggaccgactatcaagatattagtaagaaaggatcatgttttgaagcagcaggtccaggtcactttgtatatagaattttgctgtattcaataaatctgtttggaggaaaaaaaaaaaacaaaacacacgcaaaaaaacagaacagaaacaaaaaaatgggtgggggccgggacggcccaaagaagcataaaacaacatggtgggggcgcggaccccatgtgtactgcacacggtcaacagggccccgagaacaggggcaagaaggcggtgggtcacccaaaaagcgccggggacacacgcggtgtgacacccacagggagcgagcggcaaacaggacaaaaaaggcgcaccatgaccaccgcagaggcggcagtatgagacacagcagaaaaagcagacacaagacacggcacaacagccggagcaccacggcgcaagcacgacaaagcgagacacagacagcaacacagaacgaacagcagagacagann

SEQ ID NO: 23138 - DNA, 1384 bp, Homo sapiens
  misc_feature 1, 1381, 1382, 1383, 1384: n = A,T,C or G
ngacgaaccacgcgtccgcggacgcgtgggcggacgcgtgggcggacgcgtgggctagcgggcggtgggggcgccagcagcgcggaaggcgggcacgcgggccatggctccctgggcggaggccgagcactcggcgctgaacccgctgcgcgcggtgtggctcacgctgaccgccgccttcctgctgaccctactgctgcagctcctgccgcccggcctgctcccgggctgcgcgatcttccaggacctgatccgctatgggaaaaccaagtgtggggagccgtcgcgccccgccgcctgccgagcctttgatgtccccaagagatatttttcccacttttatatcatctcagtgctgtggaatggcttcctgctttggtgccttactcaatctctgttcctgggagcaccttttccaagctggcttcatggtttgctcagaattctcggggcggcacagttccagggaggggagctggcactgtctgcattcttagtgctagtatttctgtggctgcacagcttacgaagactcttcgagtgcctctacgtcagtgtcttctccaatgtcatgattcacgtcgtgcagtactgttttggacttgtctattatgtccttgttggcctaactgtgctgagccaagtgccaatggatggcaggaatgcctacataacagggaaaaatctattgatgcaagcacggtggttccatattcttgggatgatgatgttcatctggtcatctgcccatcagtataagtgccatgttattctcggcaatctcaggaaaaataaagcaggagtggtcattcactgtaaccacaggatcccatttggagactggtttgaatatgtttcttcccctaactacttagcagagctgatgatctacgtttccatggccgtcacctttgggttccacaacttaacttggtggctagtggtgacaaatgtcttctttaatcaggccctgtctgcctttctcagccaccaattctacaaaagcaaatttgtctcttacccgaagcataggaaagctttcctaccatttttgttttaagttaacctcagtcatgaagaatgcaaaccaggtgatggtttcaatgcctaaggacagtgaagtctggagcccaaagtacagtttcagcaaagctgtttgaaactctccattccatttctataccccacaagttttcactgaatgagcatggcagtgccactcaagaaaatgaatctccaaagtatcttcaaagaataaatactaatggcagatctgcaaaaaaaaaaaaaaaattctgagatgctttctaaaaccaaccaactgataaaaagtagatgagacttctccaagctgcttcacaagcaaactaaccgaaaaacnnnn

SEQ ID NO: 23139 - DNA, 1299 bp, Homo sapiens
  misc_feature 1, 2, 1299: n = A,T,C or G
nnaccttgagggggcagtgaagctgcttgcctctggtgtgaagacccactgcccaccctgcaacccaggcttcttcaaaaccaacaacagcacctgccagccctgcccatatggttcctactccaatggctcagactgtacccgctgccctgcagggactgaacctgctgtgggatttgaatacaaatggtggaacacgctgcccacaaacatggaaacgaccgttctcagtgggatcaacttcgagtacaagggcatgacaggctgggaggtggctggtgatcacatttacacagctgctggagcctcagacaatgacttcatgattctcactctggttgtgccaggatttagacctccgcagtcggtgatggcagacacagagaataaagaggtggccagaatcacatttgtctttgagaccctctgttctgtgaactgtgagctctacttcatggtgggtgtgaattctaggaccaacactcctgtggagacgtggaaaggttccaaaggcaaacagtcctatacctacatcattgaggagaacactaccacgagcttcacctgggccttccagaggaccacttttcatgaggcaagcaggaagtacaccaatgacgttgccaagatctactccatcaatgtcaccaatgttatgaatggcgtggcctcctactgccgtccctgtgccctagaagcctctgatgtgggctcctcctgcacctcttgtcctgctggttactatattgaccgagattcaggaacctgccactcctgcccccctaacacaattctgaaagcccaccagccttatggtgtccaggcctgtgtgccctgtggtccagggaccaagaacaacaagatccactctctgtgctacaatgattgcaccttctcacgcaacactccaaccaggactttcaactacaacttctccgctttggcaaacaccgtcactcttgctggagggccaagcttcacttccaaagggttgaaatacttccatcactttaccctcagtctctgtggaaaccagggtaggaaaatgtctgtgtgcaccgacaatgtcactgacctccggattcctgagggtgagtcagggttctccaaatctatcacagcctacgtctgccaggcagtcatcatccccccagaggtgacaggctacaaggccgaggcgggcagatcatgaggtcgggagattgagaccatcctggctaacacggtgaaaccccgtctctactaaaaatacaaaaaattaccccggcgtggtggcgggtgcctgtagtcccagctacn

SEQ ID NO: 23140 - DNA, 2140 bp, Homo sapiens
gattattgttagagagttatttccacgaagtgtttgtcagtttgttggacatttgagaccccaggaaatcccctttctcgtaacgttctccgcttggatctgatctcaacagggtgtcgtagtcattcttcagcacaattcttaattggagaccaagaaccctgggcctttagaggtggtctagcaggagagttccaggtatcaatatgaattcacaactgaattgacattttctttgttttatgagaaaccttatgttgcgcatcagatggctggaaggattggtctgccgaaggctttctagtcccaaattcaatttagttacatagctggatttttaaatcaaattttcctcctctttcacagtaatttctgaaggagatgctgccaatcccccccgcgcctgcgaagcgcagcggctctaggtatacacttcacattgtttctttgcaggtcgcacagcattttaatctgcgcccgcaatgcacaatgcgcgcatgcttgtctgccagtggaagctccatgaacaaaagatagtaattatgccaataaatggtgaaagagcttttggatatttatccaattattttataaatataatgtgcttgaaagaattgtccattgctgaaaatatgaacaaaataggaagtttttttgctgctggaatttgttcatggactttctaggtgctctacttttctccccccaacaggtgctctgctgcgcacagcaaactgaagcgcattgctttggggataaagcgtctcctggacagataaccctcttcagaccaaacctctcctcctgacattctgttctgccatcttatcgtagggagatggtctatctaagataggttttaaaaaaaaatagatttgtcataattggaataggtttgtttttgtttttgtttttgtttttactgtaaatttaaatccccattaatatgccactaaagctgtaactcagagtgggtaatttctattcagaagcactcccctcccccagcaaagaggtatttctattagtaaagcatagtacacccctcttctttaggtctgcctgcagtagccagttaatataagttggtaatctgcagtgcacacccatttaaaaaaatggataccttccccaaactaatccatctccttttttttcttcccacagcgtttgctgccaattgatggggcaaatgatctctttttttcagccacctccactgactcctacctccaaagtttatactatcagaccttattttcctaaggatgaggcatccgtgtacaagatttgcagagaaatgtatgacgatggagtgggtttaccctttcaaagtcagcctgatcttattggagacaagtatgtgataagtatttggatttgagagtagacctttcatagtgaggcttatcaggttgaggggaggtgatgactggaaatatatttatttattttaaatcccactttggctttagtaaaatctgaatatgtgtgcatttctagtttcttacaccaaatgtaggttccgtaagttcatgcaagtacagtgggtcttggatcactgaagtctgaattttatattagcaactgaaaagtttactgtggcctctttccttctgagcaggttagtaggagggctgctttccctcagcctggattactgctttgtcctagaagatgaagatggcatatgtggttatgccttgggcactgtagatgtgaccccctttattaaaaaatgtaaaatttcctggatccccttcatgcaggagaagtataccaagccaaatggtgacaaggaactctctgaggctgaggtaatacaaaggttaagaattatactatggtaatggtcttttttatttatttatttttattttttattaaagtacttactaaaatggaaaagtacatagatacatcataaaatcttagtgctttctaaattaattttcttgcagaaagaattcttatggcttattcttagcatgacatttttcactgtttccccaatattgggacagttttttatttgggagtactattgtaatatttcctcaggtgaaaacacaataaagacaaagaacatttttttcctctgttttaaagtttcatacttaaagatgttatggtcttggtc

SEQ ID NO: 23141 - DNA, 800 bp, Homo sapiens
  misc_feature 1, 2, 3, 793, 794, 795, 796, 797, 798, 799, 800: n = A,T,C or G
nnnagctggagacagattgtaggaccgagcgcgggcgaggcttgaagtgtggggagaacttggtctcctctctgctatatgaaatatgggagacgacagaccgtttgtgtgcaatgccccgggctgtggacagagatttacaaacgaggaccacctggcagttcataaacacaagcatgagatgacattgaaatttggcccagcccgaactgactcagtcatcattgcagatcaaacgcctactccaactagattcctgaagaactgtgaggaggtgggactcttcaatgaactagctagctcctttgaacatgaattcaagaaagctgcagatgaggatgagaaaaaggcaagaagcaggactgttgccaaaaaactggtggtattcagacctaggctatttttattgtgctttgggataattttcttaattggttaaaacacaaaatcatgggcttagtagagtaaaaccagtaaaaccagatagtagtcactaatcccagtcagccattcaggtctttaggagttccagatgatggatcagcacaagtctgtcgtcaccgaaaattagtcctcttgttcttccaggggagtattagtttaataatcggttttttaaaaaatatttatattataaatatgttgaagatgttaaaaggtgataaattactcagattttgttggataacatatttgttgccaaattccactcttttctgagctgatcagacttctcagctacactgtttttttgaatcagcaagtcaataaacatttatcaaatttccactcnnnnnnnn

SEQ ID NO: 23142 - DNA, 421 bp, Homo sapiens
acaaagggcagccctgcacgctggagggacttccactcagccacaatgctgggaagtcacatgtatgtctttgggggccgtgccgaccgctttgggccattccattccaacaatgagatttactgcaaccgcattcgagtctttgacaccagaactgaggcttggctggactgtcccccgactccagtgctgcctgaggggcgccggagccactcggcctttggctacatggggagctgtacattcctcattagattgtgggtttcaagtttccatttgcaatttgaatgtttccagaaatctctgtcttaaccaaacctctctctccaggcacgattctgcacatgagtctgatctgtgtagagtagtatcatcaaaaatgccaaattttgatcaggaatatacctggactactctcttt

SEQ ID NO: 23143 - DNA, 2069 bp, Homo sapiens
  misc_feature 2055, 2056, 2057, 2058, 2059, 2060, 2061, 2062, 2063, 2064,2065, 2066, 2067, 2068, 2069: n = A,T,C or G
cgagggaagcgagcccgggcgccggcgggcggccgtcgcgtctgacagaccactgcagaccacgggccgaggcccagcgcccgtccgcagcgcggccggcatggcggcgacaaggagccccacgcgggcaagggagcgggagcggtctggcgctcccgccgcaggaagtgaccaagttcactcctggatgctagctacaagccaagccttagacactgtctggagaatggcaaaaggctttgtgatgttggcagtttcatttctggtggctgccatctgctacttccggaggctacatttatattcagggcacaagctgaaatggtggattggatatctgcagagaaaattcaaaaggaacctcagtgtggaggcagaggttgatttactcagttattgtgcaagagaatggaaaggagagacaccccgtaacaagctgatgaggaaggcttatgaggagctattttggcggcatcacattaaatgtgttcgacaagtaaggagagataactatgatgctctcagatcagtgttatttcagatattcagccagggcatctcttttccatcatggatgaaagaaaaggacattgttaagcttcctgaaaaactgctgttttcacaaggttgtaattggattcagcagtacagttttggtcctgagaagtatacaggctcgaatgtgtttggaaaactacggaaatatgtggaattattgaaaacacagtggactgaatttaatggcattagagattatcacaagagaggaagtatgtgcaacacccttttttcagatgccattctggaatataaactttatgaagctttaaagttcatcatgctgtatcaagtcactgaagtttatgaacaaatgaagactaaaaaggtcattcccagtctttttagactcctgttttccagggagacatcctctgatcctttgagcttcatgatgaatcacctgaattctgtaggcgacacatgtggactagagcagattgatatgtttatacttggatactcccttgaagtaaagataaaagtgttcagactgttcaagtttaactccagagactttgaagtctgctacccagaggagcctctcagggactggccggagatctccctgctgaccgagaacgaccgccactaccacattccagtcttttaagtccgctgggggccgaacagcagtgctcaccagtgacggtggtcacagttgcaataaagtctctctctgaaaccaaagctagcatttcagcatggaaggaattaggaccttttcttcaggattacaggtacactggatgcagccatgcatggatggtttttctttatttttcagtgatttcctctgaagcagctgcactgatacatttgggagttggtggcttgactttgtccataaggggcgtggccacttcacatgatggcgggcctttaagagcacaaagaagtttaatatggacaacaacaggaaaaagcaagaagaaaacaagtagggaaaaacagctaacctggagagaaagaatttctttaacctttatgttcttcattaaaaatcttatcttggactgatttgagggatttttagaaacatggccttattttatataagcattaccttcccaggaatctttgttgtatattaatttttgataaccatttgattaactttaaaattaagtatatgtgtgtatatatacatatgtatgtttatatacacacatgtatctgtatagttttatatatacatatatacacatagacatacagagaaccactactttgtaatagtgtacagtttgttttatatctctttactttttttgttactattttatctggccagcgtaatagttttatttagattttttaaaattctgtagattaaagcaaatgacagttattgaactatcacaaaactattaaactgtggtacatttaatgtggttaccaaaaaaacaggagagagaacgaggaaagaaaaaaaaaaaggggggggggcgcgcgcgaaagggttaaaacatggggggggggggccccagggagtannnnnnnnnnnnnnn

SEQ ID NO: 23144 - DNA, 419 bp, Homo sapiens
acgcgggggaattccggaggcggcattcggtggtcagaggcctgtgcggctgcaggtagagtgtcttaggaacctaggaaataactcggaacctgtaacgtcccactggtttggacatattcctctcctgatctggcctcatctgttccagggaggtgggattgaaacatatgcagtaatgtcacctcaaaagagagttaagaacgtccaggcacaaaacaggacttcacaaggtagtagtagttttcagaccacgctttcagcctggaaagtaaaacaggatccaagcaactcgaagaacatctcaaaacatggacaaaacaatccagtgggagattatgaacatgctgatgatcaagctgaagaagatgctttgcaaatggcagtgggatattttgaaaaaggtcccattaaagctt

SEQ ID NO: 23145 - DNA, 313 bp, Homo sapiens
  misc_feature 1, 2, 3, 4, 5, 6: n = A,T,C or G
nnnnnnccaagaacagggagacagggcagctggtggccctgaagaagatcagactggatttggagatggagggggtcccaagcactgccatcagggagatctcgctgctcaaggaactgaagcaccccaacatcgtccgactgctggacgtggtgcacaacgagaggaagctctatctggtgtttgagttcctcagccaggacctgaagaagtactactcgattgtcaacgtcaaggagtcgcaggtcgcctggttctaggaataatgggggaagtatgtaggagttgaagattagtccgccgtagtcggtgt

SEQ ID NO: 23146 - DNA, 543 bp, Homo sapiens; identical to SEQ ID NO: 23081
  misc_feature 543: n = A,T,C or G

SEQ ID NO: 23147 - DNA, 562 bp, Homo sapiens
  misc_feature 1, 2, 3, 406, 407, 408, 409, 410, 411, 412, 413, 414, 415,416, 417, 418, 419, 420, 421, 422, 423, 424, 425, 426, 427,428, 429, 430, 431, 432, 433, 434, 435, 436, 437, 438, 439,440, 441, 442, 443, 444, 445: n = A,T,C or G
nnngtgttgctgttttccacccattttattatattcttaaaagatgtaattgttgtcattttgaacagttaaacatcttgagtataaaaagaaccccaatgttatgttatgctttgtaaattttttttttgcttttacctagataaacttctagctaatcaaataaggaaagaaactgtctttttaaagcttcttttgtgttagatactgtattagagatctgcatttatcatgagttccttttttttttaactttatttttgggaaagtaacacatgaagtagttcagtcatgtcaggtttgtctggggtggaatggaacagtcaggtagttgaaagtttttttttagagatgaaaagcttgtgaactcctgtaaaacatgctgtatttgaaatacatctgttannnnnnnnnnnnnnnnnnnnnnnnnnnnnnnnnnnnnnnncctcggccagcgcacccaggcacacgagcagggacagggcgagggtcagtccggacagccccagtcgcttgttacctagcatggtggctggcgcgcgggcgtggctgggcggcaagt

SEQ ID NO: 23148 - DNA, 1051 bp, Homo sapiens
  misc_feature 1043, 1044, 1045, 1046, 1047, 1048, 1049, 1050, 1051: n = A,T,C or G
caacctagcagttcaaccaatttctcttttaataaaagctgcacattacagtggtataaatttatcttttaaacactccacataaaaacatgtgcaccctctccttctacatttaatcattagtagtctctaaaatggtaaaataaaactgaatttatattagcaaatgaaagtgcaagtttgtacgcggggggtggcctttggggccgaagtgggcgtgcggctcgcgctgttcgcggccttcctggtgacggagctgctccccccgttccagagactcatccagccggaggagatgtggctctaccggaacccctacgtggaggcggagtatttccccaccaagccgatgtttgttattgcatttctctctccactgtctctgatcttcctggccaaatttctcaagaaggcagacacaagagacagcagacaagcctgcctggctgccagccttgccctggctctgaatggcgtctttaccaacacaattgggctagcccattctgacttgatgtgtacaggggataaggacgtggtgaatgagggccgaaagagcttccccagtggacattcttcctttgcatttgctggtctggcctttgcgtccttctacctggcagggaagttacactgcttcacaccacaaggccgtgggaaatcttggaggttctgtgcctttctgtcacctctactttttgcagctgtgattgcactgtcccgcacatgtgactacaagcatcactggcaagatgtactagttggatccatgattggaatgacatttgcctatgtctgctatcggcagtattatcctcctctgactgatgcagaatgccataaaccatttcaagacaaacttgtactttccactgcacagaagcctggggattcttattgttttgatatttaaaaattgaatctggccgggcgtggtggctcatgcctgtaatcccaacactttgggaggctgaggagggtggatcacctgagggcaggaccagcctggccaacatggtgaaccctgtctctactaaaaatannnnnnnnn

SEQ ID NO: 23149 - DNA, 2922 bp, Homo sapiens
  misc_feature 2883, 2884, 2885, 2886, 2887, 2888, 2889, 2890, 2891, 2892,2893, 2894, 2895, 2896, 2897, 2898, 2899, 2900, 2901, 2902,2903, 2904, 2905, 2906, 2907, 2908, 2909, 2910, 2911, 2912,2913, 2914, 2915, 2916, 2917, 2918, 2919, 2920, 2921: n = A,T,C or G
  misc_feature 2922: n = A,T,C or G
tcgacccacgcgtccgggcggggccgcaggcggcatggaggaggcggaggccgcggcgagccgggccgagcagtgagggccctagcggggcccgagcggggcccggggcccctaagccattcctgaagtcatgggctggccaggacattggtgacccgccaatccggtatggacgactggaagcccagccccctcatcaagccctttggggctcggaagaagcggagctggtaccttacctggaagtataaactgacaaaccagcgggccctgcggagattctgtcagacaggggccgtgcttttcctgctggtgactgtcattgtcaatatcaagttgatcctggacactcggcgagccatcagtgaagccaatgaagacccagagccagagcaagactatgatgaggccctaggccgcctggagcccccacggcgcagaggcagtggtccccggcgggtcctggacgtagaggtgtattcaagtcgcagcaaagtatatgtggcagtggatggcaccacggtgctggaggatgaggcccgggagcagggccggggcatccatgtcattgtcctcaaccaggccacgggccacgtgatggcaaaacgtgtgtttgacacgtactcacctcatgaggatgaggccatggtgctattcctcaacatggtagcgcccggccgagtgctcatctgcactgtcaaggatgagggctccttccacctcaaggacacagccaaggctctgctgaggagcctgggcagccaggctggccctgccctgggctggagggacacatgggccttcgtgggacgaaaaggaggtcctgtcttcggggagaaacattctaaatcacctgccctctcttcctggggggacccagtcctgctgaagacagatgtgccattgagctcagcagaagaggcagagtgccactgggcagacacagagctgaaccgtcgccgccggcgcttctgcagcaaagttgagggctatggaagtgtatgcagctgcaaggaccccacacccatcgagttcagccctgacccactcccagacaacaaggtcctcaatgtgcctgtggctgtcattgcagggaaccgacccaattacctgtacaggatgctgcgctctctgctttcagcccagggggtgtctcctcagatgataacagttttcattgacggctactatgaggaacccatggatgtggtggcactgtttggtctgaggggcatccagcatactcccatcagcatcaagaatgcccgcgtgtctcagcactacaaggccagcctcactgccactttcaacctgtttccggaggccaagtttgctgtggttctggaagaggacctggacattgctgtggattttttcagtttcctgagccaatccatccacctactggaggaggatgacagcctgtactgcatctctgcctggaatgaccaggggtatgaacacacggctgaggacccagcactactgtaccgtgtggagaccatgcctgggctgggctgggtgctcaggaggtccttgtacaaggaggagcttgagcccaagtggcctacaccggaaaagctctgggattgggacatgtggatgcggatgcctgaacaacgccggggccgagagtgcatcatccctgacgtttcccgatcctaccactttggcatcgtcggcctcaacatgaatggctactttcacgaggcctacttcaagaagcacaagttcaacacggttccaggtgtccagctcaggaatgtggacagtctgaagaaagaagcttatgaagtggaagttcacaggctgctcagtgaggctgaggttctggaccacagcaagaacccttgtgaagactctttcctgccagacacagagggccacacctacgtggcctttattcgaatggagaaagatgatgacttcaccacctggacccagcttgccaagtgcctccatatctgggacctggatgtgcgtggcaaccatcggggcctgtggagattgtttcggaagaagaaccacttcctggtggtgggggtcccggcttccccctactcagtgaagaagccaccctcagtcaccccaattttcctggagccacccccaaaggaggagggagccccaggagccccagaacagacatgagacctcctccaggaccctgcggggctgggtactgtgtacccccaggctggctagcccttccctccatcctgtaggattttgtagatgctggtaggggctggggctaccttgtttttaacatgagacttaattactaactccaaggggagggttcccctgctccaacaccccgttcctgagttaaaagtctatttatttacttccttgttggagaagggcaggagagtacctgggaatcattacgatccctagcagctcatcctgccctttgaataccctcactttccaggcctggctcagaatctaacctatttattgactgtcctgagggccttgaaaacaggccgaacctggagggcctggatttctttttgggctggaatgctgccctgagggtggggctggctcttactcaggaaactgctgtgcccaacccatggacaggcccagctggggcccacatgctgacacagactcactcagagacccttagacactggaccaggcctcctctcagccttctctttgtccagatttccaaagctggataagttggtcattgattaaaaaaggagaagccctctggggaaaaaaaaaaaaaaaaaaaaaaaaaaaaaaaaaaaaaaaaaaaaaaaaaaaaaaaaaaaaaaaaaaaaaaaaaaaaaaaaaaaaaaaaaaaaaaaaaaaaaaaaaaaaaaaaaaaaaaaaaaaaaaaaaaaaaaaaaaaaaaannnnnnnnnnnnnnnnnnnnnnnnnnnnnnnnnnnnnnnn

SEQ ID NO: 23150 - DNA, 337 bp, Homo sapiens
  misc_feature 234, 235, 236, 237, 238, 239, 240, 241, 242, 243, 244, 245,246, 247, 248, 249, 250, 251, 252, 253, 254, 255, 256, 257,258, 259, 260, 261, 262, 263, 264, 265, 266, 267, 268, 269,270, 271: n = A,T,C or G
accttggctccggctacttcactgccatccagaacttgaggaaaagtgaggaggaagtggctgcccggcgtgcgcgggtcgtgtggtgtgcggtgggcgagcaggagctgcgcaagtgtaaccagtggagtggcttgagcgaaggcagcgtgacctgctcctcggcctccaccacagaggactgcatcgccctggtgctgaaaggagaagctgatgccatgactttgtctgacnnnnnnnnnnnnnnnnnnnnnnnnnnnnnnnnnnnnnngagacttcgtggtggtgctaagaaaaggaagaagaagtcttacaccactcccaagaagaataagca

SEQ ID NO: 23151 - DNA, 995 bp, Homo sapiens
  misc_feature 1, 2, 975, 976, 977, 978, 979, 980, 981, 982, 983, 984, 985,986, 987, 988, 989, 990, 991, 992, 993, 994, 995: n = A,T,C or G
nnggaacgcctcaggaatcccttacctggactatcgtacctacgctatgcgagtcctgttcccgggcatcgaggaccaccccgtcctgcgggagctggaggtacaaggaaacgggcagcagcacgtggagaaggccctgaagctctttgcccagctcatcaacaacaaggtgttcctgctgaccttcatccgcaccctggagctgcagcgcagtttctccatgcgcgaccggggcaacgtggcttcgctcatcatgaccggcctgcagggccgcctggaatatgccactgatgtcctcaagcagctgctctctgacctcatcgataagaacctggagaacaagaaccaccccaagctgctactccggaggacagagtctgtggctgaaaagatgctgaccaattggttcgccttcctcctgcacaagttcctaaaggagtgcgcaggggagccactcttcatgctatactgtgccatcaagcagcagatggagaagggccccattgatgccatcacgggcgaggcccgctactccctgagcgaggacaagctcatccggcagcagatcgagtacaagaccctgatcctgaactgcgtcaaccctgacaacgagaacagtccagagatccagtgaaggtgttaactgtgacaccatcacacaggtccaggcacgagattcttgatgccgtgttagaatgtgcctattccaggggccgaggccagtggacatggccttggagtgggccaaggcggatcgcccgggcggctgagatgaggctctcccagatgggcggtgccggacggccaaacctgtgtgttttcgggtgcagctgggggtcggtggtccacaagacccttgaatctgcgctgcgatcggcgggacgaagaacctctatgtgggcccgtggcgccccacacccagggggggtacaccaacgcgggacgatccccgcccgagagtctgttggcctatcnnnnnnnnnnnnnnnnnnnnn

SEQ ID NO: 23152 - DNA, 1539 bp, Homo sapiens
  misc_feature 1, 2, 1533, 1534, 1535, 1536, 1537, 1538, 1539: n = A,T,C or G
nngacgcacgattgcaacatcgaagcccctcggattgggccgcgcgccattgggttggtacccgggaattcggccatcatcggcgaacgagtcaaccggatcggtgactgtggagggcgagctgagccctggccgccgccacaatgggccgcgagtttgggaatctgacgcggatgcggcatgtgatcagctacagcttgtcaccgttcgagcagcgcgcctatccgcacgtcttcactaaaggaatccccaatgttctgcgccgcattcgggagtctttctttcgcgtggtgccgcagtttgtagtgttttatcttatctacacatgggggactgaagagttcgagagatccaagaggaagaatccagctgcctatgaaaatgacaaatgagcaacgcatccggatgacggttccctgtctctgaaagacctttctctggaagaggagtctggaagaggagtctgcattgtagtgtctcaaagacacaataaacttcctatggtctgcaaacaacaaaacaaacaacaacccacaaacacatttgcggcgcacttggcccccaaaaacgatcacacaacaaaacaaatggtataactgcacagcgcacccacagcaggacagcggcaccctggcccaaaagcagcgtgtccccaagagaaccctggcacacgcaaatcagcggtggagacaccacacagcaaaaaaaaacacacgcccgcgcgtccacaccacgaagtacgacacaaacccacccactagccccacccgggagccaaacaaagggcgcacacaatgaaacagagcgggccacacacaagcagaatactcaaaattagccaccacccacgaggagagacagaaaacaaaacaaaaacagacagagaaaagaaaaacacagatacaagacaaccacaaccacgacacgcaccacaacagtcaagacaacgaaaaggacaacaacaagagacaaaagaaacaacaaaacaacaagaaggacagagaagaggagaagaggaaacagaagccggaagacagacagagagaagaagaaaagcgacgaaaacgggggaaaaagaaagagcaagcgcacgaagcccagcaacacagagacgacagaggaaagaaagagaagaacgagtacgaacagaaacagaaaaccgaaagacaagcgggcgcagcgagccgcacgaccgagacacaaggaaagaacaacaaagaacgagagaaggagcaagatagcggagagcgagagagtgcgcgacagatgagacagcgcaagcgagagaccagaaagaggaacaccagaacgagagacgaagggaagagcggcagggggagaagagggaggagagacaagagagcagaacacgagagaaggagagagacgagcagacgacaaacagaggagaacgagaagggagcggaggagagcagaagggcatgaacgagaagaggagaaagagaagcaggcgcggagagagaaggagaaggcgaagaggagacaagcaagcagaggaagcgcgggagccannnnnnn

SEQ ID NO: 23153 - DNA, 1415 bp, Homo sapiens
  misc_feature 1, 2, 3, 4, 5, 1409, 1410, 1411, 1412, 1413, 1414, 1415: n = A,T,C or G
nnnnnctcggcttccatgggcctaatttacagatagggcggtatttctgccccttaaccgaaagtgggatacagaggacgacggtgttaggcgcctgtgtaggagtaaaatgtgtttatttgcattcaacgagagctcctgcatgcagctatttgcatatgattgcatcttacgaagaattgtggcaaaaaaaagctgggcgtgcgccgtaggaacctcctgctgagacgcttccggtagcggcgcgtgacccgacaggtctttcacctacctacctcagctcccacaaacacgagaagttccagcaagttcgccacttccggttctcctggctatccaatagcatcgagtggagcatccccggaagtgaggcagcggaggacgacctttttccggttccggcctggcgagagtttgtgcggcgacatgaaactgcttacccacaatctgctgagctcgcatgtgcggggggtggggtcccgtggcttccccctgcgcctccaggccaccgaggtccgtatctgccctgtggaattcaaccccaacttcgtggcgcgtatgatacctaaagtggagtggtcggcgttcctggaggcggccgataacttgcgtctgatccaggtgccgaaagggccggttgagggatatgaggagaatgaggagtttctgaggaccatgcaccacctgctgctggaggtggaagtgatagagggcaccctgcagtgcccggaatctggacgtatgttccccatcagccgcgggatccccaacatgctgctgagtgaagaggaaactgagagttgattgtgccaggcgccagtttttcttgttatgactgtgtatttttgttgatctataccctgtttccgaattctgccgtgtgtatccccaacccttgacccaatgacaccaaacacagtgtttttgagctcggtattatatatttttttctcattaaaggtttaaaacgtaaaacactaaaaaacacaccaaatacaacaaaacccggggggtctaattagggggggggacacaaggggtcactggcgtggggcagggggaatcgggtcccggacacatttgtttggttcaaagacgggtaaaaaccgcgggaccccaaatgggggcgaaataacttacgaaccgcggtaccgttagaactccagcaacgaaccagacagcggagaccgaacggcacagctacgggggccaaccctatgacagaacggggcagacacaagatacacagcacaccgtcacgccacacgccaccacaccaccgaacacagcatcacagagagggtcggcgacgtgcgcgacagctgcatacgacaagggcggcctgtgcaccacgagaccagcctacaacagacagacgacagcgacgacagagccaatggcgaacgcannnnnnn

SEQ ID NO: 23154 - DNA, 1252 bp, Homo sapiens
  misc_feature 1: n = A,T,C or G
nagcgggattatccagaagtttgggatttggatttttggactggctgtgctcaatctatacaagcatttctggtgccatgatgaggcataaaatgttcattttaaacatgttataaactcgtgtttttcaaaaaacttcatttaatacaaatagttgcttaaacaagtatgaaaggctgaaagtcaaaatctgcctgagaaacttaacaaatctgcaagctggaaaccgcgtcttttccccactctctgccagacagaatcacccagtccactttcaggggcccagcagggaagctgatttaagagaagtcaacagcttttctgactacactgtggattccatcagtgcacaggcacctgcagggctgcagtaagcatctctgatgaggtggtcccgggcactcactcgcagtctccctcctggtttccttgtgggaaggggcttcatgatttcaagctcagttcccctcccactcccagaggtggagcgcatggtcatagaaggagcaggtggccaggaggctgaaggctgagtctgcttcttctgggttcacgccacagtcacgtgtggtggctgctgtagcctgcagccaggtgccattcttcctcatgccctctgtgagtggcttcattccactctggggtctggcatggccctccccatcgttatcctctctgcattcatgacagggtgttggcaactcgcttgcacccttcaggtctgccgtcttggttcctaggttgctaggaaaggaccacgagggggcccgctgcagagaacggaagagcagccaggaccagtcggctccatacaccagcgagtcgggcaatgtgtgagatgtcaggaccgtcgcctcctgcctctcctccattgccttttggcagttgaggatcttaaagccactgtgcatgcaggcggccaggagcaggtggtggtggaaagggtgccacttgattctccataccccaccctgcacaggcgtatctgccaacggctgcttcatgtttcgtgtgtcccacagtaggatgtgttcatcatagcttcccgtggccaggatgtgctcccgatgagggctgctctggatgctgcacacaccctatggtgtgtcttttgctggtgaagagaaatttgccgggtaccctggtgtcccagcccctcagaaggccatcgtcgccccctgggtgactctgtctgtgaggaagctcccctgggtgactctgtgaggaagctccccggacgcgtgggtcgact

SEQ ID NO: 23155 - DNA, 2813 bp, Homo sapiens; identical to SEQ ID NO: 22385
  misc_feature 1, 2812, 2813: n = A,T,C or G

SEQ ID NO: 23156 - DNA, 435 bp, Homo sapiens
  misc_feature 430, 431, 432, 433, 434, 435: n = A,T,C or G
acgcggggagaaaccctcataaagtagatgcagagggcagtaagatataactcaactttgaaaatgtcagccgttatagttgaagaaatctgacccaagagacctcgctccgctgcaagatggaaggaagcttaagtaagacataaatttgtaatgaactgggccccacatccgccgccactgtgacttgcagtcatcatccattaccacaaaattagttgcaggatggctactcgtatccctccacacatgatcatcagtatttgcctcctgtgtcccaaccggcctgagtcaaattcccactctgtcacccaagctggagtgcagtgatgtaatctgggctcactgcaaccttcacttcccaggttcaagagattcttctgcctcagccttcaaagtagctgggattacagggttacgactcactgannnnnn

SEQ ID NO: 23157 - DNA, 898 bp, Homo sapiens
  misc_feature 1, 894, 895, 896, 897, 898: n = A,T,C or G
natagggcggcagcagtacgaggcctgggcggatcatccgcttccggagtcgaggttttcgggcttgtaccgcttggcggtgcggcctggtgtcggcttgcaggttctttctgtgtttgttctctgccctgccaaggccgtagagctggtgcgtgcgggtagcggggctctccgaggagccgcacgccggcggcaccatggtccacctcactactctcctctgcaaggcctaccgtgggggccacttaaccatccgccttgccctgggtggctgcaccaatcggccgttctaccgcattgtggctgctcacaacaagtgtcccagggatggccgtttcgtagagcagctgggctcctatgatccattgcccaacagtcatggagaaaaactcgttgccctcaacctagacaggatccgtcattggattggctgcggggcccacctctctaagcctatggaaaagcttctgggtcttgctggctttttccctctgcatcctatgatgatcacaaatgctgagagactgcgaaggaaacgggcacgtgaagtcctgttagcttctcagaaaacagatgcagaagctacagatacagaggctacagaaacataaatgagctgactttagtgagcatagcagtgggaacaaggtcaaggtccttttgaaacactgcagcgatcttaattttgttagatttggagttcaataaatggagtatcctgaaaaaaaaaaaaaaaaaaaaaaaaatccgcggggccctttatgcggggggggcgggaacaaggggttttggaatgggcctggtgccatacgtgtcccggcacccgtttttggtcaaagggggaaaccggcgggccccataggggccattaattcaaaaaccggaacggataannnnn

SEQ ID NO: 23158 - DNA, 5529 bp, Homo sapiens
  misc_feature 1, 2, 3, 4, 5, 6, 7, 8, 9, 10, 11, 12, 13, 14, 15, 16, 17,18, 19, 20, 5527, 5528, 5529: n = A,T,C or G
nnnnnnnnnnnnnnnnnnnncagggaaagcctaaattacggaattaccgcgagcaaggagcgcggaatcggggagcgtccggagctagctggatcctctaggcaggatggtgatgggaatctttgcaaattgtatcttctgtttgaaagtgaagtacttacctcagcagcagaagaaaaagctacaaactgacattaaggaaaatggcggaaagttttccttttcgttaaatcctcagtgcacacatataatcttagataatgctgatgttctgagtcagtaccaactgaattctatccaaaagaaccacgttcatattgcaaacccagattttatatggaaatctatcagagaaaagagactcttggatgtaaagaattatgatccttataagcccctggacatcacaccacctcctgatcagaaggcgagcagttctgaagtgaaaacagaaggtctatgcccggacagtgccacagaggaggaagacactgtggaactcactgagtttggtatgcagaatgttgaaattcctcatcttcctcaagattttgaagttgcaaaatataacaccttggagaaagtgggaatggagggaggccaggaagctgtggtggtggagcttcagtgttcgcgggactccagggactgtcctttcctgatatcctcacacttcctcctggatgatggcatggagactagaagacagtttgctataaagaaaacctctgaagatgcaagtgaatactttgaaaattacattgaagaactgaagaaacaaggatttctactaagagaacatttcacacctgaagcaacccaattagcatctgaacaattgcaagcattgcttttggaggaagtcatgaattcaagcactctgagccaagaggtgagcgatttagtagagatgatttgggcagaggccctgggccacctggaacacatgcttctcaagccagtgaacaggattagcctcaacgatgtgagcaaggcagaggggattctccttctagtaaaggcagcactgaaaaatggagaaacagcagagcaattgcaaaagatgatgacagagttttacagactgatacctcacaaaggcacaatgcccaaagaagtgaacctgggactattggctaagaaagcagacctctgccagctaataagagacatggttaatgtctgtgaaactaatttgtccaaacccaacccaccatccctggccaaataccgagctttgaggtgcaaaattgagcatgttgaacagaatactgaagaatttctcagggttagaaaagaggttttgcagaatcatcacagtaagagcccagtggatgtcttgcagatatttagagttggcagagtgaatgaaaccacagagtttttgagcaaacttggtaatgtgaggcccttgttgcatggttctcctgtacaaaacatcgtgggaatcttgtgtcgagggttgcttttacccaaagtagtggaagatcgtggtgtgcaaagaacagacgtcggaaaccttggaagtgggatttatttcagtgattcgctcagtacaagtatcaagtactcacacccgggagagacagatggcaccagactcctgctcatttgtgacgtagccctcggaaagtgtatggacttacatgagaaggacttttccttaactgaagcaccaccaggctacgacagtgtgcatggagtttcacaaacagcctctgtcaccacagactttgaggatgatgaatttgttgtctataaaaccaatcaggttaaaatgaaatatattattaaattttccatgcctggagatcagataaaggactttcatcctagtgatcatactgaattagaggaatacagacctgagttttcaaatttttcaaaggttgaagattaccagttaccagatgccaaaacttccagcagcaccaaggccggcctccaggatgcttctgggaacttggttcctctggaggatgtccacatcaaagggagaatcatagacactgtagcccaggtcattgtttttcagacatacacaaataaaagtcacgtgcccattgaggcaaaatatatctttcctttggatgacaaggccgctgtgtgtggcttcgaagccttcatcaatgggaagcacatagttggagagattaaagagaaggaagaagcccagcaagagtacctagaagccgtgacccagggccatggcgcttacctgatgagtcaggatgctccggacgtttttactgtaagtgttggaaacttaccccctaaggctaaggttcttataaaaattacctacatcacagaactcagcatcctgggcactgttggtgtctttttcatgcccgccaccgtagcaccctggcaacaggacaaggctttgaatgaaaaccttcaggatacagtagagaagatttgtataaaagaaataggaacaaagcaaagcttctctttgactatgtctattgagatgccgtatgtgattgaattcattttcagtgatacacatgaactgaaacaaaagcgcacagactgcaaagctgtcattagcaccatggaaggcagctccttagacagcagtggattttctctccacatcggtttgtctgctgcctatctcccaagaatgtgggttgaaaaacatccagaaaaagaaagcgaggcttgcatgcttgtctttcaacccgatctcgatgtcgacctccctgacctagccaatgagagcgaagtgattatttgtcttgactgctccagttccatggagggtgtgacattcttgcaagccaagcaaatcgccttgcatgcgctgtccttggtgggtgagaagcagaaagtaaatattatccagttcggcacaggttacaaggagctattttcgtatcctaagcatatcacaagcaataccacggcagcagagttcatcatgtctgccacacctaccatggggaacacagacttctggaaaacactccgatatcttagcttattgtaccctgctcgagggtcacggaacatcctcctggtgtctgatgggcacctccaggatgagagcctgacattacagctcgtgaagaggagccgcccgcacaccaggttattcgcctgcggtatcggttctacagcaaatcgtcacgtcttaaggattttgtcccagtgtggtgccggagtatttgaatattttaatgcaaaatccaagcatagttggagaaaacagatagaagaccaaatgaccaggctatgttctccgagttgccactctgtctccgtcaaatggcagcaactcaatccagatgcgcccgaggccctgcaggccccagcccaggtgccatccttgtttcgcaatgatcgactccttgtctatggattcattcctcactgcacacaggcaactctgtgtgcactaattcaagagaaagaattttgtacaatggtgtcgactactgagcttcagaagacaactggaactatgatccacaagctggcagcccgagctctaatcagagattatgaagatggcattcttcacgaaaatgaaaccagtcatgagatgaaaaaacaaaccttgaaatctctgattattaaactcagtaaagaaaactctctcataacacaatttacaagctttgtggcagttgagaaaagggatgagaatgagtcaccttttcctgatattccaaaagtttctgaacttattgccaaagaagatgtagacttcctgccctacatgagctggcagggggaaccccaagaagccgtcaggaaccagtctcttttagcatcctctgagtggccagaattacgtttatccaaacgaaaacataggaaaattccattttccaaaagaaaaatggaattatctcagccagaagtttctgaagattttgaagaggatgccttaggtgtactaccagctttcacatcaaatttggaacgtggacgtgtggaaaagctattggatttaagttggacagagtcatgtaaaccaacagcaactgaaccactatttaagaaagtcagtccatgggaaacatctacttctagcttttttcctattttggctccggccgttggttcctatcttcccccgactgcccgcgctcacagtcctgcttccttgtcttttgcctcatatcgtcaggtagctagtttcggttcagctgctcctcccagacagtttgatgcatctcaattcagccaaggccctgtgcctggcacttgtgctgactggatcccacagtcggcgtcttgtcccacaggacctccccagaacccaccttctgcaccctattgtggcattgttttttcagggagctcattaagctctgcacagtctgctccactgcaacatcctggaggctttactaccaggccttctgctggcaccttccctgagctggattctccccagcttcatttctctcttcctacagaccctgatcccatcagaggttttgggtcttatcatccctctgcttactctccttttcattttcaaccttccgcagcctctttgactgccaaccttaggctgccaatggcctctgctttacctgaggctctttgcagtcagtcccggactaccccagtagatctctgtcttctagaagaatcagtaggcagtctcgaaggaagtcgatgtcctgtctttgcttttcaaagttctgacacagaaagtgatgagctatcagaagtacttcaagacagctgctttttacaaataaaatgtgatacaaaagatgacagtatcccgtgctttctggaagtaaaagaagaggatgaaatagtgtgcacacaacactggcaggatgctgtgccttggacagaactcctcagtctacagacagaggatggcttctggaaacttacaccagaactgggacttatattaaatcttaatacaaatggtttgcacagctttcttaaacaaaaaggcattcaatctctaggtgtaaaaggaagagaatgtctcctggacctaattgccacaatgctggtactacagtttattcgcaccaggttggaaaaagagggaatagtgttcaaatcactgatgaaaatggatgacgcttctatttccaggaatattccctgggcttttgaggcaataaagcaagcaagtgaatgggtaagaagaactgaaggacagtacccatctatctgcccacggcttgaactggggaacgactgggactctgccaccaagcagttgctgggactccagcccataagcactgtgtcccctcttcatagagtcctccattacagtcaaggctaagtcaaatgaaactgaattttaaactttttgcatgcttctatgtagaaaataatcaaatgataatagatacttataatgaaacttcattaaggtttcattcagtgtagcaattactgtctttaaaaattaagtggaagaagaattactttaatcaactaacaagcaataataaaatgaaacttaaaataaaaaaaaaaaaaaaaaaaaaaactccagggggggcccgtacccaaatttgccctatgnnn

SEQ ID NO: 23159 - DNA, 1190 bp, Homo sapiens
  misc_feature 1, 2, 3, 4, 5, 6, 7, 8, 9, 10, 11, 12, 13, 1187, 1188, 1189,1190: n = A,T,C or G
nnnnnnnnnnnnncgagggtacttctagaattaattaacgcggggggaacggttgccatggcagcggctgggcgtgctgcttagcaggggaaagatggcggtgacgggctggttggagagtctgcggacagcccagaagactgcgctgctgcaggacgggagaaggaaggttcactatttattcccagacggcaaggaaatggctgaagaatatgacgagaagacgagtgaactacttgtgagaaagtggcgtgtgaaaagtgccctgggagccatgggccagtggcagcttgaagtaggagacccagcgcccctaggagcagggaacctggggcctgaactcatcaaggaaagcaatgccaatcctatcttcatgcgcaaggacaccaagatgagtttccagtggcggattcgaaacctcccctatcctaaggatgtctatagtgtctctgtggaccagaaggagcgctgcatcattgtcagaacaaccaacaagaagtactacaagaagttctccattcctgatctagatagacaccagctacctctggatgacgccttgctgagctttgcccacgccaactgcaccctgatcatctcttaccagaagccaaaggaggttgtggtggccgagtctgagctacagaaggaactaaagaaggtgaagacagcccacagcaacgatggggactgcaagacccagtagttggcccctgagccttatacctccaccacagggggtgccgtgagacttcaaggcttggcccttcttgaccacggcagcctcctgtcttctaggagctatcaagggtctctaagaactgggcatggggcactcctagccagtgagtcatggtcatatttcctgagtaaagtcattctgagttacttacaaaaacaaaaaaacagaaaacagaaaaacacgcagacaaacacgacacagaaaccgacacaggagcaacgagacagatacagaaacaagggcgaagggacgaaacgacacacgcggacggagcgcaccaagcacatagattagaggaggcaaagaagataaaaacgagacgcgaacaaggagaggaacagacgtagcacacatgtgggaagacaacaaaaggagaaatgtcctcagcgcacacagaagcagcagcacgcgaatgagggcgagcaggagcgcagaccacaaaccnnnn

SEQ ID NO: 23160 - DNA, 3382 bp, Homo sapiens
  misc_feature 1, 2, 3380, 3381, 3382: n = A,T,C or G
nncatcaccccgacgactcagcaatgtctcctcgtctggaagcatcaacctgctcgaatctcctcagcttgccactttggctgaggatgtcactgctgcactcgctaagcagggcttgtgaatatttctcatttagcattgaaataataatatttaggcatgagctcttggcaggagtgggctctgagcagttgttatattcattctttataaaccataaaataaataatctcatccccaaactgtagtaattgttacaattttctatttaaaaaatgaatagtacatgcagaaattgacctgatttccatttgcaacaggaagacactggctttacatgggttcaattggacaattatttttgctctgctctgttttgcatggagtattattattttaaaaattgcatttttacctttcatgtgcctgaaggctatccactacattctgaaggccttgttaaaatccaagctgctcatttcactattctgtttctgagtgagaagataaaaactgcccattgtaacttatttcaggttaaattaaaccaaggagtctgattgcaggaagggaagagcatgtaagaaataagtttttttaaagtgttattttgtataaatgggaagaaagattcaattaagttattaacatttgggacctggataattatatcagagtatgtcagtccaataaattatttaactaattaaaaaatagttgcaaagcatttgagctgtggttgaggaagtggtgtaaaagtgcatccattaggaatgatgcactttcattaggatggactcgtgtctgattagaatgtcagttgatcagctagatttgtgtccacactaccagtttcacaccccctttccatctgtttgatacagtattatagatataaatatatatatatttctctgtggccatttgtgatacttcctcatatacttgaatattatacttctttattcacagtatctgtgtctcctgcaccctttggtgttgcaattttagatatgtgaaagtagatgttagcagggttctctccctatttaaaaaaaatacattaaaaaagacaaaaaattttagcatgaagttgctttctgtaacaactcaaagccgtaaccctgttttagtgccagatacaagtctctcccgtgatgctagacaaaaaattatttttctttgctttcaccaacatggagtttgtgggggtgggtccagttatacatgaaagggtttacagattgttggtttaagattatggatttatctcatttttaatcacaggatagtttggggtttattcctattattattcatgaaaccgacttaagattttttctttatttttctttttttttccatttgctaaagttgaaagttgaaactaactataatagtttgaaacatgttttctcatttttccaaatagtatctgtttattaaattctctaatagaagatgtttgtctttcttacccaaagtaaagatcccctgatcagaaagaaaaaatacaatactttgggaagctatagctataaaacacttgagacacagatatctaaatcagtttttttccaagactccaacattgcactctgtaaagtaacacactgtgatctagtattatttatcagtagataatactgttctgactgtatatacagtctagaactcacaaatcaattagttcctctcacaaatcattcatcttagacttacaaataaggaatgaaatagtcaatggcctgattaaggcaaagagctaccaggctagatggacactttttaaaaattttatctgttctttttcttgctcagggctggtaggttggatctgaaccattaaaatcaaatggtccactaggcgtatgatctctttgagccaaatcagttcctgaatataaaggaggaaatgatgaggatgtactgaggcaacggggaagtatagaaacatccaagacaaaagccaagggatgcaaaggcagagacacaggtgctttttggtgacccagtggatatggcaaccagtgtaactgccatacaagaaaccctaggagcaaacccacaccactcattctcagctaagagattttacacaggcaaacgtgtcttaaaccatctataaatcagttattttatatgacagtcaaaaccttagaaaccttaggatcattatatctattttctgcctattaattgctgtgaggtttgatttgaccaatctgggcaatttattcatcagcttcccttgaagtgcaccagaaaatagaagaaaggtgtgtggagacttagggtattttattacatgttttcatagtcttaaatagtgattaaatttctctagaaagaagttaacagctcattagaaaagttttaacctgtgaaataagtatttttctcaacattctttaaagtttttatataagttaacactaggtaaacattctgcatactagaagtcagtttattacaaatacatgtcaaaaataaagattatacaaggcaccaaactactagatttggcattaaaacaaatgtttatttctaatcacaacaaaattataatgaataaatgttcttgctttgtatggaaatacaattctttattaaagttaacagaaaggaactgatcgtttgtaccagtaaaagagagaaacacacaggttaaatatcttcttgtggggttaaggggtagaacctatcttgccttcactctcaagataacgactcaaattaagctttttgagcaccactcttgtggggacacacatacgctgatctaggaatgaaatcttcgtggtctcaattctagatctactatgccagtttctctctggctttagcctttgagaacctgtataagaatacgtaagtaatccagagctgtgaagagtttaaaggccaacttctccagtgaactcaacctctgggtcacttgcaaccagaaattggatacctcataatgatgcaggaaagacccgagttcatgatgagtttcaaaggccacgttcatttaggaaccaactctctctggatttacctgctgagttccagcagcgtgatgggctgacatcccacctacaagtatgacacctgtgtaacaccagctaggtacggctggagaagccgaagagagatgccttaatggggatgcggttggtgtgggctttcccacacacaacacaaaacaaaaccaagtataaacgagggggtaacagccgaattaaaaccccagttttgagaaaacccgggggggtacaaaagcaacagcttcttttcccgaagaaaacagcggcaaaaaaaacggggggacgtcacagcggacaaggttcacagaggggcacgcaaccccatccaacaccaccgtgtagcaagannn

SEQ ID NO: 23161 - DNA, 1918 bp, Homo sapiens
  misc_feature 1, 2, 1918: n = A,T,C or G
nnaggccgaaatttggggaaagacccggggccaccccaattccgctggaacaccggggagctgaaacccatctggacccagcaccatgagccggatggaggggaccacaagggcaaagtccaatatgaggtgaggaaggctttctagaaggtcacaaacaccacagggcccctgactggggagaatgaaagacactgaccaagaagatgtgaacccactcaggggctgtcagggttctgaggatctcactggggacggcctcccagcggccagctatcagcacgagttggagggaaagagccatggtgggggtcagtcacgtggctcccaggaatggtctccccgacttaggaagcaccttggtgcaccttttctccttgcatcctcacaaccacccagtcaggccactcaagtcttacagcaggtgacactcccaaggtcccagctaggaggactttgagaattcaagcattctcaggtctggattagagacaggaatctgtctccacttccttacatggctagacacagagcccgggagggcaaaggaaaattggaggccccttcttcccatgagccattttctctgcatcccctgcccataagccttcactggcctctgatcaccctcatggttgactgcagctgctcctctcagtgccctcatgccctccactgtgctcagcgcacggaaagagtgaatactcagttcttcctgagggaactgaggcacagagaagtggagggcatagaactgccaagtggcagggccatgataggaactaggcagcctgccttggcaacctgtgtttttaaatgttgcttatgttcatctgtgacctcttactcaccctctcctgctccattgctttaggctatgaactctccaaagtggaagggaaaacagggacccctgagaagcccctctcagaccttggcctcctatcctatcgaagctactggtcccagaccatcctggagatcctgatggggctgaagtcggagagcggggagaggccacagatcaccatcaagtgagcctggcgctgtctacctgggggtacatggcatggcttgtctgttcctgggctttctctctcagggctcctggggacagataaaggtcctcagggaacctgacctgtgctctcccacagtgagattagtgaaatcaccagcatcaagaaggaggatgtcatctccactctgcagtacctcaatctcatcaactactacaaggtagggaggcaggcaggggagacaggtgtgtgggatgcagagtgcagtcctctgtgggctgaccacctgctgaacccatctcctctgcccagggccagtacatcctcacactgtcagaggacatcgtggatggccatgagcgggccatgctcaagcggctcctgcggatcgactccaagtgtctgcacttcactcccaaggactggagcaagagggggaagtggtgaccagacactgcccactgcagtgccaagacggcagcaggactggggctgatagcccaccccgcccccactgcagctcccacaaagcactctaagggagatggggctgaggacagctcataaaggagaggacaggcctggcaggggcccactggtgcccagcaccaaggcgagctccgggctcagaccaactccaaggtcagctggccacaggcccaggcctcctctgaagcagggaccagagggagccacgcacctgtgtacagtgagaagggatccggatgggggcgctatgtacagagggctggtgattgtaaaaatttcttttgtaaagtagaagttgggggtggggtgggtgctggctgcaaaaatttctggcttctcttacccctattgcccccggcaataaattgtttctatatgccagagccatccaacaaggccgactcgatgcn

SEQ ID NO: 23162 - DNA, 452 bp, Homo sapiens; identical to SEQ ID NO: 22027
  misc_feature 1, 441, 442, 443, 444, 445, 446, 447, 448, 449, 450, 451,452: n = A,T,C or G

SEQ ID NO: 23163 - DNA, 2301 bp, Homo sapiens
  misc_feature 1, 2299, 2300, 2301: n = A,T,C or G
ncgacccacgcgacccacgcgtccggagacgcaagcagctggatctccggtaactgagacatagggtataactgttgtcgcggcggaggaagtgaggacggcgccaagggccttccgggccagtgttggatccctgtagtttgtgaagatggtgttgctaacaatgatcgcccgagtggcggacgggctcccgctggccgcctcgatgcaggaggacgaacagtctggccgggaccttcaacagtatcagagtcaggctaagcaactctttcgaaagttgaatgaacagtcccctaccagatgtaccttggaagcaggagccatgacttttcactacattattgagcagggggtgtgttatttggttttatgtgaagctgccttccctaagaagttggcttttgcctacctagaagatttgcactcagaatttgatgaacagcatggaaagaaggtgcccactgtgtcccgaccctattcctttattgaatttgatactttcattcagaaaaccaagaagctctacattgacagtcgtgctcgaagaaatctaggctccatcaacactgaattgcaagatgtgcagaggatcatggtggccaatattgaagaagtgttacaacgaggagaagcactctcagcattggattcaaaggctaacaatttgtccagtctgtccaagaaataccgccaggatgcgaagtacttgaacatgcgttccacttatgccaaacttgcagcagtagctgtatttttcatcatgttaatagtgtatgtccgattctggtggctgtgaaataatgaatacagtcactggtaagggagaacctagaacccagtaggtgtatattttcaggaaactgagctcacagagatgtgtattagaatccaagtggaacttctgcctctaaagaccttgcaagaaaagagatgccctgaaaatgaaaggttgcacctcatttaatgaagcttaaccctatgtagaaagtctctttcgggggcagaggctttctctgggtgccaagccatatatattagggaatagtagattgttaatttcgttttttccctcccagtgcattttaaaaacagcactggctggggcattctcattctctgatggagccatcaatgagatttaacttagtcaacctgtgctagcaacattctgaaattccttcaaagaaggcagtcctttgggaaggtgtttttttttttttttttttttttgactctaatcaacattccttttgttggtgacatttgtgattttcagtaatctgagtttttgatggccttttaaacaagactccagtatgtgaaggttaattgctgtgctccacagatcttgtctattggcccctgtagaaagttaacctttgttgttttccttttataatttgcttattgcacaattgctttagggtaagtgaattatattaagatgccttgaaattatagcactccttgattaagaagctaaaatgtttctctcatttactccttaaacaaaagacttaaattagtttgggtcattattacttttattttgcagcatttggtttgttattagcgtaagagcaagtataggatatggagaggcccctggcttcatgagaacaaaggcaggcccaggttataattacagctttctcctgccccttctttactttctctaccacagttttctccactgtttgttttcctcttgccacaatttgctaacatttaaaaaattttcctgcacccagtagtttcatatcctgtagacatcctcttaggacattctcaaatttcaaaataaaaaatattcatctatgtagttaattaaagttaaagtttttgcagatcaactactcaaactactaaatacatttacctgagaaaaagtctctgagagcacttcattcctgttttagttcgtgtaaattctctgagaatgttctggagatagataactcatttacagtggtttctattaactaattaaagtacccatgattttttccttttctgctcagggatgatggagatttccttgacctcgacgtagaattccaactggcaaatggccttttaatatatgcagggctgcatataactaaaatcctgacttacgcaactctccttactggcggaaatgaggactttaatctaaacttggcgaaacatacaggagagctctttccgggaaccaagaacccggccgagaaaaatatcctacacggggacggtttccacatacgacgatgctttggcacagaggggggaaatatagaacccaggagggaaacggcannn

SEQ ID NO: 23164 - DNA, 389 bp, Homo sapiens
  misc_feature 1, 2, 3, 4, 388, 389: n = A,T,C or G
nnnnaggtgtggatttctctgaaataggccagggaaaaggctgtgacctctccttgggtctgctgcagcgttctagccttggctaggtgaggggaactgttgggccgatgctgtgtggctggagcagaacccacagtgctgtccatagaggagaacaagcaacgaagatcatggctaaagatcttagagatccttaaaatgccgattcctaatctcttgctgaaaactactgacttttagatattttcccgcttgccactctgtaatccagaatattaggaacaagttcttaaactcgagtttacttttcactggtgtttgcatgtgtgggggacaaaagtttatgttcttgtggcaggaaactgtgggatctgcagcatggaggagnn

SEQ ID NO: 23165 - DNA, 2325 bp, Homo sapiens
  misc_feature 1, 2315, 2324, 2325: n = A,T,C or G
nccacccacagccccggctaccccggagaagcctgacttgagaaccctttctgcagagtcccggcagtgcgggactccggtagccgcccctccggtagccgcccctcctgcccccgcgccgccgccctatatgttgcccgccgcggcctctggggcatggagcacgctgcccagccctggcgatggcaacggcgacgggggtggcggaggagcgcctgctggccgcgctcgcctacctgcagtgcgccgtgggctgcgcggtcttcgcgcggaatcgtcagacgaactcagtgtacggccgccacgcgctgcccagccacaggctccgagtgccggcgcgggccgcctgggtggtgcaggagctgccctcgctggccctgccgctctaccagtacgccagcgagtccgccccgcgtctccgcagcgcgcccaactgcatcctcctggccatgttcctcgtccactacgggcatcggtgcttaatttacccgtttctgatgcgaggaggaaagcctatgccactgttggcatgtacaatggcgattatgttctgtacctgtaacggctatttgcaaagcagatacttgagccattgtgcagtgtatgctgatgactgggtaacagatccccgttttctaataggttttggcttgtggttaacaggcatgttgataaacatccattcagatcatatcctaaggaatctcagaaaaccaggagatactggatacaaaataccaaggggaggcttatttgaatacgtaactgcagccaactattttggagaaatcatggagtggtgtggctatgccctggccagctggtctgtccaaggcgcggcttttgctttcttcacgttttgttttttatctggtagagcaaaagagcatcatgagtggtacctccggaaatttgaagagtatccaaagttcagaaaaattataattccatttttgttttaagtgcgtttttcatgaaattatcttcaacttgaagctttccaatggcgcttctctatggactttgtaaataagttatatctttgtaattttcctgctactttatcattttcaagatgtcctctaggaattttttttctagtaattttgcaatctacctaataagtacctaaatacgctgaaatggaggttgaatatcctactgtgtaacaggtcagaatttcaagctctgggtaataactgctgatattttttctaatttcaaatttacctcttttggctatgtcttgccaagtgtgtatgagactagactttacaactgtctttgatggcattttcagaacaataaatgtcacaatcccttctatagccccctacagtgatctcttcaaggtcaactgcagtgttgcttccctccccctatagggctggaatctgtctaggagccctctctcggaggccacagaggctgggggtagccattgtgcagtcatggcccgggggaaacttgccaaccttcgtgtcaggtgctgtgtgtaagtggagaacttggggatagaggaggaagctcctcgtggcccttccaaggtgaggcaaaggcatctggacttgttccagcccagcccaccgggtgacatcaccgggcagggaggggtgctggtggtggttcatacggagtaagctgctctgcctgtgtgagtggctcctgggccctaaacaggcacctttaggccatgggtcactcaccgtgagccatcaatgtgctctggtctgacatggtttctctctgtcttctagtctagacctagtttttttgttctgttccccacgtatggatatagtagagattgttgtctgtgaaatttctcttttgtagattttgagttttcccttgtagtgtaaagaatgatcactttctgtaacaataacaagaccactttttaagatttatcctgtttgttctttgttgattgaaacataataattgttaaaattctctacagccttctttttcttccatagctaatcttccttctaatagtttttgctttctgttttgctgttgttgctttgcaaagctttcccctcatagcctgtacctgttatcaatataaaataatcttcctgttgaatgcttcatgacttgaattctactttgataaaaacattgccatactgctttttatcttgatgaattcatctggcattgctttgccttatcatctcatctggagtttttaaatgccatttgtttcagttgtctttaacaacataataaatagactttgccatttaacacggtaggctcaaatttcttttactaattcgttaccatcgaaacccattctttcatcnatatttccnn

SEQ ID NO: 23166 - DNA, 2378 bp, Homo sapiens
  misc_feature 2215, 2282, 2339, 2361, 2363, 2364, 2365, 2366, 2367, 2368,2369, 2370, 2371, 2372, 2373, 2374, 2375, 2376, 2377, 2378: n = A,T,C or G
acgcggggggagaaggggcgcaggtggccgccatcttggattgcgaactgggtcgctacgcttcacgccaggggcggagtggcggcccttctgttacccgccacacacgtcgccgctggggactgggaaatcagggcatcggagagtgccacattaatggatgccatggctagtccagggaaagataactatagaatgaaaagttataagaataaagccctaaatcctcaagagatgcgtagacgaagagaagaagaaggaatacagcttagaaaacaaaaaagagaagaacagttgttcaaacgcagaaatgtctatttgcccagaaatgatgaatctatgcttgaaagtcctatacaggattcagatattagttccactgtacccattccagaggaaggagttgttactacagatatggttcaaatgattttttctaataatgctgatcaacagctaacagcaacacagaaatttagaaagctgctttctaaagaacctaatccaccaatagatcaagttatacagaaaccaggagttgtacagagatttgtgaaatttcttgaaagaaatgaaaattgcactttacaatttgaagctgcatgggcattaacaaatatagcatctggaacttttctgcataccaaggtagtgattgaaactggggctgttccgatttttatcaaacttcttaattctgaacatgaagatgttcaggaacaggctgtttgggcacttggtaatattgctggtgacaatgcagaatgcagagattttgttttgaattgtgaaatacttccacctcttttagagttattaacaaattcaaacagactcacaacaacaagaaatgccgtgtgggccctctcaaatttatgtagaggcaaaaaccctcctccaaactttagtaaggtttcaccttgcttaaatgtcctgtcacgactgttgtttagcagtgacccagatgtgttagcagacgtgtgttgggccctttcttatctctccgatggacccaatgataaaattcaagcagtcattgattctggagtctgtcgaagattggtggaacttttgatgcacaatgattataaagttgtatcacctgcattaagggcagttggtaatattgtgactggtgatgatattcaaacacaggtaattttgaattgttctgcattaccctgtctcttacatttattgagtagcccaaaggagtcaattagaaaagaagcctgctggactgtttctaacatcactgctggaaatagagctcagattcaggctgttatagatgcaaatatttttcctgttttgattgagattcttcagaaagcagagtttcgtaccagaaaagaagcagcttgggctataactaatgcaacatcaggaggtactccagagcaaataaggtatttggtagctttaggctgcattaaaccactttgtgatcttttgactgttatggactccaaaatagtccaagtggctttaaatggacttgaaaatattttacgtcttggagaacaagaatctaagcagaatggaataggcattaatccatactgtgctctcattgaagaagcatatggtctggataaaattgagtttttgcaaagccatgaaaatcaggaaatttaccagaaggcatttgatctgattgaacattactttggtgtagaagaagatgaccccagcattgtacctcaggtggatgaaaaccaacaacagtttatatttcagcagcaggaagcaccaatggatggatttcaactttaacttactggaggaaaaaaaatttatggctaaaaagggtagcttcaggtaactcctctttgttgccaatgtaagaatgtttgtttttttacatagaacagtaaagagaatttgatgcacttttagaaagcaaaatgaaacaaaaatttccattcagatgcaacctttcattgtagtttgttgttgttttagttttgttgttgtgcctgtatttatatcttctattgtttggatttttgtatctatttgtgaataattgaatatgcaattatttagtaatttaagcttgaaaaggagaattttggtgaagcattacttagtaattctgaattttttcaagcattcttggaaactgcacattagcagtaaacctattgataattgcattttggcagtaagtcttacacatctaatctctactaaatctacctctatcttgaangcagaaataaaaacaaaaaagcttcagaagcatgaaataatgcaaatgctaaattagaatgtgaaantatttattaccttaaattatacatatcactgtgctggtaggttatactttgcaaaanattgcaacagaaaacctataanannnnnnnnnnnnnnnn

SEQ ID NO: 23167 - DNA, 721 bp, Homo sapiens
  misc_feature 719, 720, 721: n = A,T,C or G
ccgggcatgtacgcggggctgcgcggtatcggcgtccgcttcccgcggcggcggaggggtgactgttctttcagctcccagctctggagcgctcggcccctgccgcactggatgccagcagttactaaaagtgagcctggcatttcagctgccttgaggtgcagtgttggggatccagagccatgtcggacctgctactactgggcctgattgggggcctgactctcttactgctgctgacgctgctggcctttgccgggtactcagggctactggctggggtggaagtgagtgctgggtcaccccccatccgcaacgtcactgtggcctacaagttccacatggggctctatggtgagactgggcggcttttcactgagagctgcagcatctctcccaagctccgctccatcgctgtctactatgacaacccccacatgggttgccccctgataagtgccgatgtgccgtgggcagcatcctgagtgaaggtgaggaatcgccctcccctgagctcatcgacctctaccagaaatttggcttcaaggtgttctccttcccggcccggtacatgcaagttcttagagggacaagtggcgttcagccacccgagattgagcaataacaggtctgtgatgcccttagatgtccggggctgcacgcgcgctacactgactggctcagcgtgtgcctaccctacgccggcaggcgcgggtaannn

SEQ ID NO: 23168 - DNA, 3238 bp, Homo sapiens
  misc_feature 1, 3232, 3233, 3234, 3235, 3236, 3237, 3238: n = A,T,C or G
nagggcgtcgaccccgcgtccggggcaggcggcggcggccactggccaggcgtggacgcgcgcggggccgccgcgggcgcggagtggccgccgcgtcgcctgagcccagagccggggagtgctctcggccgccgcgtctcctgccctctgtccttccaacccagccctcggctgagccgcgccgcaccatgcccgccgtggacaagctcctgctagaggaggcgttgcaggacagcccccagactcgctctttactgagcgtgtttgaagaagatgctggcaccctcacagactataccaaccagctgctccaggcaatgcagcgcgtctatggagcccagaatgagatgtgcctggccacacaacagctttctaagcaactgctggcatatgaaaaacagaactttgctcttggcaaaggtgatgaagaagtaatttcaacactccactatttttccaaagtggtggatgagcttaatcttctccatacagagctggctaaacagttggcagacacaatggttctacctatcatacaattccgagaaaaggatctcacagaagtaagcactttaaaggatctatttggactcgctagcaatgagcatgacctctcaatggcaaaatacagcaggctgcctaagaaaaaggagaatgagaaggtgaagaccgaagtcggaaaagaggtggccgcggcccggcggaagcagcacctctcctcccttcagtactactgtgccctcaacgcgctgcagtacagaaagcaaatggccatgatggagcccatgataggctttgcccatggacagattaacttttttaagaagggagcagagatgttttccaaacgtatggacagctttttatcctccgttgcagacatggttcaaagcattcaggtagaactggaagccgaggcggaaaagatgcgggtgtcccagcaagaattactttctgttgatgaatctgtttacactccagactctgatgtggccgcaccacagatcaacaggaacctcatccagaaggctggttaccttaatcttagaaacaaaacagggctggtcaccaccacctgggagaggctttatttcttcacccaaggcgggaatctcatgtgtcagcccaggggagccgtggctggaggtttgatccaggacctggacaactgctcagtgatggccgtggattgcgaagaccggcgctactgcttccagatcaccacgcccaatggaaaatcgggaataatcctccaggctgagagcagaaaggaaaatgaagagtggatatgtgcaataaacaacatctccagacagatctacctgaccgacaaccctgaggcagtcgcgatcaagttgaatcagaccgctctgcaagcagtgactcccattacaagttttggaaaaaaacaagaaagctcatgccccagccagaacctgaaaaattcagagatggaaaatgaaaatgacaagattgttcccaaagcaacagccagtctacctgaagcagaggagctgatcgcgcctggaacgccgattcaattcgatattgtgcttcctgctacagaattccttgatcagaacagagggagcaggcgtaccaacccttttggtgaaactgaggatgaatcatttccagaagcagaagattctcttttgcagcagatgtttatagttcggtttttgggatcaatggcagttaaaacagacagcactactgaagtgatttatgaagcgatgagacaagtattggctgctcgggctattcataacatcttccgcatgacagaatcccatctgatggtcaccagtcaatctttgaggttgatagatccacagactcaagtatcaagggccaattttgaacttaccagtgtcacacaatttgctgctcatcaagaaaacaagagactggttggttttgtcatccgtgttcctgaatccactggagaagaatctctgagtacatacatttttgaaagcaactcagaaggcgaaaagatatgttatgctattaatttgggaaaagaaattattgaggttcagaaggatccagaagcactggctcaattaatgctgtccataccactaaccaatgatggaaaatatgtactgttaaacgatcaaccagatgacgatgatggaaatccaaatgaacatagaggcgcagaatccgaagcataactcacttgcgcctgtgggggaagagcaaacaggaaggagagctacctcctaagggttttaacgtctctgacatacaggcacactgacctgatttccgaaggctgacaatcgtttgtggaatgtaatcttgatgccttgatactgagacttgggagggaaactaagaaatggttgacagcgttcccacccatctacaatgttattttaggtgctttgtggtaagtcttttttcttagattgcgctaaaatttcttagattgttcagcgctcagaacaaaagtttgaaaaatgcattgttcatatgaatgtcatctcttttcagtttccagtatcctttttaaaaaatggcaaaagcctagatttacaatttgatgaacactaaatatttcttattaatataatctatttttgtattttacttaatgagctttaagtgcctgtcgttctgaaaattgtgtatttataattcagcttatctcacaattggacctaatagcatttctttgtgcagttaggtgacgagcactgctttgaggcccaagcactagtagagatgcgcgatacaggtctagtttcggtaactgttccagacatcaagcaataaaaaaatgaataccacaaaagatgtttgattttacagtggagccttactgaaccagcattcagaagtttaaggtcctcctaggtatgagtatttttagtagtggatcactgtggacagggtgcagctctaccagttcctgtttcttctgagccagaccctcttcagggaagggaccaattaattttaaaactcacttgaagcacagctggtcatggggcttggtataaagttcctatttccaccctgatacttccaattcctggaaccccagcccactcccccatccctcctccctatcaaactagtataatgattttgaatcggtacagtgtgtttaactgtaactaagttcaacagactattattatctttgtaataaattaacctagcaataaaaattattctgtttctttaaaaaaaaaaaaaaattcctgcggccgcgaannnnnnn

SEQ ID NO: 23169 - DNA, 2298 bp, Homo sapiens
  misc_feature 1, 2, 3, 2277, 2278, 2279, 2280, 2281, 2282, 2283, 2284,2285, 2286, 2287, 2288, 2289, 2290, 2291, 2292, 2293, 2294,2295, 2296, 2297, 2298: n = A,T,C or G
nnnccgcaggcaggtcactgcgccatttcctgtccaagctgggcgaatcagggattccggttcacaatggatgctgataaagagaaagatttgcagaaatttcttaaaaatgtggatgaaatctccaatttaattcaggagatgaattctgatgacccagttgtgcaacagaaagctgtcctggagacagaaaagagactactgcttatggaggaagaccaggaggaggatgaatgcaggaccaccttgaacaagactatgatcagtcctccacaaactgctatgaagagtgcagaagaaataaactcagaggccttcttggcatctgtggagaaggatgcaaaggaacgagccaagagaagaagggaaaacaaagtcttggcggatgccctaaaagaaaaagggaatgaagcatttgctgaaggcaattatgaaacagctatcctgcgctacagtgagggtttggagaagctgaaggacatgaaagtgctgtacaccaaccgagcccaggcttatatgaaacttgaggactatgagaaggcactggtggattgtgagtgggctctcaagtgtgatgaaaaatgcacaaaagcatattttcacatgggaaaagccaacctggccctgaagaactacagtgtgtctagagagtgttataagaagatcttagaaataaaccccaagctgcaaacccaggtgaaaggttacctgaatcaagtagatcttcaggaaaaagcagaccttcaagaaaaggaagcccacgaactgctggattcaggaaagaacacagccgtgaccaccaagaacctcctggagaccctttccaagcctgaccagatccccttgttctatgctggggggattgagatcctgactgaaatgataaatgagtgcacagaacaaactttattcagaatgcacaatggatttagtatcatcagtgacaacgaggtcataagaaggtgtttttccacagcaggaaatgatgcagttgaagaaatggtctgtgtgtctgttctcaagctctggcaagcagtgtgcagcaggaacgaggaaaaccagcgtgtgctagtgatacaccatgacagggccaggctgttggccgccctcttgtcctccaaggtcctggccatccggcagcagagctttgccctgctgctgcatctcgcccagactgagagcggacggagcctgatcatcaaccaccttgacctgaccagattattggaagcgctggtgtcatttcttgatttctcggataaggaggccaacactgctatgggactgttcacagacttggctctggaagaaagattccaagtctggttccaggccaaccttccaggtgttctccctgcactcacaggcgttctgaagacagatcccaaggtaagcagctcctcggctctgtgccagtgcattgccatcatgggaaacctcagtgctgagcccactacccgaagacacatggcggcctgtgaggaatttggggatggctgcttgagcctcctggccaggtgtgaggaggatgtggacctgttcagagaggttatctacacactcctgggactcatgatgaacctgtgtcttcaggctccctttgtctctgaggtttgggctgtggaggtgagcagaaggtgcctgtctttactaaacagccaggatggaggaatcctgacaagagctgctggtgttctgagccggaccctttcttcctctctgaaaattgttgaggaggccttgcgagcaggagtggtaaagaaaatgatgaaattcctgaagacaggaggtgagactgcatcacgttatgctataaagatactagctatctgcacgaatagttatcatgaagctcgggaagaagtaataagactggataaaaagttgagcgttatgatgaagctgctcagctcggaggatgaggttctggtgggcaacgctgccctctgccttggtaactgcatggaggtgcccaacgttgcgtcttccctgctaaagacggaccttttgcaggtcttgttaaagcttgcaggcagtgacacacagaagacggccgtgcaggtgaacgcaggcattgctctggggaagctgtgcacagctgagcccagatttgctgctcaactgagaaagcttcatggcctagaaattctcaactctacgatgaaatacatcagtgattcttgagagagacagggtttgtgtgcatttggggaacacacagatgcacaccgtgtgttgttcctatgctaataaagacctttgatgtatccacttcannnnnnnnnnnnnnnnnnnnnn

SEQ ID NO: 23170 - DNA, 2306 bp, Homo sapiens
  misc_feature 2302, 2303, 2304, 2305, 2306: n = A,T,C or G
tatagggagtcgaccggcccacgcgtacgggatgaaggaggctgtgcctccgggttgcacgaagagtccgagtcatttctcagaaggttttgataggtgggccttagaggagacgccgccgagcaccgcaagaactggaaaacacacccctctctgtctgcctgggagagccacggaaattggcacttctctgagtgaagctgaggagaaggctgtaaatctgccaaaacagccttgaagtattcttttgtcatgaggaagtgacggctgctggagggaggtgaacaccacaaggagagatggcatctggcctgggccccgcctagcagcagctccacctcctaggccaggccctgtgggatgcgccactagaccaccatggacggatcccacagcgcagccctgaagctgcagcagctgcctcccacaagtagctccagcgccgtaagcgaggcctccttctcctacaaggaaaacctgattggcgccctcttggcgatcttcgggcacctcgtggtcagcattgcacttaacctccagaagtactgccacatccgcctggcaggctccaaggatccccgggcctatttcaagaccaagacatggtggctgggcctgttcctgatgcttctgggcgagctgggtgtgttcgcctcctacgccttcgcgccgctgtcactcatcgtgcccctcagcgcagtttctgtgatagctagtgccatcataggaatcatattcatcaaggaaaagtggaaaccgaaagactttctgaggcgctacgtcttgtcctttgttggctgcggttggctgtcgtgggtacctacctgctggtgacattcgcacccaacagtcacgagaagatgacaggcgagaatgtcaccaggcacctcgtgagctggcctttccttttgtacatgctggtggagatcattctgttctgcttgctgctctacttctacaaggagaagaacgccaacaacattgtcgtgattcttctcttggtggcgttacttggctccatgacagtggtgacagtcaaggccgtggctgggatgcttgtcttgtccattcaagggaacctgcagcttgactaccccatcttctacgtgatgttcgtgtgcatggtggcaaccgccgtctatcaggctgcgtttttgagtcaagcctcacagatgtacgactcctctttgattgccagtgtgggctacattctgtccacaaccattgctatcacagcaggtgcaatattttacctggacttcatcggggaggacgtgctgcacatctgcatgtttgcactggggtgcctcattgcattcttgggcgtcttcttaatcacgcgtaacaggaagaagcccattccatttgagccctatatttccatggatgccatgccaggtatgcagaacatgcacgataaagggatgactgtccagcctgaacttaaagcttctttttcctatggggctctggaaaacaatgacaacatttctgagatctacgctcctgccaccctgccagtcatgcaagaagagcacggctccagaagtgcctctggggtcccctaccgagtcctagagcacaccaagaaggaatgagactcgcctccctctatttataactgtcccctccaggctgacagtggttcaaccctgaatcctaaaacttgcctttcaagtctcattttgtttctaactgagaactctatggatgatgatctcaaaaagcctttgtctctgggaaaggatgcgttatcttggtcttggaaatttcaaatgatgagggttgggggatggaagcattattccaggtggacgggatagaatccagcctctgcctggattagcccagggggatttggaaagcctttctaccatccttgaggatggtaactgagcttcctctgacagtgaccaaaggatgctgtatccttcagagctaaggcaagacagagagtctgctgttaattctcaaatccagcgaaaggctggacatctctaaatctcgtcttcctccacctcatgtgcatgcctgatctcaccctgacactcctgatgccgcatctgtgatagcactcgtgttgccttcacatggcaggctgggccaaccctgggtggaaggttctgacatttgtgtttccgaatgtcatctgctcggttctctgtgcctctggagtgtgctgttgtcaatggtcttccttgacgaactggtttggccgtgggctcttttggcccctccccagatggattccagggcattggacgggggggcgttcctgaaaaggcccctccagggggcctannnnn

SEQ ID NO: 23171 - DNA, 1937 bp, Homo sapiens
  misc_feature 1, 2, 3, 4, 1919, 1920, 1921, 1922, 1923, 1924, 1925, 1926,1927, 1928, 1929, 1930, 1931, 1932, 1933, 1934, 1935, 1936,1937: n = A,T,C or G
nnnncgcggccgcgtcgaccgacagaagggtacggctgcgagaagacgacagaagggtacggctgcgagaagacgacagaaggcgacccacgcgtccggcggggacaactgggtcttttgcggctgcagcgggcttgtaggtgtccggctttgctggcccagcaagcctgataagcatgaagctcttatctttggtggctgtggtcgggtgtttgctggtgcccccagctgaagccaacaagagttctgaagatatccggtgcaaatgcatctgtccaccttatagaaacatcagtgggcacatttacaaccagaatgtatcccagaaggactgcaactgcctgcacgtggtggagcccatgccagtgcctggccatgacgtggaggcctactgcctgctgtgcgagtgcaggtacgaggagcgcagcaccaccaccatcaaggtcatcattgtcatctacctgtccgtggtgggtgccctgttgctctacatggccttcctgatgctggtggaccctctgatccgaaagccggatgcatacactgagcaactgcacaatgaggaggagaatgaggatgctcgctctatggcagcagctgctgcatccctcgggggaccccgagcaaacacagtcctggagcgtgtggaaggtgcccagcagcggtggaagctgcaggtgcaggagcagcggaagacagtcttcgatcggcacaagatgctcagctagatgggctggtgtggttgggtcaaggccccaacaccatggctgccagcttccaggctggacaaagcagggggctacttctcccttccctcggttccagtcttccctttaaaagcctgtggcatttttcctccttctccctaactttagaaatgttgtacttggctattttgattagggaagagggatgtggtctctgatctccgttgtcttcttgggtctttggggttgaagggagggggaaggcaggccagaagggaatggagacattcgaggcggcctcaggagtggatgcgatctgtctctcctggctccactcttgccgccttccagctctgagtcttgggaatgttgttacccttggaagataaagctgggtcttcaggaactcagtgtctgggaggaaagcatggcccagcattcagcatgtgttcctttctgcagtggttctttatcaccacctccctcccagccccagcgcctcagccccagccccagctccagccctgaggacagctctgatgggagagctgggccccctgagcccactgggtcttcagggtgcactggaagctggtgttcgctgtcccctgtgcacttctcgcactggggcatggagtgcccatgcatactctgctgccggtcccctcacctgcacttgaggggtctgggcagtccctcctctccccagtgtccacagtcactgagccagacggtcggttggaacatgagactcgaggctgagcgtggatctgaacaccacagcccctgtacttgggttgcctcttgtccctgaacttcgttgtaccagtgcatggagagaaaattttgtcctcttgtcttagagttgtgtgtaaatcaaggaagccatcattaaattgttttatttctctcaaaaaaaaaaaaaaaaaaaaaaaaaaaaaaaaaaaaaaaaaaaaaaaaaaaaaaaaaaaaaaaaggggggggggcccccaaaacccccgcggagggggagccccagacgatgcagcgacgctgccccacgacttgtgctgggatgaaaagagggggcccccccagatgagagggaggcgctcattaaaaacacggagagaccgacgcggcgacccacgaggtaacaacagcgcgcgggagcgcgcggaaacatggctctgcaggttgggaactcatggggaggaaccaaacaccacctcnnnnnnnnnnnnnnnnnnn

SEQ ID NO: 23172 - DNA, 604 bp, Homo sapiens
  misc_feature 1, 2, 3, 50, 562, 602, 603, 604: n = A,T,C or G
nnnccgtggaaagctttcaaacatagatcacacctatgcccaacatcagnaaaactcatacaggagagaaaccttatgagtgtaatgaatgcgggaaagccttcagccaaacttccaatcttactcaacatcaaagaattcatactggagagaaaccctataaatgtactgaatgtggaaaggcttttagtgatagctcatcctgtgctcagcatcaaagactccacactggccaaaggccctatcagtgttttgaatgtgggaaggcgttcagaagaaagttatccttaatttgtcatcaaagaagtcatactggagaagaaccttaagaatgtagtgcatgtggccaagcctttagttatcaccaatcccctactgttaatcagagatgtcccactggataaaaaacatataaatgtaagaaatgtagaaaaaccttcagccaggaggctggcaagatggccgaataggaacagctctgatctgcagttcccagtgagatcaacgcagaaggtgggtgctttctgtatttccagctgaggtacctggctcatctcattgngactggttagacagtgggtgcagcccacggatggtgagcnnn

SEQ ID NO: 23173 - DNA, 2224 bp, Homo sapiens; identical to SEQ ID NO: 21832
  misc_feature 1, 2, 3, 4, 5, 6, 2220, 2221, 2222, 2223, 2224: n = A,T,C or G

SEQ ID NO: 23174 - DNA, 1849 bp, Homo sapiens
  misc_feature 1, 2, 3, 4, 5, 6, 7, 8: n = A,T,C or G
nnnnnnnnatcaactttgcatgaataatgtgagtgcgcttggaaaagagacctcctgctccgcgggctcggggcaagagcccgcaggctaccttccccgggcaggggcgctcaacccaaccggctccagggcactggtaatttggctagaggaccgcgcggaggcagcgggatctgcgatttccttctggttggctgtcctgcgtgggtgccaagttccacacatgatttaatgaataagaaggagatgtcagtgaaaaaagggatccagaatgattactaacctataacccccaacagtatgacagaaaatggccttacagcttgggacaaaccgaagcactgtccagaccgagaacacgactggaagctagtaggaatgtctgaagcctgcctacataggaagagccattcagagaggcgcagcacgttgaaaaatgaacagtcgtcgccacatctcatccagaccacttggactagctcaatattccatctggaccatgatgatgtgaacgaccagagtgtctcaagtgcccagaccttccaaacggaggagaagaaatgtaaagggtacatccccagttacttagacaaggacgagctctgtgtagtgtgtggtgacaaagccaccgggtatcactaccgctgtatcacgtgtgaaggctgcaagggtttctttagaagaaccattcagaaaaatctccatccatcctattcctgtaaatatgaaggaaaatgtgtcatagacaaagtcacgcgaaatcagtgccaggaatgtcgctttaagaaatgcatctatgttggcatggcaacagatttggtgctggatgacagcaagaggctggccaagaggaagctgatagaggagaaccgggagaaaagacggcgggaagagctgcagaagtccatcgggcacaagccagagcccacagacgaggaatgggagctcatcaaaactgtcaccgaagcccatgtggcgaccaacgcccaaggcagccactggaagcaaaaaccgaaatttctgccagaagacattggacaagcaccaatagtcaatgccccagaaggtggaaaggttgacttggaagccttcagccattttacaaaaatcatcacaccagcaattaccagagtggtggattttgccaaaaagttgcctatgttttgtgagctgccatgtgaagaccagatcatcctcctcaaaggctgctgcatggagatcatgtcccttcgcgctgctgtgcgctatgacccagaaagtgagactttaaccttgaatggggaaatggcagtgacacggggccagctgaaaaatgggggtcttggggtggtgtcagacgccatctttgacctgggcatgtctctgtcttctttcaacctggatgacactgaagtagccctccttcaggccgtcctgctgatgtcttcagatcgcccggggcttgcctgtgttgagagaatagaaaagtaccaagatagtttcctgctggcctttgaacactatatcaattaccgaaaacaccacgtgacacacttttggccaaaactcctgatgaaggtgacagatctgcggatgataggagcctgccatgccagccgcttcctgcacatgaaggtggaatgccccacagaactcttcccccctttgttcttggaagtgttcgaggattagactgactggattcattctcataattcctacagcactactgggtgtcatttcattccattgcctagctcttttttgtttgtttctttgtgttgggagggattatttgggagggaaaagggaagtagtccttggcatagacatggatgaaattgccccttgaatgcgggtacctgcccgg

SEQ ID NO: 23175 - DNA, 2258 bp, Homo sapiens; identical to SEQ ID NO: 22170

SEQ ID NO: 23176 - DNA, 1405 bp, Homo sapiens; identical to SEQ ID NO: 22074
  misc_feature 1396, 1397, 1398, 1399, 1400, 1401, 1402, 1403, 1404, 1405: n = A,T,C or G

SEQ ID NO: 23177 - DNA, 3765 bp, Homo sapiens
  misc_feature 1, 2, 3, 3765: n = A,T,C or G
nnnaggccccccgcgtccgggcggcgctggagtcggcgcgggtgctggcgccatggaggccgagcggggtcccgagcgccggcctgcggagcgtagcagcccgggccagacgccggaggagggcgcgcaggccttggccgagttcgcggcgctgcacggcccggcgctgcgcgcttcgggggtccccgaacgttactggggccgcctcctgcacaagctggagcacgaggttttcgacgctggggaagtgtttgggatcatgcaagtggaggaggtagaagaggaggaggacgaggcagcccgggaggtgcggaagcagcagcccaacccggggaacgagctgtgctacaaggtcatcgtgaccagggagagcgggctccaggcagcccaccccaacagcatcttcctcatcgaccacgcctggacgtgccgtgtggagcacgcgcgccagcagctgcagcaggtgcccgggctgctgcaccgcatggccaacctgatgggcattgagttccacggtgagctgcccagtacagaggctgtggccctggtgctggaggagatgtggaagttcaaccagacctaccagctggcccatgggacagctgaggagaagatgccggtgtggtatatcatggacgagttcggttcgcggatccagcacgcggacgtgcccagcttcgccacggcacccttcttctacatgccgcagcaggtggcctacacgctgctgtggcccctgagggacctggacactggcgaggaggtgacccgagactttgcctacggagagacggaccccctgatccggaagtgcatgctgctgccctgggcccccaccgacatgctggacctcagctcttgcacacccgagccgcccgccgagcactaccaggccattctggaggaaaacaaggagaagctgccacttgacatcaaccccgtggtgcacccccacggccacatcttcaaggtctacacggacgtgcagcaggtggccagcagcctcacccacccgcgcttcaccctcacccagagtgaggcggacgccgacatcctcttcaacttctcacacttcaaggactacaggaaactcagccaggagaggccaggcgtgctgctgaaccagttcccctgcgagaacctgctgactgtcaaggactgcctggcctccatcgcgcgccgggcaggtggccccgagggcccaccctggctgccccgaaccttcaacctgcgcactgagctgccccagtttgtcagctacttccagcagcgggaaaggtggggcgaggacaaccactggatctgcaagccctggaacctggcgcgcagcctggacacccacgtcaccaagagcctgcacagcatcatccggcaccgagagagcacccccaaggttgtgtccaagtacatcgaaagtcccgtgttgttccttcgagaagacgtgggaaaggtcaagttcgacatccgctacatcgtgctgctgcggtcagtgaggcccctacggttgttcgtgtatgatgtgttctggctgcggttctccaaccgggcctttgcactcaacgacctggatgactacgagaagcacttcacggtcatgaactatgacccggatgtggtgctgaagcaggtgcactgtgaagagttcatccccgagtttgagaagcaatacccagaatttccctggacggacgtccaggctgagatcttccgggccttcacggagctgttccaggtggcctgtgccaagccaccacccctgggcctctgcgactacccctcatcccgggccatgtatgccgtcgacctcatgctgaagtgggacaacggcccagatggaaggcgggtgatgcagccgcagatcctggaggtgaacttcaaccccgactgtgagcgagcctgcaggtaccaccccaccttcttcaacgacgtcttcagcaccttgtttctggaccagcccggtggctgccacgttacctgccttgtctaggcactcgctgtccccaaaacctgtgcttggggcaggattccaacctcagttctctgagctgcttctgcaaaggcccccatgtccctccccacaccggccctgggcatagcctcagccccaggcctctgtcctgccgagccatcctcccggcgccacactccgggagcacagcatcctcctctcacctgtgggtcagagcaggacagtgatggtgtccccagggctgagcaccaccccacgccctgccctcacccctcaccaccatctgtgcactgatgagtctccagtttagccaagggctttgttcctggcatggagaatttgttcctggctgctgtgtttccagggggtgctgggggaagggttccgtggagcgagacaaggtgtcctcgggagcagggttccaccgggaagcgtttgggagccctgtatcacacggggcaggcgggtttctcttccggggtctctgctcttatgcatcaggacgaccccgggacggctgtggggccccacactgcacccacagggctctatgcgacaggggcccaggaacagcctgaggccaccacccagcaagcccgccttatcacccattccagctcacccagaaccttcaccagcaaacctcctgctgaggtcctggcaggaggccaccgtcttgttaccgtttccttttcgtttgctgagggtcacagaccccaacagggaaatcagtatctgtcttcccagtggttgccctgctcgccgggcactccacggggtcccgcccttgtgtgagatgggccaggatccttcggcaaggggcgcctggggctggggctgattgtgggcggtggagcgccagacagaaaaggattccaatgagaacttcaggttaaagtcagatgccacctaccagggtctacagtcaaaatgttggctttttcttattttttaatgtatgggagaaaaatgtaaaattccagttcttttctaattgtgtttctgaaattaggagtcagctgccagcgtttttgtgtggctgcagtgtgcctgggcccagctcacgggcagtgggtggacctaactgcccaggcaggcgagagctacttccagagccttccagtgcatgggagggcagggctaggtgtagcggtgtctcctctttgaaattaagaactatctttcttgtagcaaagctgcacatgatgatgctgcctctcctctctgtgttgtctgggcccttgtttacaagcacgcgttacccttcctgaggggagccatgctctagcccctggagggcctgttgcaggggcagggcgggcccgttgcctttggcagctcctggagagctgtggacatgcagtccccctcagttcgtgctgcaataaaggccatcttctcttatttctgccctcctttctctttggaccctggagccacaggctcagcctggcctgtcgccccggctgtcactgaaaagccccggataccaagaagtcacccacaaaaagtgggagaagaaataagatggcctttatatcgcaggcctccaccccacagtctgatttccatgtgctggatctgtttccaagtcggccgggagcctcggtcctcgagtggccccgcagctctagtggccctggagatagcggcctccccacacttgcctccttgtccctggggtggggacggtggagaaacccttgctgctggggcgtctgcagggccccctcgggccactgttgagcaggtgcattggacacctcagtgggtgggaaacagcgccacatggtgan

SEQ ID NO: 23178 - DNA, 1616 bp, Homo sapiens
gcgtccgcggacgcgtgggccgccaccgtcgtccggcaaagcctgagtcctgtcctttctctctccccggacagcatgagcttcaccactcgctccaccttctccaccaactaccggtccctgggctctgtccaggcgcccagctacggcgcccggccggtcagcagcgcggccagcgtctatgcaggcgctgggggctctggttcccggatctccgtgtcccgctccaccagcttcaggggcggcatggggtccgggggcctggccaccgggatagccgggggtctggcaggaatgggaggcatccagaacgagaaggagaccatgcaaagcctgaacgaccgcctggcctcttacctggacagagtgaggagcctggagaccgagaaccggaggctggagagcaaaatccgggagcacttggagaagaagggaccccaggtcagagactggagccattacttcaagatcatcgaggacctgagggctcagatcttcgcaaatactgtggacaatgcccgcatcgttctgcagattgacaatgcccgtcttgctgctgatgactttagagtcaagtatgagacagagctggccatgcgccagtctgtggagaacgacatccatgggctccgcaaggtcattgatgacaccaatatcacacgactgcagctggagacagagatcgaggctctcaaggaggagctgctcttcatgaagaagaaccacgaagaggaagtaaaaggcctacaagcccagattgccagctctgggttgaccgtggaggtagatgcccccaaatctcaggacctcgccaagatcatggcagacatccgggcccaatatgacgagctggctcggaagaaccgagaggagctagacaagtactggtctcagcagattgaggagagcaccacagtggtcaccacacagtctgctgaggttggagctgctgagacgacgctcacagagctgagacgtacagtccagtccttggagatcgacctggactccatgagaaatctgaaggccagcttggagaacagcctgagggaggtggaggcccgctacgccctacagatggagcagctcaacgggatcctgctgcaccttgagtcagagctggcacagacccgggcagagggacagcggcccaggcccaggagtatgaggccctgctgaacatcaaggtcacagctggagggctgagatcgccacctaccgcccgcctgcctggaagatggcgaggactttaatcttggtgatgccttggagcagcaagcaactgccatgcaaaccatccaaaagaccaccacccgccggatagtggatggcaaagtggtgtctgagaccaatgacaccaaagttctgaggcattaaggccagcagaagcagggtaccctttgggggagcaggaggccaataaaaagttcagagttcaaaacaaaaacaggggggcgtcttaagtcctggggcgccagttagcgtacagttttgtcaagggcttatggagtgataaacaggaaggggggtaaacgggaggaaagacgggttggaagcatactggggaatggaaaccaggtaagaggatattggtaggacgttgcggagtgcataac

SEQ ID NO: 23179 - DNA, 1996 bp, Homo sapiens
  misc_feature 1, 2, 3, 1987, 1988, 1989, 1990, 1991, 1992, 1993, 1994,1995, 1996: n = A,T,C or G
nnncaaataaagaacatggtgaaactgattcacacattagctgatcatggtgacgatgtcaactgctgtgccttctccttttccctcttggctacttgctccttggacaaaacaattcgcctgtactcgttacgtgactttactgaactgccacattctccattgaagtttcatacctatgctgtccactgctgctgtttctccccttcaggacatattttggcatcgtgttcaacagatggtaccactgtcctatggaatactgaaaatggacagatgctggcagtgatggaacagcctagtggcagccctgtgagggtttgccagttttccccagactccacgtgtttggcatcaggggcagctgatggaactgtggttttgtggaatgcacagtcatacaaattatatagatgtggtagtgttaaagatggctccttggcggcatgtgcattttctcctaatggaagcttctttgtcactggctcctcatgtggtgatttaacagtgtgggatgataaaatgaggtgtctgcatagtgaaaaagcacatgatcttggaattacctgctgcgatttttcttcacagccagtttctgatggagaacaaggtcttcagttttttcgactggcatcatgtggtcaggattgccaagtcaaaatttggattgtttcttttacccatatcttaggttttgaattaaaatataaaagtacactgagtgggcactgtgctcctgttctggcttgtgctttttcccatgatgggcagatgctagtctcagggtcagtggataagtctgtcatagtatatgatactaatactgagaatatacttcacacattgactcagcacaccaggtatgtcacaacttgtgcttttgcacctaatacccttttacttgctactggttcaatggacaaaacagtgaacatctggcaatttgacctggaaacactttgccaagcaaggcgcacagaacatcagctgaagcaatttaccgaagattggtcagaggaggatgtctcaacatggctttgtgcacaagatttaaaagatcttgttggtattttcaagatgaataacattgatggaaaagaactgttgaatcttacaaaagaaagtctggctgatgatttgaaaattgaatctctaggactgcgtagtaaagtgctgaggaaaattgaagagctcaggaccaaggttaaatccctttcttcaggaattcctgatgaatttatatgtccaataactagagaacttatgaaagatccggtcatcgcatcagatggctattcatatgaaaaggaagcaatggaaaattggatcagcaaaaagaaacgtacaagtcccatgacaaatcttgttcttccttcagcggtacttacaccaaataggactctgaaaatggccatcaatagatggctggagacacaccaaaagtaaaattgttgatattgtattatttatattttcagtgatctcatttgaatgatttataggtaaatactaatcagacattattaaaagcaaaacaggaaaaaggtaaacttcttaaatttagttacctataaaaattgtcaattttcattctttaaaaacacatggacttactataaaagcctttttgtactagtgaaaagaatcttcagctatatagaaataaagttatactttaaaaaaaaaaaaaaaaaaaaaaaaaaaaaaaaaaaaaaggggggggggggaaaaagtacccccgggggggccaaagtttacgctgacacccgggtttctcttggcaccaagggggcgcccaataaagggagggcggaataaataaggaaagagagagagggcgggagggtaaacacaaccggcgcggagcggggaacacctcggcgcgtcgggacctggggaagggaccctactccggcgggggcgcaatatttcggagcacacccacaggagataacggccaagggaaacaataactatcccgcgtgcnnnnnnnnnn

SEQ ID NO: 23180 - DNA, 1719 bp, Homo sapiens
  misc_feature 1703, 1704, 1705, 1706, 1707, 1708, 1709, 1710, 1711, 1712,1713, 1714, 1715, 1716, 1717, 1718, 1719: n = A,T,C or G
ccacgcgtccgcccacgcgtccgttgtatttttattcaatacggggttctccatgttggtgaggctggtctcgaactcccgacctcaggtgatccacccatcgtggcctccaaaagggctggaattacaggcatgagcaactgtgcctggcctttataagtacaagttcttaagtgagtccttgtacactcataataagtatggtgcagtagagtcttagttatcctgttccctgaccaggtagtatgtgtacagtggggacacatttctatagttgcttcttctaccatggttaaggagggtgacaacagcaaaacagtgtacagcatgttcatatccagcaaggacagaagagggccttgcctggcagaggaggttgagcacaacgacagaacaataataaaacagttagtattacaaggaaaactactagtcttaagatttctaaccacatttacttgcttgacgagtcctcaagcttcggccgtgcgtagactagtcagcttctggtgtgtgactagagctgggcttgtcgtcccctccagcttcagctgtgcatagactggtcagcctccagagtgaccagagcagggctgtcgtcctcagcagcagcttggtctcatctcaggatcggctgagttggatgatctgggtcttgctggctgttccacttgtcctgaactgctggtttcagctgactgtggtggacctatggcatgattcctgcaaatttaacagcagtgggagtggacaagaatacagtacagggcccatcctatatgagtcctagagaagttggattctactttttaacctaaacagagtctccatgttgaaaggggtgtacttgatctgtcagacttataggcattctttcttgtattcagttatggacttcttgcatggctgttcttaaagcctgcatttgcttgcttaaagttaattcctctagttcttggagatcacctttaatttgacttatgattagggcaggccgactgaacaaactctaataaggtgaatacctagtttgtttggtgggggtgcacctgacttggaggaggaccatacgaaagagctgatcttatctcagatgagtttcttggcagtatttcttcagtagctgcttgagtgtccagttcatgcgctttactttccttgaactttgtgactgatagtctgtgtgtaacttctattttatttttagcagacttgtgaaatcttacactatttcagctacgaatgctggcccattgtctgattttaaaggtagagccagtccaaacctggggataatgtcttttatcagtactttagttacttcttgcacttttcccctggtggagaaagccttaacttatcttgaaaaggtgcaaataagcaatagcatatacccatagcctctggcacggggcagttcggtaaagtttataagcaagttttcacaaggcacggctcctaattcttgaattcttggggctgagtgggcccctgtcgtgggttattctcagcacaggttaatcattgttcacaaacatcttgagtgacagcagagagccacggcacatagaaatggcactttcgtgacccagcgcagtggctcatgcctgtaatcccagtactttgggaggctgaggcaggcagattatgaggtccagatttgtagaccagtctgaccaacatggtgacaacccatctctacnnnnnnnnnnnnnnnnn

SEQ ID NO: 23181 - DNA, 2140 bp, Homo sapiens; identical to SEQ ID NO: 23140

SEQ ID NO: 23182 - DNA, 452 bp, Homo sapiens
  misc_feature 113, 114, 115, 116, 117, 118, 119, 120, 121, 122, 123, 124,125, 126, 127, 128, 129, 130, 131, 132, 133, 134, 135, 136,137, 138, 139, 140, 141, 142, 143, 144, 145, 146, 147, 148,149, 150, 151, 152, 153, 154, 155, 156, 157, 158, 159: n = A,T,C or G
  misc_feature 160, 161, 162, 163, 164, 165, 166, 167, 168, 169, 170, 171,172, 173, 174, 175, 176, 177, 178, 179, 180, 181, 182, 183,184, 185, 186, 187, 188, 189, 190, 191, 192, 193, 194, 195,196, 197, 198, 199, 200, 201, 202, 203, 204, 205, 206: n = A,T,C or G
  misc_feature 207, 208, 209, 210, 211, 212, 213, 214, 215, 216, 217, 218,263, 264, 378, 391, 392, 403, 404, 452: n = A,T,C or G
acgcggggagtcagtgtcagcccgaaggctgaaggaaaaagagcaacagatccagggagcattcacctgccctgtctccaaacagagccaccaaggaggagcaggggagcgannnnnnnnnnnnnnnnnnnnnnnnnnnnnnnnnnnnnnnnnnnnnnnnnnnnnnnnnnnnnnnnnnnnnnnnnnnnnnnnnnnnnnnnnnnnnnnnnnnnnnnnnntggttccctttagctgagggttaatatggcgcgctctgcgcgtannatcatgtgtcagtatgctgttttccctgtgggtgaaattgggttatccgcgttcagcaattccacgacaatcatatcgatgccgtggagcccataaagtgtaaacgcctgggtnggttgcctaatgnnagttgagctannactcacattaatttgggcgtttgcgctttcactgcgccgcttttccan

SEQ ID NO: 23183 - DNA, 2676 bp, Homo sapiens; identical to SEQ ID NO: 22754

SEQ ID NO: 23184 - DNA, 3634 bp, Homo sapiens
  misc_feature 3630, 3631, 3632, 3633, 3634: n = A,T,C or G
gtccgcttgacgtggcgtcaccgccctctaccctcgctttgcgtgcgtgtttgcgtacagcggaggtggcggcgcgggcaggtcggagctcggagctgctgcttctggttctcttgtggccgccgtcgctgtccggctgccttgggctgccgaacagacaaggcgtgggccacagcacctcagaagccgacgcagctcgacgcaggggccggcaggagggtgggcgatcgcgtgtcggagggcgccgcgcgggcaggcgggcgggcgccagagggggaaagaggcgggggcggcgggtcagccgctggccgggccggccggggaatgtcgatgcctgacgcgatgccgctgcccggggtcggggaggagctgaagcaggccaaggagatcgaggacgccgagaagtactccttcatggccaccgtcaccaaggcgcccaagaagcaaatccagtttgctgatgacatgcaggagttcaccaaattccccaccaaaactggccgaagatctttgtctcgctcgatctcacagtcctccactgacagctacagttcagctgcatcctacacagatagctctgatgatgaggtttctccccgagagaagcagcaaaccaactccaagggcagcagcaatttctgtgtgaagaacatcaagcaggcagaatttggacgccgggagattgagattgcagagcaagacatgtctgctctgatttcactcaggaaacgtgctcagggggagaagcccttggctggtgctaaaatagtgggctgtacacacatcacagcccagacagcggtgttgattgagacactctgtgccctgggggctcagtgccgctggtctgcttgtaacatctactcaactcagaatgaagtagctgcagcactggctgaggctggagttgcagtgttcgcttggaagggcgagtcagaagatgacttctggtggtgtattgaccgctgtgtgaacatggatgggtggcaggccaacatgatcctggatgatgggggagacttaacccactgggtttataagaagtatccaaacgtgtttaagaagatccgaggcattgtggaagagagcgtgactggtgttcacaggctgtatcagctctccaaagctgggaagctctgtgttccggccatgaacgtcaatgattctgttaccaaacagaagtttgataacttgtactgctgccgagaatccattttggatggcctgaagaggaccacagatgtgatgtttggtgggaaacaagtggtggtgtgtggctatggtgaggtaggcaagggctgctgtgctgctctcaaagctcttggagcaattgtctacattaccgaaatcgaccccatctgtgctctgcaggcctgcatggatgggttcagggtggtaaagctaaatgaagtcatccggcaagtcgatgtcgtaataacttgcacaggaaataagaatgtagtgacacgggagcacttggatcgcatgaaaaacagttgtatcgtatgcaatatgggccactccaacacagaaatcgatgtgaccagcctccgcactccggagctgacgtgggagcgagtacgttctcaggtggaccatgtcatctggccagatggcaaacgagttgtcctcctggcagagggtcgtctactcaatttgagctgctccacagttcccacctttgttctgtccatcacagccacaacacaggctttggcactgatagaactctataatgcacccgaggggcgatacaagcaggatgtgtacttgcttcctaagaaaatggatgaatacgttgccagcttgcatctgccatcatttgatgcccaccttacagagctgacagatgaccaagcaaaatatctgggactcaacaaaaatgggccattcaaacctaattattacagatactaatggaccatactaccaaggaccagtccacctgaaccacacactctaaagaaatattttttaagataacttttattttcttcttactcctttcctcttgatttttttcctataatttcattcttgttttttcatctcattatccaagttctgcagaccacacaggaacttgcttcatggctctttagatgaaatagaagttcagggttcctcactctagtcactaaagaaggattttactctcccagcccagaaaggtgattctttctttaccatttctggggactttagtcttaattaggtaccttattaacaggaaatgctaaggtaccttctctgtggaacaatctgcaatgtctaaatcgccttaaaagagcccatttcttagctgctgaaatcagtgctctttcacttcttcagagaagcagggatggtacctacccggcaggtaggttagatgtgggtggtgcatgttaatttcccttagaagttccaagccctgtttcctgcgtaaaggtggtatgtccagttcagagatgtgtataatgagcatggcttgttaagatcaggaggcccacttggatttatagtatagcccttcctccactcccaccagacttgctcatttttcgagtttttaactagactacactctattgagtttaattttgtcctctaggatttatttctgttgtccaaaaaaaaaaaaaaaaaaatctgcccccttccgggccattcgggggtacccggctgagcaacttgatgtgacaggggctattcgttcccaatgctcccttatgacccttggcgactggatgctgtttaaagaactcgtatctataccgtgtaagtcctcggtttcaacccgatcttgccttcttacgtgtcacaagaatctttcgggtcaaagttggacagcgattggccatccgacgcggccacagtcatttagcctgaggctgtcacctttgtcgtgcggatcgagcattatactttagtttttcttttgtattgagcctccctagctacagcagcctctcctggctgccacaccactcacagcccttctcagctctccgccgagtaagatacccagggctatccgtagctcgtcagcttgagcctacgctccaccaggccacctccccgcctcatcaccacttcagtcctaccacctcccatcacgctacactcctaaacattctacctaaccactactctattatctctatatactaatatcagcaatctatctatataagattcctaatcatcaaaaattacaccaacatctagtacctgttcaaccccactcatcattcttctatcccctatacccttacttcgctaaatccctactccttcaaccactttacacatcctctctcttctaaactacacaaaccgggccggaggtaggagtgcgggtggcgagcgacgccaggcacccgcgcgtcgggctctcgcgggggagcaccgggcgctgtgaccgctgaaacggcgacgcccccccgacgcggcgcgatagtcacttcaactacataaccctagatcatcttaagccgtcatagccttctacacatacagtatcattcacttccgttacctaagctcaccacaactccccatcttgttctccctatcaaacttcttctatatacttctcactctccctatccctcaccctctcacaccatactactgattatagaacannnnn

SEQ ID NO: 23185 - DNA, 681 bp, Homo sapiens; identical to SEQ ID NO: 20120
  misc_feature 1, 2, 12: n = A,T,C or G

SEQ ID NO: 23186 - DNA, 652 bp, Homo sapiens
  misc_feature 1, 2, 3, 4, 177, 651, 652: n = A,T,C or G
nnnnccattgtcctgcccgtttatgcggacttgttctaaggccgaggagcctgtgttggaagagatggtgatgggcctgggcgttttgttgttggtcttcgtgctgggtctgggtctgaccccaccgaccctggctcaggataactccagggaccctctttgttttttttttttttnaacagtctgtgctgaactcctctagtgaactttttagttaagttactacattcttctccaaaatttctgttcagttcttctttatattttctctttgttaatattctctttgttaaaattctcattttcttcatgcataattttcctgagctcattaagcatctttatgacaatagttttgaattccttgtcaggtaattaatatagccccttttctttagggttggtttctgaaaatttattttgtacctctgattggactatttttctctgattctttgtgctccctctaattttgtgctaatatccacacattaaaaacaacaacaacaacaaaaacaattacctctccagtctctaaggactggcttcatacagagaaagagaccttcattaatcagcctggctagagatgctggaggcctctcaaaccttttctatggaagtgtcttctctggacttatgcagtcgacnn

SEQ ID NO: 23187 - DNA, 1120 bp, Homo sapiens
  misc_feature 1, 2, 1120: n = A,T,C or G
nncaaggtccaaagaaggtgaaggaatcctgatactgagcggtccttaatgcaagtcggttatgcctgtaggttgaaaggcatcagggaggaaaatggccgcagcaaggagaggcggcggcggcctcggctgaagaaagaaggtgggagcggagagcgcaggcgtgaaatcttcccaaggctgcagacaccgacggatttgctttgggagccagagtagctgccgccaccagagtccggagccatgagcagggtttaattttggaggcactggggcccctacaggcgggttcacgtttggcactgcaaagacggcaacaaccacacctgctacagggttttctttctccacctctggcactggagggtttaattttggggctcccttccaaccagccacaagtaccccttccaccggcctgttctcacttgccacccagactccggccacacagacgacaggcttcacttttggaacagcgactcttgcttcggggggaactggattttctttggggatcggtgcttcaaagctcaacttgagcaacacagctgccaccccagccatggcaaaccccagcggctttgggctgggcagcagcaacctcactaatgccatatcgagcaccgtcacctccagccagggcacagcacccaccggctttgtgtttggcccctccaacaactctgtggctcagctaccacatctggaggcttctcattcactggtggaagcacggccaaacctccggttcacattgggtcagcagggaattcagccagcccacggcactgcacgtagcccttcactcaggcagcccagaagcaccaaagcaggtgccacaaagccaggctgctcccaaacgacaaggcacattatcagaacgggaggccagacctactaggcggtcacacacgaacgtgtccacaacgcgcctgtgcacacctgtggagcctcctctgggacccctggtccccaagggcggggccccccgggtcggaacacgcggtacagatacagggaactgagcaggacggcagatcacaaagacaacaagcggggcacgagcacgaaaacaaaaggagaggaagcagcagcggcggtcatcatgagcatgacn

SEQ ID NO: 23188 - DNA, 3638 bp, Homo sapiens
  misc_feature 1, 2, 3, 4, 5, 6, 7, 8, 3628, 3629, 3630, 3631, 3632, 3633,3634, 3635, 3636, 3637, 3638: n = A,T,C or G
nnnnnnnncagcttaaaggcgatattttaacatgtttatagatactacttgggggagggcagctaatgaaaccttcaagctctatgcagtccacagacgtgagctctgtagagttcgcagaggtgggtaagtacccagccagcacacccagttgaattcagccaggatttattgagttggcatcacggacgctgacagcctccaagtgaaaacccttctcttgaatatgtacaggtttcccatccacataccaagctgatgaggatcccatcgttcttccccagtcctgaggagcccccctcgccatctgcaccttccatagccaaatcagggtcattggactcagaactttcagtgtccccaaaaaggaacagcatctctcggacacacaaagataaggggccttttcacatactgagttcaaccagccagacaaacaaaggaccagaagggcagagccaggcccctgcgtccacctctgcctctacccgcctgtttgggttaacaaagccaaaggaaaagaaggagaaaaaaaagaagaacaaaaccagccgctctcagcccggtgatggtcccgcgtcagaagtatcagcagagggtgaagagatcttctgctgaccctcttcctctctgctgaggcagctgcctcctgatcctggccagcccacctctcctgctgtccccgcgtgcacaagtctcttacactggacgcccactgctcctcagcgtccagtcctcctgggcggccccaggtcctggacaataagcaacagatgatattgagtgtcgggtggggaaggaggcccagactctgcttcggccatgatttgtgactgcccaggactctcaggttgggctggccctactcaggattacactgaaagtaatggcctcgtaagtacaggtgatggttttggacacgtcaggaattcctaaaggctgaaagagtgtatccaagtaaggtctgaacctccgactgccttttatttgggggaacacaaaaccaaacagcagatgttttggacttgatctgtgtacgtacatggggacctgtctgcatatacacacggggaatgccagaagaaggcccagtctgcaccaggcgtctggtcaacttagcacaagggcagtgcctggacggacccggagcccccgcatatcagcagttcacccagtactcctcagagactggtttccctctaaacccatcccgggcacataccacccctgttttgcatgtatttctcatttcattttagggatgacaaacatttgtgaaaccagtgagagaaggcttgatgtgtataaaagacgtgatgtgcaccacctcgatctcggtgtttcaggcactaaagcaacaaaacaacccatagtatctcattttgtcatcagatccagaagaaatatcctggttttccagcatgtttacccacatgttttgggcatggataaagtgaagaggcctactcaccattatccctgcagcgtgacaccttttgattgtcactgaccactcagaaggggccacggcctcctggctgtgttcctgagcccccgtcgtgcctctcccagacagcagctgtctggcccttgctgggtgagggcacaccactgccaggggtcagcctcgcacccaggccaggcagaagctgtgctctgaagctaggacagctggctgagaagtgggttcaggcgaagggtgaagccatgtgtagcagttcctgccagtgcagatctggagaggagctggcccggaaggcgtggttgtgaaagcgcccttcttatgttaggaggccttggcaaaattggatttcttcaaaaatacatgtaaaggtctgttgttgaattgtactctgcccctggaagcagatacagatggctgcctgctgctcggctttgcttttgcttttcccaccgtgttttcatctttgttcacttgaggctttccccagctggtgtgtgcaggacagttcatggtaatgttgccctctgaggccccgtacaccagaagggaggccctggaaaattttgtgcttccaacgtggccttcaattcttgcttttttgcccctcggaagcatggggcttttgagcacacttaaaaaaagaaaaatctgtaacttggtgcttattgatgaattgcaagctggccttgcagatggagatatttatctttcagtttatttgaaagaggtctggtttaaaatttgtagcctacatttgttttatttattgtatttgtgtgtttgtgtttgtttttttttaagggtgagccaggtctagcccaacagtctaaactatccagtcaataccgagtgaagtggcagccagcactgttcactctgtgtcttttgaagtgccttgaaggcccagatgaaattttaaagggagggggtccatgtccttccctcccccaccccgcctcattctttaatcaaaggatgtcttctcccttgtttgagaatgaagaaactcgccacctctgacctacctttgcctttttctgtcatggagaatactcacccttcagaaacagaccaaaggccaaaacctgctgatttttctattgaaaatatgtccccttgcaaagaccctaaacaaaaagttaagtttctttctttcacctatttgtacaactccaagttacagctgaatctgtcgtgactttcctgagatctacccggggcttggctgtctgttctgggcactggctccgagttcccctcctgggatttgcaggagggcagtactgaacctgcattcttctccttgtaaatgtaggccgggtgcccctgttctccgggtttggaacaatacgaggttggtgctgatgggatttacttgcgtacgtgctcttcacaaaaacaccgtggatgctgaagttagagcacgtcgccacagagcttgacatcaatgttagagggtctcttactccccgcccagctgtgatgtttcatctgctttggttgttttggtggtcttttttaaaaatagagatttcacatctgcccagaccccactcaaaacgatttggtcaggttctggttggacaagtttaaaatcaaagtagtgcccggaattccctcaaaccacccaacttcatccaggaatacagtctgcagtgcagcaacagaaccgcttaccaagaactgtgcttacatacctttgtcatctctcttccccccttggaagttgtcctcagggggatttgttcctgtcctggggatttacctgggatggtggctgcctgtgcttttgctcatggccttgacagtgctctagttgctggatctaatggcctgtcttggtttctatcacatgagaaggggttgtttttttggggtgactcggactgaattccccatactgtttccacgccgggacaccatgttctccatcaagctaaagaaatcacgtgcctgaaactgtgcttaagttttgggggaaagatggagttcctatccagagcccccagatttccagaatcgagtgagcttcctggaaggagactgcgtcttctctcaattccagtcatctcagtcgttgtcgttaggtgacatgtgcactttaaatgctctcatcggttggcttcattttcaagacaatcaaatgtattgactgtgttttcnnnnnnnnnnn

SEQ ID NO: 23189 - DNA, 888 bp, Homo sapiens
  misc_feature 887, 888: n = A,T,C or G
tcgacccacgcgtccgccagccgtggcctctccccctccactagacacgctgaagggactgggtacgtgttttccttcaggaccagagctgagaggagctgggatcgcggcggcaatggaacgggcctcagaaaggcgcacggccagcgcgctttttgcggggttccgggccttgggacttttcagcaacgacattccacacgtggtgcggttcagcgcgctcaagcgccggttctatgtaacaacctgcgtgggcaagagtttccacacctatgacgttcagaaacttagtctggttgcagtaagtaattctgttccacaggatatctgctgtatggcagctgatggcagattagtctttgctgcttatggaaatgttttctctgcatttgcccgtaataaagagatagtacatacctttaagggtcataaggcagaaatccatttcttgcaaccctttggagaccacattatctctgttgatactgatggcattcttattattggcacatatattcagaagaagaatacctgcagttgacttttgataaatcagtatttaaaatttctgcaatttgcatccaagtacctacttgaataaaatacttctgggcagtgaacaaggaagcctgcaagttgtgcgcatgtaacatccaataaacttctatatacatctccaggatggacaagttggagttgccagcctcttcaagcaggcaccagccgggatgtgtggcattggctaggtcgggcagttatcatcgcaccataatttatgaaccttaagaagttcggcagaatggggccattcttcatcatatgcacagaggtcacgtatggactggaccagggccatgggctggctcagagatgaatccagaataccnn

SEQ ID NO: 23190 - DNA, 2254 bp, Homo sapiens
  misc_feature 1, 2, 2252, 2253, 2254: n = A,T,C or G
nnaaaataaaaatgtttccaatggccacttcttatctgatcatcattcaagcctttttattggtttgtccttccccgattaccagccgaatcctgaagagacactactacaacaaaatggaacacaagaagaaataaaatgtatggatcaaataaagaaaattgaaacaactggttgcaaccaagaaataacatcatttgaaattaatctgaaggaaaaaaagtaccaggaggactttaacccgctggtgagaggatgttcctgttactgctgtaagaatcacactcgggcatacatccaccatctgctggtgaccaatgagctgctggccggagtcctgcttatgatgcacaactttgaacactactttgggtttttccattacatccgggaagcactaaaaagtgacaaactggcacagttgaaagagctcatccacaggcaagcatcttgagatcttgcaaatacaagtctcactcttcacactgagcctgtaccactgttgtaacatgggaagacgtgaagaagaaataatctgagctttaattatttatatttggatataaggtctgcttaaataaagaatctttgtaccaaactgcccacatgagggtgaagagatttcctcaaaagacttaaatgacctggattgatcagagagaattgaactgtgacctttaaaacttctagactaattcttttagttgatagagattcatttagtcaaagacaaaagctttaactgtgagggcacagccttgaagtgggagtgatgagattctgagggacccatgaattggattgaggcttgaggggaaatggtgtgagacgaatgggctctggacatatgcctgttgatttgagaagaaatctggctggtttgagggtttcctttagttcaccctcatactctcaggagactcttctggatacttttgtcttccaccctgccctggcagtgcagccaatcagaaatggctcttgtgacttaactgggcttggatatccctggaatgtggggcttgaacattgctcctgtgatgatcatctgtcccaggtcacactccttcatttgaccacatggcctatttgcaacttctttttagagccaatgtaattgcctgttaggagccagaagtttgcccagctgctttcttctggttgtacagatccattgtggtctgccttccaggctcattaatagtctaactacgtaataactgaagacctatctcttgtgaagattcattctcaatgtgttcacttggacagagccctgcctggcctaacgattagagggttagtctccatcctgctcagatatgactcctgggcaattcacttaacttctccatggctgcttcctgctgaataaatagggacaggcataatggataggaatgaatgaacttttaagatactgtctagctctaaaattggaagaacaaaaagttttagattagagtcatagccttaatagccctagttgtcatcctgggagacaggcaacagtagagatatttgagagcctaaagagaggtttggcctgtgggtttttaagtggttattgaattggtatcaggagatcctgaggctggtaggggaaggtaattctttctaagttacctctgtatttttcaagttttctataaggaatacacatacacccacatgcacacaccatagtttttatacaaacagcaataacaaaaccaaaaagatgcccctttttttgtagggataagaaatacatttgttttatacttctatgctatattttgctattcaaaatttagtgggcattacttaacattgtttctaattattttgtggctgctgtatgttttatgtgttgggagcccattgtattaggccgttcttggattgctataaagaaatacctgagactgggtaatttggttttttggttttttggggttttttttgagacggagccttgctctgtcgcccaggctggagtgcagtggcgcgatctcggctctatgcaacctccacctcctgggttcatgccattctcctgcctcagcctcccgagtagctgggactacaggcgcccgccaccatgcctggctaattttttatatttttagtagagatggggtttcaccgtatgagccaggatggtctcgatctcctgacctcatgatccacaagactgggttatctgtaaagaaaagaggtttaattggctcatggctctgcaggcttacaggaagcatggtctggcatcnnn

SEQ ID NO: 23191 - DNA, 5526 bp, Homo sapiens
  misc_feature 1, 402, 5520, 5521, 5522, 5523, 5524, 5525, 5526: n = A,T,C or G
ncgaccgctccttggtcgcggtcactccaggctgcctcgctgcgccgctggcggtgggcgtggcgctgccggcggctaggcgcggacgccggaggaggtgtccccgggtttaggggtgttcggccaggggcggggctgccgggcccgggcgactgccggagctgcggaagtcgtggaagcgtcggcgacgcatcgcgcgatggcgcgggcgggacaggtgagcgaagcgcggcttgtagccttttccctctctcggggggacgagtggggcaccacctccgcgcggggctccccgctgggccaccccttcgccagcgcccagccccgtgcggcctgtcggatcaggcagggcagagtcggtctcggcgctgtccccgcccctggggtcggaagcgaaccggngctggccgggcctggtctctggtgtctccggccgggcctcggttcccctcctcccccggcttcccccggccgggccgagctcccctcgcgcgcccattgtgaggtcacgtcctgcaggcgcgccctggcacccgggccaagacgcccggagcggctgctgcagccagtagcggccccttcaccggctgccccgctcagacctagtcgggaggggtgcgaggcatgcagctgggggcccagctccggtgccgcaccccgtaaagggctgatcttccacctcgccacctcagccacgggacgccaagaccgcatccaattcagacttcttttggtgcttgtgaaactgaacacaacaaaagtatggatatgggaaaccaacatccttctattagtaggcttcaggaaatccaaaaggaagtaaaaagtgtagaacagcaagttatcggcttcagtggtctgtcagatgacaagaattacaagaaactggagaggattctaacaaaacagctttttgaaatagactctgtagatactgaaggaaaaggagatattcagcaagctaggaagcgggcagcacaggagacagaacgtcttctcaaagagttggagcagaatgcaaaccacccacaccggattgaaatacagaacatttttgaggaagcccagtccctcgtgagagagaaaattgtgccattttataatggaggcaactgcgtaactgatgagtttgaagaaggcatccaagatatcattctgaggctgacacatgttaaaactggaggaaaaatctccttgcggaaagcaaggtatcacactttaaccaaaatctgtgcggtgcaagagataatcgaagactgcatgaaaaagcagccttccctgccgctttccgaggatgcacatccttccgttgccaaaatcaacttcgtgatgtgtgaggtgaacaaggcccgaggggtcctgattgcacttctgatgggtgtgaacaacaatgagacctgcaggcacttatcctgtgtgctctcggggctgatcgctgacctggatgctctagatgtgtgcggccggacagaaatcagaaattatcggagggaggtagtagaagatatcaacaaattattgaaatatctggatttggaagaggaagcagacacaactaaagcatttgacctgagacagaatcattccattttaaaaatagaaaaggtcctcaagagaatgagagaaataaaaaatgaacttctccaagcacaaaacccttctgaattgtacctgagctccaaaacagaattgcagggtttaattggacagttggatgaggtaagtcttgaaaaaaacccctgcatccgggaagccaggagaagagcagtgatcgaggtgcaaactctgatcacatatattgacttgaaggaggcccttgagaaaagaaagctgtttgcttgtgaggagcacccatcccataaagccgtctggaacgtccttggaaacttgtctgagatccagggagaagttctttcatttgatggaaatcgaaccgataagaactacatccggctggaagagctgctcaccaagcagctgctagccctggatgctgttgatccgcagggagaagagaagtgtaaggctgccaggaaacaagctgtgaggcttgcgcagaatattctcagctatctcgacctgaaatctgatgaatgggagtactgaaataccagagatctcacttttgatactgttttgcacttcatatgtgcttctatgtatagagagctttcagttcattgatttatacgtgcatatttcagtctcagtatttatgattgaagcaaattctattcagtatctgctgcttttgatgttgcaagacaaatatcattacagcacgttaacttttccattcggatcattatctgtatgatgtggtgtggtttgtttggtttgtccttttttttgcgtttttaatcagaaaacaaaatagaggcagcttttgtagattttaaatgggttgtgcaagcattaaaatgcaggtctttcagaatctagaactaggcataaccttacataatactaggaaaattatgagaaaggggaaatttttggttaaataagagtaaggttcaaacacaagcagtacatgttctgtttcattatgctcgatagaaggcttttttttcacttataaggcctgattggtcctacccagcttaacggggtggggtttttttgtttgttcagacagtctgttcttttgtaaacatttttagttggaaaaacagcatctgcattttccccatcctctacgttttagagaggaatcttgtttttgtgtgcaacataagaaaattatgaaaactaatagccaaaaaacctttgagattgcattaaagagaagggataaaggaccagcaataataccttgtaagttgcttttgtttgtaaaatctgagcttatagttttccttagtgagtaaattcataaggatgggaacatttaaattaagttaatgggcctttaaaaaaaaaaaaggaaacactcatacctgtagttggaggatgaatactggagacgggttaccaatgtcaggttatactaaaactaaatcagaaagtctgaatgtagcacataatggttctcttctgttgtccaaggctgtaaaatggacagccttgtcacacctccccggtgctgttttacaacgtgagggtagacgctgtcagtaacccagagggaccaggccttcctaggttttctaggcagtcagctgttaaccactcacttagtaaatgtcataactacacctgctccaggaccaatcagtgaaacctgctcggaattaaaggcttcctctgggtgcctgctgaacaactgagctcatgtcatgggcatgtggtggtttctctgttgcctgaaagagccattaaagtcagtcgtgcgtgaagcatctctcttctaaaggatgtgtatttccataaatgctttctgaggatccggtacaaaatgatttcccaaagttctgaagtgccttgagaacatgtgggtccgagtgttataacagactcctcccccgggtcaccttttgcctggtcatcctgttagagtacatctttggaaatccagggtaatattctctttcagagatgctcattgtgtaactctgtgtagggagatagtcactttaaacagctcaaagtagctagctaaaggagtagccttaaatacctaaaagatgacagaagcatagcccttaacaaatcttcagcttgtctctcagtatttcccaatcatgaaaatcccttgctatgtctttcctactagaaatgttctagaatcgctggacggtggggtcagagggcagtcggtatttaggccgtgagcttcccatactactgcaggtccaactcctggcaaccgcgggctcaaggcaggtcattggaatccacgttttggccacagtagttgtaggattgcttttctgtatcataattttagaatgctcttaaaatcttgaggaagagtttttattttttatttatttttgagatggagtctctgttgcccaggctgcagtgcagtggtgccatctcagctcactgcaacctccacctcccaggttcaagcgattctcctgcctcagccacctgagtagctgggagtacaggcatgtggcaccatgcctggctaatttttgtatttttaatagagttgagatttcaccatgatggtcaggctggtctcgaactcctgacctcgtgatccgcccgcctcggccccccaaagtgctgggattaacgggtgtgagccacggcgcccagcccaggaagagtttttaaattagagctctgtttaattataccactgggaaatcatggttacgcttcaggcatattcttccccagagtactacttacattttaaatttcattttgtaaagttaaatgtcagcattccctttaaaagtgtccattgttctttgaaagtagacgtttcagtcattcttttcaaacaagtgtttgtgtaccttttgccaagctgtgggcatcgtgtgtgagtacagggtgctcagctcttccaccgtcattttgaattgttcacatgggtaattggtcatggaaatgatcagattgaccttgattgactgtcaggcatggctttgtttctggtttcaatctgttctcgttccttgtaccggattattctactcctgcaatgaaccctgttgacaccggatttagctcttgtcggccttcgtggggagctgtttgtgttaatatgagctactgcatgtaattcttaaactgggcttgtcacattgtattgtatttttgtgatctgtaatgaaaagaatctgtactgcaagtaaaacctactccccaaaaatgtgtggctttgggtctgcattaaacgctgtagtccatgttcatgccaaaaatggctgggaacgtttgctttatttacattcagtcagcgttgctttcagatcacactttatccacacaggaaagccagtcagcctataatgaagtagttattaaaataaatgtaatgaatatgtctacaaagtatagtttagtggtttattttgctaaaatgcacatatatttgatataatttagtttgagaagttcagctagtttttctcctttgtttgactttgtcaatttctatctggtttttaagggtctgagcttagcttgtgcatgcaaggttttgggtttttttattttttttttgagcacagcttttcaccttttaatttgttgggtatttttctcttaataagagaaatattggccatcgatttttacatataatacaagtgtgtttttccagtacattggttcctgtcccctctctgtgaactgtttgagtattggaacagtatgtcttcaataattcaatgttactttgagatacatgtgttaatatacccttagttattcttgaaataaaaccagtctcttaccgcttggaacgcacaacaccacacacacagaccagcccaccagcgacacaacacgcccagaaaaaggagcgggggctcaaaaactcccggcgcccccaacacgcgcccacatcgtacaagggccccaaacgcgcttaaccagggccgcccacaacannnnnnn

SEQ ID NO: 23192 - DNA, 1670 bp, Homo sapiens
  misc_feature 1667, 1668, 1669, 1670: n = A,T,C or G
gggacgtgatgttggagaactacaggaacctcggcttcctggcgggactctgtcttcctgacctgaatattatctccatgttggagcaagggaaagagccctggactgtggtgagccaagtgaaaatagcgaggaacccaaactgtggggaatgcatgaaaggcgtgatcaccggtatctctcctaaatgtgtgatcaaggaattaccaccaatacagaacagtaacacaggagaaaaattccaagcagtgatgttggaaggacatgaaagctatgacactgaaaatttttacttcagggaaatccggaaaaatctacaggaagttgactttcaatggaaagatggtgaaataaattataaagaagggccgatgacccataaaaacaatcttactggtcaaagagttcgacatagtcaaggggacgtagaaaacaagcatatggaaaatcagcttatattaaggtttcagtccggtctgggtgaattgcagaaatttcaaactgcagagaaaatttatggatgtaatcaaattgagaggacagttaataattgttttttagcttcaccacttcaaagaatttttcctggtgtccaaaccaacatttctaggaaatatgggaatgattttttgcaactttcgtgacctacacaagacgagaaaacacatattagggaaaaaccttacataggtaatgagtgtggcaaagccttcagagtgtcttcaagtcttattaatcatcagatgatacatactacagagaaaccttacagatgcaatgagtctggtaaagcctttcatcggggctcactactaacagtacatcagatagtccatacaagagggaaaccataccaatgtgatgtatgtggccggatcgttcagtcacaattcagatcttgtaaatcaccggagaagtcacactggagacaaaccctacatatgtaatgaatgtggcaagtccttttagtaaaagttcaccaccttgcagttcatcagagaattcatactggagagaaaccttacaaatgtaatcgatgtgggaagtgctttagtcaaagttcctctcttgcaactcatcagacagttcatactggagacaaaccctacaaatgtaatgaatgtggcaaaacctttaaacggaactcaagcctcactgcacatcatataatccatgcaggaaagaaaccatatacatgtgatgtatgtggcaaggtcttttatcagaattcacaacttgtaaggcaccagataattcatactggagagacaccttacaaatgtaatgaatgtggcaaggtcttctttcaacgttcacgtcttgcagggcaccggagaattcatactggagagaaaccctacaaatgtaatgaatgtggcaaggtcttcagtcaacattcacatcttgcagtgcatcagagagttcatactggagagaaaccttacaaatgtaatgaatgtggcaaagcctttaattggggctcattactaactgtacatcagagaattcataccggagagaaaccttacaaatgtaatgtgtgtggcaaggtctttaattacggtggatacctttcggttcatatgagatgtcatactggagagaaacctctccattgtaataaatgtggcatggtcttcacttactattcatgcctagcacgtcannnn

SEQ ID NO: 23193 - DNA, 1369 bp, Homo sapiens
  misc_feature 1, 2, 3, 4, 5, 6, 7, 8, 9, 1327, 1368, 1369: n = A,T,C or G
nnnnnnnnnaaaacaaccacaataacattaataatagaaaattcatctgtaaatattcacagtctagtcactgaaaaatgggaaaacctctaccatgccttattattaccctttgctgtttgaggagccagaaatagaggtgcagttagaggacggtcactttttccaacaaaacccactccatagccatgtggatttttatccaaaggctcaacaaccagagggaatggtgagacctgataactaaaatactgttattggcaagggtttgaaatgtgtaagaacctaggagggaaaggaagattgagcaacataggaaaaggggaagagaggctgagtgtcaccaaggtccaaactccatttataaaaatactgcaaaaccaggagttgatggtagaagtgcatatgatccatggcaggagtaaatctctccacctcctctaactctctgaaaactctagagttggagcaagtcttccatttgcttcttatccccttaaaagaatgccttccacttcccaacagcccccatcaagggaccccaagaggccaccatgctcttatctcgcactttctttcctattccccttgcctgaatctggagtggggttgagccctctgccttcaaccttaagatttaggaagttctttccccaactgtctaacttggaaaggtagatgagtctgaattttgaagtaacgaatgcaaattccactcagcagaggcaatgttatttatgtacatagggatagtggaatgagttttaatagattctgtccaaaaggggtttgttcctcttatttcctctatgtaggaagttgtgtcttaggcaactttatcagtatcaatggaaaaatgataggcactacaatgaaatggcaggatgccaatatgagatatttcaggaataataagaaatacagtttgtttgtataaaataaactatctcaagaaagttttcaacgacagtgatagtgttcatttgtaagagagagttctagaacttcgatgtccagtgcagtagccactacccatatgtagctgttgagcatttgaaatatggttagtccaaattgagatgtgctctaaaggacaataaaaggttaaatatctcctaattttttgtattgattacatgttgaaatgttaacattggaaatattgggttaaagaaaaatacacaattaaaatgaatcttggccaggcgcagtggctcacgcctctaatcccagcactttgagaggccagggtgggcaggtcacctgaggtcaggagttcgagaccagcctggccagtgtggcaaaaccctgcctactaaaaatacanaaaatagccaggcatggtggtgcgcacctgtagtcccagcnn

SEQ ID NO: 23194 - DNA, 7677 bp, Homo sapiens
  misc_feature 1, 2, 3, 7675, 7676, 7677: n = A,T,C or G
nnnacaccccgggcaggtggagcgctcgcggctgctcgcggcgagcccgggagtgatggcgaggcccctgcgggcggccagcgcctgaggcgccccgccccgccccgccccgcgcggccctccccgcccggccctgccctgccctgctccctgccggcggctgcgggcgcttcctagtccgctcgggcggccgcccaggcgaggtgcggcctccgcacaggccggggggcgtaggcgcgcggggcccgccatggctgcgtcggagctctacacaaagtttgccagggtttggatacctgatccagaggaagtctggaagtcagcagagctgctcaaagattataagccaggagataaagtcctcctgcttcacctcgaggaaggaaaggatttggaataccatctagatccaaagaccaaggagctgcctcacttacgaaatcctgacatacttgttggtgaaaatgacctcacagccctcagctatcttcatgagcctgctgtgctccataatctcagagtccgctttattgattccaaacttatttatacgtattgtggtatagtcctagtagctataaatccctatgaacagctgcctatttatggagaagatattattaatgcatacagtggtcagaacatgggtgatatggatccacatatctttgcagtagctgaagaagcttacaagcaaatggccagagatgaacgaaatcagtccatcatcgtaagtggagagtctggggcaggaaaaacagtctcagctaagtatgccatgcgatactttgcaactgtgagtggttctgccagtgaggccaatgtggaggaaaaggtcttgacctccaaccccatcatggagtccattggaaatgctaaaacaaccaggaatgataatagcagccgttttgggaagtatattgagattggttttgataagagatatcgaatcattggtgccaatatgagaacttatcttttagagaaatccagagtggtattccaggcagaagaggagagaaactatcatatcttctatcagctttgtgcctcagcaaagttacctgaatttaaaatgctacgattaggaaatgcagataactttaattacacaaaacaaggaggcagtcctgtgattgaaggagtggatgatgcaaaggagatggcacatactaggcaggcctgcactttgctaggaattagtgaatctcatcaaatgggaattttccgaatacttgctggcatccttcacttaggcaatgttggatttacatcccgagatgcagacagctgcacaatacctcccaagcatgaacctctctgcatcttctgtgacctcatgggtgtggactatgaggagatgtgtcactggctctgccatcggaaactggctactgccacagagacatacatcaagcccatctccaagctgcaggccacgaatgcccgcgatgctttggccaagcacatctatgccaagctctttaactggattgtagataatgtcaatcaggctctccattctgctgtcaaacagcactcttttattggtgtgctagacatttacggatttgaaacatttgagataaatagttttgaacagttttgcataaattatgcaaatgaaaaactacagcaacaattcaatatgcatgtcttcaaattggagcaagaagaatatatgaaggaacaaattccatggacactcatagatttttatgataatcagccttgtattaatcttatagaatcaaaactaggcattctagatttactggatgaggaatgcaagatgcctaaaggcacagatgacacctgggcccaaaaattgtacaacacacatttgaacaaatgtgcactctttgaaaagcctcgtctatcaaacaaagctttcatcatccaacattttgctgacaaagtggaataccagtgtgaaggatttctcgaaaagaataaagacaccgtttttgaagaacaaattaaagttcttaaatcaagcaagtttaagatgctaccagaactatttcaagatgatgagaaggccatcagtccaacttcagccacctcctcagggcgcacacccctcacacgaactcctgcaaagcccaccaaaggcagaccaggccaaatggccaaagagcacaagaaaacagtggggcatcagttcagaaactccctgcacctgcttatggagacactcaatgccactacccctcactatgtgcgctgtatcaagcctaatgacttcaagttcccattcacgtttgatgagaagagggcagtgcagcagctgagagcatgtggtgtcctggaaaccatccgaatcagtgcggccggtttcccctcacggtggacttaccaagaatttttcagccgctaccgtgtcctaatgaagcagaaagatgtgctgagtgacagaaagcaaacatgcaagaatgtgttagagaaactgatactggacaaggacaaataccagtttggtaagacaaagatctttttccgtgccggtcaagtggcctatctagaaaaattgagagctgacaaactgagagctgcctgcatccggatccagaagaccatccgagggtggctgctgagaaagaagtacctacgcatgcggaaggcagccatcaccatgcagagatacgtgcggggctaccaggcccgatgctatgctaagtttctgcgcagaaccaaggcagcaaccatcattcaaaagtactggcgcatgtatgtggtccgcaggaggtacaagattagacgagctgccactattgttcttcagtcttacttgcgaggcttcttggccagaaataggtatcgcaagatactccgtgggcacaaagcagtcatcattcagaagcgagtccggggctggctggcccgcacacactacaagaggagcatgcatgccatcatctaccttcagtgctgcttcaggcggatgatggccaagcgtgagctaaagaagctcaaaatcgaggctcgctcagtggagcgctataagaagctgcgcatcggcatggagaacaagatcatgcagctgcagcgcaaagttgatgagcagaacaaagactacaaatgccttgtggagaaactaaccaatctggaaggaatatacaactctgagactgagaaactacgaagtgacttagaacgtcttcaactaagtgaagaggaagcgaaagttgccactgggcgggtccttagtctgcaggaagaaattgccaagctccggaaagacctggagcaaactcgttcagagaaaaaatgcattgaggaacatgcagatcgatacaaacaagaaacagagcagctggtatcaaatctgaaggaagaaaatactttgctgaagcaagaaaaagaagccctcaatcaccgcatcgtgcagcaggctaaggagatgacagaaactatggagaagaagttagtagaagaaacgaaacaactggaactcgaccttaatgatgaaaggctgagatatcagaaccttctgaatgagttcagtcgcctggaagaaagatatgatgacctcaaggaagagatgacccttatggtgcatgtgcctaagcctggacacaagagaacagactccacccacagcagcaacgagtctgaatatatctttagctctgaaattgcagaaatggaagacattccatcaaggacagaggaaccaagtgagaagaaggtacctctggacatgtcattgttccttaagctccagaagcgggtcacagagctggagcaggagaagcaggtgatgcaggatgagctggaccgcaaggaggagcaggtgctccgcagcaaggccaaggaagaagaaagaccacaaattagaggtgcagaactggaatatgagtcactcaagcgtcaagaactagaatcagaaaacaaaaaactgaagaatgagctaaatgagttgcgcaaggccctcagtgagaaaagtgccccagaggtgaccgccccaggtgcacctgcctaccgtgtcctcatggagcagctgacctctgtgagcgaggagcttgatgtccgcaaggaggaagtcctcatcttaaggtctcaactggtgagccagaaagaggccatccaacccaaggatgacaagaatacaatgacagattccacaatacttttggaagatgtacaaaaaatgaaagataaaggtgaaatagcacaagcatacattggtttgaaagaaacaaatagatcatctgctctggattaccatgagttgaatgaggatggagagctgtggctggtttatgaagggttaaaacaagccaataggctcctggaatcccagctgcagtcacagaagaggagccatgagaatgaggccgaggccctccgtggggagatccagagcctgaaggaggagaacaaccgacagcagcagctgctggcccagaacctgcagctgcccccagaggcccgcattgaggccagcctgcagcacgagatcacccggctgaccaacgaaaacttggatttgatggaacaacttgaaaaacaggataagacggtccgtaaactgaaaaaacaactgaaagtatttgccaaaaaaattggcgaactagaagtgggccagatggagaacatatccccaggacagatcattgatgaacccatccgaccagtcaacattcccaggaaagaaaaggatttccaagggatgctggaatacaagaaggaggatgagcaaaaacttgttaagaacctgattctggaactgaagccacgtggtgtagcagtcaatttgattccaggattaccggcatatatcctgttcatgtgtgttcgacatgctgactacctgaatgatgatcagaaagtaaggtcgttgctaacatcaacaattaacagcatcaaaaaagtattgaagaaaagaggtgatgattttgaaaccgtctccttctggctctctaacacatgccgatttttgcactgcttgaaacagtacagtggagaagagggctttatgaagcacaacacatctcgccagaatgaacactgcctcaccaattttgacctggctgagtatcggcaggtgctgagtgacttggccattcagatctaccagcagctcgtgcgggtgttagagaacatccttcagccaatgattgtctcaggcatgctggaacatgaaacgattcagggcgtgtctggggtgaagcccacagggttgagaaagcgaacctccagtatcgccgatgagggcacctacacactggactccatcctccggcagctcaactccttccactcggtcatgtgtcagcatggcatggaccctgaactgatcaagcaggtggtcaagcagatgttctacatcataggggccatcaccctgaacaaccttctcctgcggaaggacatgtgctcctggagtaaaggcatgcagatcaggtacaatgtcagtcaactggaagaatggctgcgtgacaagaatctgatgaatagtggggctaaagaaaccctggaacctctcattcaggctgctcaacttttgcaagtgaaaaagaaaacagatgatgatgcagaagccatttgttctatgtgcaatgctttaactactgcccagattgtgaaagtgttgaatttgtatactccagttaatgagtttgaagaaagagtctctgtgtcgttcattcgtactatacagatgcgtttacgagacaggaaagactctccccagctgctcatggatgctaaacacatctttcctgtcacctttcctttcaacccatcttccctcgcactagaaaccatccagattccagccagcctcggcctgggcttcatttcacgggtctgaaagtgatgtccaggcaaaaattgacaatacatttcttgcccgaaataagaacccattatttccagtgagttactgaaaatacatttttaaagagaaagtactgattatctcccaaatgagaagtcattaactggaaatctccctagaatactttcatcactttggaaacaaagataggctctttcgtgctgtgttatctttatagcaacactcatccttaaccaactaggtaccgtgagtttacatacaggagaatgatggaaggaagggaggaaggaaaggaggagaaaaatgtgtcttcagctggcagcatttattttaaatccttagcactgagtttgaatggtataaaaagtataacttccatagatgagctgttgttaggaaggcaccaaagaacctcctctgcactaaacaggagaatggaaagaaaagtctccattgagtacatatcatgtcagtttagtaatcaattatgttgatattgttaaactggttcaaagaaataaactggcaatatgtaaagtaattcctcatttgtgtcactatgatatagagatattaaaggaatgttggtttgctaaatagtatagatgtccatttgtactatagtttactgagcattttaaattgctgctacatactgtcttcttaaaatgtaagtgatattaggcactacaataagtttctcttgtcaattctgtttacaattcaatcagatcacagttttaactggattatatgcaaatacctacagattcacctgcacaagtagcagacactggaaagtcatgtagtaatatgacaaaatgcttgacatttaggggtaggattagacaaagtggctattgttgatgtcattatttattcaggatgtattacattgatgtgctcattaattttccctgggtggatattgcgtcagggtacagtgttctgtgaagtgacttatttttaactaccagatctgattccttcagtgcatattttcaaccttgacaggttttctctcttcttaatttattaagaattaatctcggctgggcgcggtggctcacgcctgtaatcccagcactttgggaagccaaggtgggcggatcacttcaggttaggagttggagaccagcctggccaacatggcgaaaccctgtctctactaaaaatacaaaaattagccgggcgtggtggcacttgcctgtaatcccagctactcgggaggctgaggcacgagaatcgattaaacctgggaggcggagattgcaatgagatcgaaccactgcactccagcctgggtgacagagagagacactgccttggaaaaaaaaagaatctcactcactatctagagaggattgtcagaatattcacgattcaggtcttgaaactttgattatgcaaaagaaggtatataataaatatttcattatgattcagtttttaaggctttgcagcttctataagtgttctcagatgccactagataattttaaaagcatcatattagaaatactttaagaagacttatataagaaatagaagattgttgaattttacagaggatttggttcattaagacccagattctgtaagttttcattctgaaattctagttaaacatattcaccatttttcttaggaatcttatacaataaatccttcaggttgcacaaaagcaaattattagttttcattagaaactctggttctgaattacaatcataggttatataaatttaactgttagatggtctataaaaatgacaaatcttattaaaatatgtgcaatatttatgggagtcaaacagcttcatatcagtgataaagattgttattaaaagataaatactgtctgttaannn

SEQ ID NO: 23195 - DNA, 335 bp, Homo sapiens
acgcgggggaggccacgcccacgagggcagctcacagaattagaaagccgacgggggctgtggtcaggaggcgcgtgggcggcagaatttcgaggatgtcagatgtaaatgtatctgccctccctataaagaaaattctgggcaatatttataataagaacatttctcagaaaagatttgtgattgccttcatgttgtggagcccatgcctgtgcgggggcctgatgtagaagcatactgtctacgctgtgaatgcaaatatgaagaaagaagctctgtcacaatcaaggttaccattataatttatctctccattttgggccttctacttctgt

SEQ ID NO: 23196 - DNA, 398 bp, Homo sapiens
  misc_feature 71, 72, 73, 74, 75, 76, 77, 78, 79, 80, 81, 82, 83, 84, 85,86, 87, 88, 89, 90, 91, 92, 93, 115, 116, 117, 118, 119,120, 121, 122, 123, 124, 125, 126, 127, 128, 129, 130, 131,132, 133, 134, 135, 136, 137, 138, 139, 140, 141, 142: n = A,T,C or G
  misc_feature 143: n = A,T,C or G
cagtcctgtttgccagatgtaaagacatgaaatgaggcgaataccatctatccctgtaattccaaccctannnnnnnnnnnnnnnnnnnnnnnggatataaactaaacaaaaacnnnnnnnnnnnnnnnnnnnnnnnnnnnnncaatctgtgcttaactaaaccccactgtcttccagggtcaggttggccatccgcaggcgtagttgctaggaaggtttgacagatgtccgcctgttgattcaggcgttcccaggaattgaagccaagaaaaccaaggaaggccaggcgcggtggctcacgtttgtaatcccagcactttgggaggccgaggcgggcggatcacgaggtcaggagttcgagaccagcctggccagcatggtgaaaccccgtctctac

SEQ ID NO: 23197 - DNA, 739 bp, Homo sapiens
  misc_feature 568, 733, 734, 735, 736, 737, 738, 739: n = A,T,C or G
acgcggggagaacgtgtgcagctcagccagccacagaactggaatttttcgccggcggggggagcatggagtttggactttgctgagcaactgaagtggagcgcagagcttgctcgcttaggagagagcatcatggatggcaaacaagggggcatggatgggaagcaagcccgcggggccaagggactttcctggcatcaggcttctttcaaacccattgatgggcgatgctgtgtctgattggtctcctatgcatgaagctgcaatccacggacatcagctgtctctgaggaacctcatcagccaggggtgggctgtgaacatcatcacggcagatcatgtttccccactccatgaagcctgtcttggaggtcatctctcttgtgtgaagattttattaaagcatggagctcagcacggagccagcgttcaacctgagagtgatctggcatcccccatccatgaagctgctaggagaggcctggccaacatggtgaaaccccatctctgcgaaaaatacaaaagtagccaggcatggtggcacacgcctgtagtctaagctacttgngaggctgagatgggagaatctcttgaacccagaaggtaaaggctgcactgagctggaatgcagtggcgcgatttcagctcactgcaagctccgctttccgggttcatgccattctcatgtctaagcctaaataaagcagattaccctcaattgcgggttggcccnnnnnnn

SEQ ID NO: 23198 - DNA, 3228 bp, Homo sapiens; identical to SEQ ID NO: 22886
  misc_feature 1, 2, 3216, 3217, 3218, 3219, 3220, 3221, 3222, 3223, 3224,3225, 3226, 3227, 3228: n = A,T,C or G

SEQ ID NO: 23199 - DNA, 1363 bp, Homo sapiens
  misc_feature 1, 2: n = A,T,C or G
nnagaggacccagtccatttcacctgcattagatgtcttatcaccaagaacagatgcaatcctctctgctcgcttatgaagctgaaggcagctggctgtgcatacagtggttcccttggcatttaacagcatgaagagtacatggtcaggagtcgcctgggctcgccactgtaggatctctgccagaaactggtgcttcctcaccaaatcattctcttctatttgtcccagatcccttccagcagcttgtgctatacgttttccagcaaccagattcccaaccatcacggaagcagggcctacacctggttgtttttgccggggctttggcaaagtttgtcaacacaatgtatgggggcacatgaaggatgttgcaaggatgcagtgatcccctccagaaagagttgtttcgtctgagatatatggattcctcctagtggagtttttggcaatgtattggctggcaccagagcaagacaataaacccccacttgatgaatgctatcgatcgcctgcagcacgcggctcatccactggaaactatcttcctcagaagcatcaggtctttgttccgcaaccaccacaatgcgctcatcataaaatacagacacagaaaacacagcaattcttcctctataaacagtctttattgattctacagccaatccagtagcaacaatgtcatcagcattatgtcttcgacccctaaaccatcagtaagccatccattttcccaaccacgaacaccaaactacccggccctacaaaccccagcaatcctgatcggatgaatggcacatccccaacaggagagcctgcagaattcactggaattacctcaaatgtattttttgtcacaccagcaagcccaaagtacatcatgcctccagttctggagctaacacagatttctccaatttcatctgttttgcagagctggggaggtccatctggtttcacaatgcacatcatcccaccaggcattacatgccctacatcctggaccgtcagtgctgaatttttatcttcagtattgacccgtattaccccatagctcaatccattcattgagagaatggctcttcctggcaaaggggctcctggaactccaggcctgcggattgctacagtcatggcttcagcagacgtggcgcacggtcagatggcctcaggcttcagtccatgactttggaacagactcaggaaggcatcacaggatgacacggaccaggggttagctccatctgtcacaattaacattcggagggaactcaagctcacgtctctttggtcccgatgtgccatcatagcccagtgcaagtcccgacattttactaaagctaccttggctttgtgagcatgt

SEQ ID NO: 23200 - DNA, 1451 bp, Homo sapiens
  misc_feature 1396, 1397, 1398, 1399, 1400, 1401, 1450, 1451: n = A,T,C or G
cgacccacgcgtccggcaaatatgcagcgctccgcaagatgagctctcctgcagacaagcatggtctgaaacattctttgagcaatatttattgagtgcctactatgtgttaggtactgtgccaggcactgataagccagtggtaagggaaacacagctctaacctcacctcattctccaggttacaaaggccatgtgcccctttgaatctggcagagaaagtttcctcgttgtaagtatttgcatctacttcaagccagattcttctgcctctttctcctttccagacccctactctgtgcagtgctgaccacagctagagccaccgccccattgctcaaccagtatttatttccctaaacgacccttcctcatattcccttccctccacctctccttaccaagcacccaaaagaggatttagaactagcagggtggacatcatctggttgtttctacttttctctgcctagcacaaaattgggagaaaactggagcctccatccgcagtcacacgtgtacagatctggggatttggatgtaggctttttctaacttctctctcagaagcttctacagaaacccttccatctgtagcctcaagggcccacctccaagggaaggcttaggcaatgatcctgtttctaccaacactgcaccttatcccaggaacctgccctagacctccagagaccatattttctctccctccatttctacccagacctccaggcctccttctggaatcatagaaccgtagaattggaaggaattttagaggttttctagttggagttgtgtccaacagaattcattaacaccagcctgggcttgtttttcctcctccctctggacttttttcatcttttcctccacctcaaaaaatacttacacacagattcttcttgtacaggcatcaaaaccaactcctctgcccctaaggctgtgtccctgtggtctccagccacccctaccccagtcactcgccccttcctcatctctggaatttggccaggcagtcccagaagactctggagtgacctcctttgcctaaaaagcagacagataggcatgccccaggccctgagtgagcagaggaggactgtagggtgagagggaaagaaaatgaaggtgactttcatggaagtttcatttcttttccccgattgtaccaactgcatgtacttttggcctggctgcaaggagcaatattggtttactctcgtatccttaaaaagttacagaactgtgtcttaagagaattatttatagttactataactgaattgacaaatgtcaacttaactgataaattatatttggtaaaataaagaggacgtttatttaaaaaaaaaaccaacaaaaacgtaaaataatccagatcaaaaacaataannnnnnggggggccctttattttttataaaaaaaaacccccccccccccccccgnn

SEQ ID NO: 23201 - DNA, 312 bp, Homo sapiens
accaaagctcactactgcggtttgcctgtgcctggacaatgaggcggagccactgttgttggggcacccccttccctccccgggtttgcaaatagaggctaccgggtgctgtattcagcaacacccgttttactatttgttattaaaactacccatcttccacctttcctttttgattagcaatttgtacgcggggaagaaacatggatttaaattgggtcctgcaccaaaaactttaggattcaatttggaaagtggttggggctctggaagagctggaccaagctatagtatgccagtgcatgctgcagt

SEQ ID NO: 23202 - DNA, 897 bp, Homo sapiens; identical to SEQ ID NO: 20923
  misc_feature 894, 895, 896, 897: n = A,T,C or G

SEQ ID NO: 23203 - DNA, 368 bp, Homo sapiens; identical to SEQ ID NO: 21014
  misc_feature 364, 365, 366, 367, 368: n = A,T,C or G

SEQ ID NO: 23204 - DNA, 3250 bp, Homo sapiens
  misc_feature 3053: n = A,T,C or G
agtcgggaggcgacttctcggacgccgcggcggtgcgcaggcgccgtggccggactggggactttgttctccgcggagaaacccaagggcggtgccggtggctggctgcgcacgcgcgccgcctcatttccggtgctctctctcgctgggtcgctcgggtcggcttcggtcgctaccgctcccgctctgccacccccgccaaccgccgctcgggcctccgtcgctgccgcgtcgctttctcgctccttggatcgcacatcctcccagatgcagcgccgggacgaccccgccgcgcgcatgagccggtcttcgggccgtagcggctccatggacccctccggtgcccacccctcggtgcgtcagacgccgtctcggcagccgccgctgcctcaccggtcccggggaggcggagggggatcccgcgggggcgcccgggcctcgcccgccctgccacgcagccgccaccgctgctgccgccctcggccacgggtcccgacgcgacagtgggcgggccagcgccgaccccgctgctgcccccctcggccacagcctcggtcaagatggagccagagaacaagtacctgcccgaactcatggccgagaaggactcgctcgacccgtccttcactcacgccatgcagctgctgacggcagaaattgagaagattcagaaaggagactcaaaaaaggatgatgaggagaattacttggatttattttctcataagaacatgaaactgaaagagcgagtgctgatacctgtcaagcagtatcccaagttcaattttgtggggaagattcttggaccacaagggaatacaatcaaaagactgcaggaagagactggtgcaaagatctctgtattgggaaagggctcaatgagagacaaagccaaggaggaagagctgcgcaaaggtggagaccccaaatatgcccacttgaatatggatctgcatgtcttcattgaagtctttggacccccatgtgaggcttatgctcttatggcccatgccatggaggaagtcaagaaatttctagtaccggatatgatggatgatatctgtcaggagcaatttctagagctgtcctacttgaatggagtacctgaaccctctcgtggacgtggggtgccagtgagaggccggggagctgcacctcctccaccacctgttcccaggggccgtggtgttggaccacctcggggggctttggtacgtggtacaccagtaaggggagccatcaccagaggtgccactgtgactcgaggcgtgccacccccacctactgtgaggggtgctccagcaccaagagcacggacagcgggcatccagaggatacctttgcctccacctcctgcaccagaaacatatgaagaatatggatatgatgatacatacgcagaacaaagttacgaaggctacgaaggctattacagccagagtcaaggggactcagaatattatgactatggacatggggaggttcaagattcttatgaagcttatggccaggacgactggaatgggaccaggccgtcgctgaaggcccctcctgctaggccagtgaagggagcatacagagagcacccatatggacgttattaaaaacaaacatgaggggaaaatatcagttatgagcaaagttgttactgatttcttgtatctcccaggattcctgttgctttacccacaacagacaagtaattgtctaagtgtttttcttcgtggtccccttcttctccccaccttattccattcttaactctgcattctggcttctgtatgtagtattttaaaatgagttaaaatagatttaggaatattgaattaattttttaagtgtgtagatgcttttttctttgttgtttaaatataaacagaagtgtaccttttataataaaaaaaagaagttgagtaaaaaaaaaaaacacacaaacctgttagtttcaaaaatgacattgcttgcttaaaggttctgaagtaaaggcttgttaagtttctcttagttttgatttgaggcatcccgtaaagttgtagttgcagaatcccaaactaggctacatttcaaaattcagggctgtttaagatttaaaatcacaaacattaacggcagtaggcaccaccatgtaaaagtgagctcagacgtctctaaaaaatgtttcctttataaaagcacatggcggttgaatcttaaggttaaattttaatatgaaagatcctcatgaattaaatagttgatgcaatttttaacgttaattgatataaaaaaaaaaacaacaaaattaggcttgtaaaactgactttttcattacgtgggttttgaaatctagccccagacatactgtgttgagagatacttagagggagggagtaggttttgaagaggttgatggtggtggggagggaaggcctcctgaattgagtttgatgcagagctttttagccatgaagaatctttcagtcatagtactaataattaaattttcagtatttaaaaagacaaagtattttgtccatttgagattctgcactccatgaaaagttcacttggacgctggggccaaaagctgttgattttcttaagttgacggttgtcaatatatcgaactgttcccaagttagtcaagtatgtctcaacactagcatgatataaaaagggacactgcagctgaatgaaaaaggaatcaaaatccactttgtacataagttaaagtcctaattggatttgtaccgtcctcccattttgttctcggaagattaaatgctacatgtgtaagtctgcctaaataggtagcttaaacttatgtcaaaatgtctgcagcagtttgtcaataaagtttagtccttttttaattcaaaagtaaatgtgatgaatggtcatttttttgggtggaccataaaatagttttctctttcaaataacttaattactctatagttaatgggttgtaaagtggaaacattcttaaagtggtgggggggatttatttctaagtttacaacaaacagttgatggagcttgtaaccttaagttaaaaataccaagcttttacnccctgcagttgtggaccggttgtttcaacacttcaaaatctcattgggagttcaatcatggctgaactggtggtcccaaaggtcagtttaatgcacactgttgccttgaacctgggcctatgtgccacatctggtgccagggtgtctgtaacaccacgggcgggtcccccagtcatgcgggggaggcccccaaagag

SEQ ID NO: 23205 - DNA, 968 bp, Homo sapiens; identical to SEQ ID NO: 20935

SEQ ID NO: 23206 - DNA, 2491 bp, Homo sapiens
  misc_feature 1, 2, 3, 4, 5, 6: n = A,T,C or G
nnnnnngacgctctggccatgggttgtgcaaagaaagctttttatttgagaacacctagatacttttggaaatgttcttgttggatcacaaacaacctaattgacagtctatcgccaacatccacaaacacagcaaacagtccagtcctgcagaccacacagggtacatctagagggttctacttgcatcacccacacttccactcctgtgaaacaactgtcttgggcatgagaagggccaggataggccaggtgaatggcaggctgcccaacaaccccaatcccaaaccaacctcccaggccatgggcccaagtccctgcaggaagatgctaataggtacaacaggtagaacatgtagacacaaacatctagtttattttttctgactgtaaccaaagtcagcaaaagaaacaacaaaacttcagtgccctagaaatcctcctggattcaatgacaacacatcaatggccgggcacagggttggattccttttatgaaatcaccttataatctctcatcatcccaggacagtgccttttgggactgcatgaatctttaatagctacaccacattttctcatcctttaagttatgacagacaggttatctctctccaagagcatcaggttagatgctctttcactcttacaaactgtcaggtggagggagaatcacgacatcgttcataaataactgtggagtctgggatgctggctgaaggcatctccaggaaggactggagggcgattttgctaaagggctgctcactgctcatttcactgcatgccgcttttctcactttggttgggagtttgaaggaccatgtaatcacagagattagagctccctgtgaaatcaatcactgcctttagatctccacaaagacctgttctccaatagcacatgcgtttctctgtgagctgtattcgcatcagcgccggagcctcagaaagaatgcgtgtttacactctgtactctccaatgggtaatatttatcatagaaatctaatacatattcttcagtcttgaatccaaacttctggtacagtagcatagcggggttgcttgctgagacgtgaagggttacgtccttgcccatgcaggtctgaatcagatgatagatcatgaaagttgcaatccctgctcttctccattcagggtggacgaacagaaatgaaatgtaagcttcattgtatttcacatcaggaaccatgaagccaaaggcaatgatgacttttttataaagaacaacaacactgaagtctgggtactgcagacactcagacaggtcaatgccaggccaaaaaaactcctgacacatggagttgatcgttgggatgtgatttggccgcacataacagtaatcgagaggtgcgtcgggctccggcgtccagtgagggtcgctcctgtgcaggtgggaacgaatctgtgacaggagctgcagtttgggtggctttgtttcataatcacgcctgatataaggtttcaagatccgagaggtataagggctgacaatactctggtccacagccatatcttctgatcctaccaagcgatacaaaaacttggtggtctggtgtcgaaatcccttcctggacggcaaggaagtctggtatcggtcaaggattctgaagtcctgacaggtggttctgtacgtggcttgtccagctggaagtctggaaattcctccttctttggctccataaatcccgtcaactaacaaaagagcagcattaacaacttgatccaagtcaaaaagtggtaatcccctatcccttttcgcttgtctgacaatcagtttgcgtttcagtctccgagcttccggagtcatggcaacagcaccgggacaagcttccagcctcttgagcagcagcttttcctcgtagatgctcacgggagtatacctgggctctttcggctttgtgtccttctccagctgaggcttcctcttttctctagcccttgtttgcaaagatgtgtttgaatctgtgtcttcactgtcaatatccatcctgtcgggtttttcctcctcactctctacctcctgctttatctgttcagggcctctgaccttctttctgcccccaaccactggcccagaagctactgacccagcagggggtgggacgtactccatccctgggtctatgactccatcgccttccatctcatcgtcatcatgaaacaaggcttgtgggggcatcacatctggaatcagatctgcttctgaaagcaagctaggtgtggcagaatgagaggcaggtgtaccaggggcagagaaatccagagaaggaggaggagatgggcttgtcagcggggtgcggtcagaggagctcaaggaggaaaagtcaatcacttcgcctttttccagaatcacatctggcctgcggcctcggcttatgaattttacaggggtagaagatgtgctcctgtcaagaaagccagcggcctccttctgggctcttctaatgtcttcggacgcgtgggtcg

SEQ ID NO: 23207 - DNA, 873 bp, Homo sapiens
aggttacatcaccttggtgctgggtccagcaatgtgtcaccatacctgctgaggggagggtacaggcaagagagccacatcacttaggtgaggggcccagagatatctcacagtaccccctgtgggtagaactcaggaaaaaggagagagtcacataatctagaagctgagctcagctgtatgttacaatcacccagtggacaggtcccaggcatgagagtagagtcacatcacataggtgctggaccaagcaatttgtcacaaccttcactgtggacaggtccccagaaaaagagaatcacatcatttaggtaacaaaacctgagttagtcactgttacttgtttgggcagaggtcaggaagaagtgtcacacaacatgtatgctggactaagcaatacgtcactctctctgttttaggcatggcccaggcaggagagaagggtcatatcacctaagctctggattcgcagataggccccaatctcttttttgggcaatgctcgggtaagagagcagagtcacatcaagtggttgatgggcccagagatatatcacattgccccttgtggacagggaccaggcaggggactcacatcacaatagaggtaggacaaggaatacatcacaatacgttttgagagcagaaccaaaaaagagtaacataatctttgtgttgagtgcagcaatatgttacacttttctttgtgggcagaacgtgtaaagaaggaaaaagttggccggacacggtggcctgtaatcccaacactttgggaggtcaaggtgggcagatcacctgaggtcaggagttcaagaccagcctggccaacatggcaaaacgctgtctctactaaaaatacaaaaattggctggg

SEQ ID NO: 23208 - DNA, 458 bp, Homo sapiens; identical to SEQ ID NO: 21391
  misc_feature 1, 2, 432, 434, 435, 436, 437, 438, 439, 440, 441, 442, 443,444, 445, 446, 447, 448, 449, 450, 451, 452, 453, 454, 455,456, 457, 458: n = A,T,C or G

SEQ ID NO: 23209 - DNA, 1832 bp, Homo sapiens
tcgacccacgcgtccggcagcggatctagcgggggcggcagcagcgccgggtcccgtgcggaggtgctcctcgcagagttgtttctcgagcagcggcagttctcactacagcgccaggacgagtccggttcgtgttcgtccgcggagatctctctcatctcgctcggctgcgggaaatcgggctgaagcgactgagtccgcgatggagaaaactttagaaactgttcctttggagaggaaaaagagagaaaaggaacagttccgtaagctctttattggtggcttaagctttgaaaccacagaagaaagtttgaggaactactacgaacaatggggaaagcttacagactgtgtggtaatgagggatcctgcaagcaaaagatcaagaggatttggttttgtaactttttcatccatggctgaggttgatgctgccatggctgcaagacctcattcaattgatgggagagtagttgagccaaaacgtgctgtagcaagagaggaatctggaaaaccaggggctcatgtaactgtgaagaagctgtttgttggcggaattaaagaagatactgaggaacatcaccttagagattactttgaggaatatggaaaaattgataccattgagataattactgataggcagtctggaaagaaaagaggctttggctttgttacttttgatgaccatgatcctgtggataaaatcgtattgcagaaataccataccatcaatggtcataatgcagaagtaagaaaggctttgtctagacaagaaatgcaggaagttcagagttctaggagtggaagaggaggcaactttggctttggggattcacgtggtggcggtggaaatttcggaccaggaccaggaagtaactttagaggaggatctgatggatatggcagtggacgtggatttggggatggctataatgggtatggcaggaggacctggaggtggcaattttggaggtagccccggttatggaggaggaagaggaggatatggtggtggaggacctggatatggcaaccagggtgggggctacggaggtggttatgacaactatggaggaggaaattatggaagtggaaattacaatgatttcggacattataaccagcaaccttctaactacggtccaatgaagagaggatgagagcccagaggtaacagaacagcttcaggttatcgaaactaacaatgttaaggaaactcttatctcagtcatgcataaatatgcagtgatatggcagaagacaccagagcagatgcagagagccattttgtgaatggattggattatttaataacattaccttactgtggaggaaggattgtaaaaaaaaatgcctttgagacagtttcttagctttttaattgttgtttctttctagtggtctttgtaagagtgtagaagcattccttctttgataatgttaaatttgtaagtttcagggtgacatgtgaaaccttttttaagatttttctcaaagttttgaaaagctattagccaggatcatgctgtataagaactacgcacacctccaaacaccctccagcgcggggtacagtcacgagccgtgaccatcatgctcatcacaaaccgcacagggacacgacacgcaaagacaacaacgcacaccccacgtcggaacaacagagacaaccgaacacggccacactgtacgccccatctcgcaccgaggggacaccgcgcccaacagagagacaatgacaaccggcgcacaagagcgacgcgcaacgaccgcccggaacagcaagacacgacaacgcacgaccaacagaacagggaccaacaccacgc

SEQ ID NO: 23210 - DNA, 1109 bp, Homo sapiens
  misc_feature 1, 2, 1108, 1109: n = A,T,C or G
nnagacccccacgcgtccggtactcggccgcctgagcgccgacccacgccctgcctgctcttccagtccagccaacactctaagcaggcaccgcctccactcgcagcccccgggatgggtcccactccctaccgcagatccccaggccccctccacccagtcggctagccctcgcctctgccatccgatactaaaatgtctgatgatgctggtgacaccttagccactggagacaaagcagaagttactgagatgcctaatagtgattctttacctgaggatgcagaagtgcattgtgattcagctgcagtttcacatgagccaacaccagctgaccccagaggggaggggcatgaaaatgcagctgtgcagggtgcaggggctgccgccattgggccccctgtgcagcctcaggatgccaacgccctggagccccctctcaatggagacgtgactgaggatacacttgctgaatgtattgattccgtcagccttgaggcagaacccagatccgaaatacccctgcaagaacagaattatctggctgtggattcccctccaagtggaggaggatgggcaggctggggatcctggggcaaatctctgctgtcgtcagcatctgccacagtaggtcatggattgacggcagtcaaggaaaaagcaggagccactctacggattcatggtgtaaattctggatcttctgaaggagcccaaccaaatactgaaaacggagtccctgaaataacagatgcagccacagatcagggccctgaagaaagcccacccacttccccttcatcagcctctcggggtatgctgtctgcatcaccaatgtggttcaaaacacaggttaaagtgtcttaactggaggccttgatgcgttggatttcatcggccagaaaacgcgatgttcctggaagatgacccggttttaatgggcccagagggtctgggagactggtgccttgaccagagtttaggggaggtcgtgaaagggacccgatgttgggggcgtctctgtgggaccggccaggcggtctggtagtcagtgtgtgggtgaccgtaattcgcgatgagcgtgcagtttcactctggtgatctctcnn

SEQ ID NO: 23211 - DNA, 1674 bp, Homo sapiens
  misc_feature 1, 2, 3, 4, 1672, 1673, 1674: n = A,T,C or G
nnnncaacaaatgtcgtcccacacatggttaggaacagaagagacatgtcaactcctcactcctgagttccattggatggcaggctcagaacccaggacatgttctgaagatggggaggggccattttacaggcaggccgcgacaggtagcgtcagttagaaatcaggtctccagtgttcccagttcccaccagtccaactgcgaggagtgcgacgtgagtctgagtctgatccctccgaaaaccgtacttccggcgctgtctcggaggcctcccgtcccctcccttgtccgtcttctaactcttccccacgccaggtccgtcaagcctaagtccttgagttccgggtccgggcagcagagaaaggaagtcctctccctggaggcctatctccctcagaacggcgcgagaagcgagaccttagaaggcagcgcttcccgcgaaggaccggaaaggagcgcctactaaggacgccgtcgaggtccggggcgcctcaactctatagctctaactggctagaagtgcccaacgtggaatgtttcttttttaaaggcggctcttgaagcgacccggaagcggaagtggaagaaagttctagtggcttgaggtatccgcaggagcggccgggtggcgggaggaaccgttacgggaactgaagttgcggattaagcctgatcaagatgacaacctcccaaaagcaccgagacttcgtggcagagcccatgggggagaagccagtggggagcctggctgggattggtgaagtcctgggcaagaagctggaggaaaggggttttgacaaggcctatgttgtccttggccagtttctggtgctaaagaaagatgaagacctcttccgggaatggctgaaagacacttgtggcgccaacgccaagcagtcccgggactgcttcggatgccttcgagagtggtgcgacgccttcttgtgatgctctctgggaagctctcaatccccagccctcatccagagtttgcagccgagtagggactcctcccctgtcctctacgaaggaaaagattgctattgtcgtactcacctccgacgtactccggggtcttttgggagttttctcccctaaccatttcaacttttttttggattctcgctcttgcatgcctcccccgtcctttttcccttgccagttccctggtgacagttaccagctttcctgaatggattcccggccccatccctcacccccaccctcactttcaatccgtttgataccatttggctccttttttggcagaacagtcactgtccttgtaaagttttttagatcaataaagtcagtggctttcaaaaaaaaaaaaaaaaaaaaaaaatatagaaaaaaaaaaggagaagtaaaaagagagaggagaaaaaaaaaaagaaaaagaaggagataaatgagggaaagaatgataagggaagaggaagagaaaatgagcaccagtatggtgagggacgacagagccgacaatgaagaaccacagaggaggagcaaaaaggaagacagacaaaaagaagacgacgaagaggcgggggcgggacaaggaggaaacacaacagacaaaaggcagaacacagcagcaagcacgagactagcaagcaaccaggaagaacacgaacagaccaccacgacatgcacacgcccgaggcgagccannn

SEQ ID NO: 23212 - DNA, 6670 bp, Homo sapiens
gggagtcgacccacgcgtccgtggccggctgggcgcgggcgactgctggcgaggcgcgtgggaccttacgctggttccccttcgtctcctctcccggcccgggccactagagagttcgctgacgccgggtgagctgagcctgccgccaagatgccggcctattttcagaggccggaaaatgccctcaaacgcgccaacgaatttcttgaggttggcaaaaagcagcctgctctggatgttctttatgatgttatgaaaagtaaaaaacatagaacatggcaaaagatacacgaaccaattatgttgaaatacttggaactttgcgtggatcttcgcaagagccacttggcaaaggaggggttataccagtataagaacatttgtcaacaggtgaacataaaatctctggaggatgttgttagggcatatttgaaaatggcagaggaaaaaactgaagctgctaaagaagaatctcagcagatggtcttagatatagaggatctagataatattcaaactcctgagagtgttctcctaagtgctgtaagtggtgaagacactcaggatcgtactgacagattacttttaactccatgggttaaattcctgtgggagtcttacaggcagtgtttggaccttcttagaaacaattctagagtagagcgcctgtaccatgatattgcccagcaagctttcaaattctgcctccaatacacgcgtaaggctgaattccgtaaactgtgtgacaatttgagaatgcacttatcgcagattcagcgccaccataaccaaagtacggcaatcaatcttaataatccagagagccagtccatgcatttggaaaccagacttgttcagctggacagtgctatcagcatggaattgtggcaggaagcattcaaagctgtggaagatattcacgggctattctccttgtctaaaaaaccacctaaacctcagttgatggcaaattactataacaaagtctcaactgtgttttggaaatctggaaatgctctttttcatgcatctacactccatcgtctttaccatctctctagagaaatgagaaagaatctcacacaagacgagatgcaaagaatgtctactagagtccttttagccactctttccatccctattactcctgagcgtacggatattgctcgacttctggatatggatggcattatagttgaaaaacagcgtcgccttgcaacactactaggtcttcaagccccaccgacacgaattggccttattaatgatatggtcagatttaatgtactacaatatgttgtcccagaagtgaaagacctttacaattggcttgaagtagaatttaacccattaaaactctgtgagcgagtcacaaaggttctaaattgggttagggaacaacctgaaaaggaaccggaattgcagcagtatgtgccacaactgcaaaacaacaccatcctccgccttctgcagcaggtgtcacagatttatcagagcattgagttttctcgtttgacttctttggttccttttgttgatgctttccaactggaacgggccatagtagatgcagccaggcattgcgacttgcaggttcgtattgatcacacttctcggaccctgagttttggatctgatttgaattatgctactcgagaagatgctccgattggtcctcatttgcaaagcatgccttcagagcagataagaaaccagctgacagccatgtcctcagtacttgcaaaagcacttgaagtcattaaaccagctcatatactgcaagagaaagaagaacagcatcagttggctgtcactgcataccttaaaaattcacgaaaagagcaccagcggatcctggctcgccgccagacaattgaggagagaaaagagcgccttgagagtctgaatattcagcgtgagaaagaagaattggaacagagggaagctgaactccagaaagtgcggaaggctgaggaagagaggctgcgccaggaagcaaaggagagagagaaggagcgtatcttacaggaacatgaacaaatcaaaaagaaaactgtccgagagcgtttggagcagatcaagaaaacagaactgggtgccaaagcattcaaagatattgatattgaagaccttgaggaattggatccagattttatcatggctaaacaggttgaacaactggagaaagaaaagaaagaacttcaagaacgcctaaagaatcaagaaaagaagattgactattttgaaagagccaaacgtttggaagaaattcctttgataaagagcgcttacgaggaacagagaattaaagacatggatctgtgggagcaacaagaggaagaaagaattactacaatgcagctagaacgtgaaaaggctcttgaacataagaatcgaatgtcacgaatgcttgaagacagagatttattcgtaatgcgactcaaagctgcacggcagtctgtttatgaggaaaaacttaaacagtttgaagagcgattagcagaagaaaggcataatcgattggaagaacggaaaaggcagcgtaaagaagaacgcaggataacatactatagagaaaaagaagaggaggagcagagaagggcagaagaacaaatgctaaaagagcgggaagagagagagcgcgccgaacgagcaaaacgcgaggaagagctacgagagtatcaggagcgggtgaagaaattagaagaagtggaaaggaaaaaacgccaaagggagttggaaattgaagaacgagaacggcgtagagaggaagagagaagacttggcgatagttccctttctagaaaggactctcgttggggagatagagattcagaaggcacctggagaaaaggacctgaagcagattctgagtggagaagaggcccgccagagaaggagtggagacgtggagaagggcgagatgaggacaggtctcatagaagagatgaagagcggccccggcgtctgggggatgatgaagatagagagccctctcttagaccagacgatgatcgggttccccggcgtggcatggatgatgacagaggccctagacgtggtcctgaggaagataggttctctcgtcgtggggcagacgatgaccggccttcctggcgtaacacagatgatgacaggcctcccagacgaattgccgatgaagacaggggaaactggcgtcatgcggatgatgacagaccacctagacgaggactggatgaggacagaggaagctggcgaacagctgatgaggacagaggaccaagacgtgggatggatgatgaccgggggccgaggcgaggaggcgctgatgatgagcgatcatcctggcgtaatgctgatgatgaccggggtcccaggcgagggttggatgatgatcggggtcccaggcgaggcatggatgatgaccggggtcccaggcgaggcatggatgatgaccggggtcccaggcgaggcatggatgatgaccggggtcccaggcgagggttggatgatgatcgaggaccttggaggaacgccgatgatgacagaattcccaggcgtggtgcagaggatgacaggggcccttggagaaacatggatgatgatcgcctttcaagacgtgctgatgatgatcggtttcccagacggggtgatgactcaagacctggtccttggagaccattagtcaagccaggtggatggagagagaaagaaaaagccagagaggagagctggggtccacctcgagaatcaaggccatcagaagaacgtgaatgggacagagaaaaagaaagggacagagataatcaagatcgggaggagaatgacaaggaccctgagagagaaagggacagagagagagatgtggatcgagaggatcgcttcagaagacctagggatgaaggtggctggagaagaggaccagctgaggaatcttcaagctggagagactcaagtcgccgggacgatagggatagggatgaccgtcgccgtgagagggatgaccggcgtgatctaagagaaagacgagatctaagagacgacagggaccgaagaggacctccactcagatcagaacgtgaagaagtaagttcttggagacgtgctgatgacaggaaagatgaccgggtggaagagcgggaccctcctcgtcgagttcctcccccagctctttcaagagaccgagaaagagaccgagaccgagaaagagaaggtgaaaaagagaaggcctcatggagagctgagaaagatagggaatctctccgtcgtactaaaaatgagactgatgaagatggatggaccacagtacgacgttaagtctcaagataatggatttaaactggtgtcttaaataggtttgatcacattcaaggattattatacttgtgcttcaaccaatctaaattggattctttaatgttgtttcaccataacacaaaaagcatgaacttgtattaatcctatataatagattgatcatgcaccatatccacaggaggttggaaaaaccatgccattttctggaatttaagggtgttgcattatttcatcaatcatttgttgacaaaaaaagaaaaactaaaaaataaatttaaaatgtgaaccttcaggtattgagtaacacctttatcttggtatagaactgatactttttttttgattttgaaatatctgataataatttggaatgaagtaaggttctgttaaaatatatttgaagaccctttaaagcagtgaatctgaaacaattttcacacccttaagtggttgatacatacctattttaggtattttgaggtatttaccataaactaaatttagaaattttttagattcacttgaagtaaacattacaaacattggatacggtggggttttctttagattttacttgagagaaggtgagtacaaagcaatttgcagttgttgtaatgacaagattactgcgcaagtgtgaatccaaacagtatagcttttaaattttaaagcatttggtaaattatcgctgagtttttttctgttgccaatagcaaactgcttttccattaatggagaattcatgcctttcaagcattttaaatatgacaatatttataaatgtatggtttggaggaatcgtttaaattctctttcctaattttctttcttttgaagatagattctttcaacaagtaatttgtagtaatgactgtgttgacttcaattttggagcgcagtagctatgttaaagatgaactatttggtctcattgaagccaacacagaacttgctgctgtgttttttcttcagtgataaataaaatacttacagaatttgttttagtgttgatttgtggttatagtattttgtttataatggtaagtttgcatattcagttgagttttttttacttgaatttttatcagtgccattaaatgtctgtgtttagtatcaatgaaaatgaacctaaatataacaaagaaagcatatgtggctaggatgtccccctaacatgtcttcctttgttaatgcaggaattccttagtttccttgtaacgctgtcctctgagtttgtgtgtgcatgtgcgtgtttgaagtaccaccttgggttttcacctgaaattagaaaaatcgtagttaatttgagaaaatgttacaaattcatcatggctgtaggcacttatttctgttattgagtagtggtgagaattcctattggtacagctgtagggccagaagagggagtattgatgctttttaacttaaccagatgcagctatttttgtttgatgttaccaatgatagaaatcattttaaacaccttagtatctggtatttcaaatacgtagaagtctttaaaggtctttcgtggggagaaggacttttctttcataacaagagaatttcagatcagtgattacaagtggggcagtaacttgctaagagtttgcttcctggagagtagatctgtatgtgtgacatcacaggtaagccccaagaatttatttaatcagatttgttcagacgagttactgctgcctacgttagagttagatttcaaggcgagtcagcaaacccatcctttctgctcagtctcccgtactgttctcccaagttctttgttctgggagtcagaacccaagtgcaagaggagggcagaagagtctgatgctgttactttgcgatcctgctcttggtttccactgtccaggccatacaactctgtctactcccattagtatttaccaacaggtgttaaaggaaagctgaacaagcagcctactcaccgatctgctaggtggtcttccatgttcatggtggcttctgcagtttcattgagagtaacattgctgttaatacagatagatccagtagtagagacatcatcggtccaaaagactttgcatctcattagttgtccatagtgactaccaggaggtggctggcatctataacgtgtgggacgtttttatgtaaagaactgcctgtgttttttttttttttttttaaccaaagacactgaccatagattgacttatacttttataagtctaattgaaatacttggggtactatgaaaggactgttccttgagtggctacgattagaaaatcaggactaacaaacttttctttgtctggaagcatatatatttgtgatataattttaatatgtataattttgggttaataaatcaaatctatgacaa

SEQ ID NO: 23213 - DNA, 779 bp, Homo sapiens
  misc_feature 1, 2, 3, 777, 778, 779: n = A,T,C or G
nnnaggttggtgttatagatgcactggtcctgataagggtctggtacgcgggagaaggacaggactatgtcggccttagggtccccggcgcacacttttcgaggacttctgcgggagtgcgctacctgagcgcggcaccggcgaccctatcgcgacaccgcggctatcggtaccttgtgaaggctttccgtgcacatcgggtcaccagtgaaaagtgtgtgcagagcccaacatgagcttcatttccaagctgccacctatctctgcctcctgcgtagcatccggaaacatgtggccctacatcaggaatttcatggcaagggtgagcgctcggtggaggagtctgctggctgtggtgggtctcaagtggccccatcagcctggagggaagggctgggagccatgaacatggagaatatcctttggattgctggcattcataggagaatgcgaataatttctatcaactatgtatttatcattaaaattttttttaagttaacctacaaacaaaacacaacaaacaaaaaaaaaacttttgtgggccggccttgggccttcagaaaagggttttttaacccactcgtgttggcgcggccggggccccacggtgggtatagcagcacccgtgggccacgcgggtcccaaggagacccgggcacacgccatggggtgtggttcccacaaataaaaaaccgcggggcaccgggggtctggacaactcccgtgggccgggcctagcgggttataacgggccaagagctataagcgcacaannn

SEQ ID NO: 23214 - DNA, 326 bp, Homo sapiens
  misc_feature 1, 2, 322, 323, 324, 325, 326: n = A,T,C or G
nnattgggggcacttttatttacagccaaggaaaaaagaaaactaccttctatttaaaatgggaaagcttgtttgtatgaaaacaaatatttcatcatcacttattttctatactgttggcaactaagttttacatttttcattttcaacagagatttgaattttaatgtcccagaaatataaagaagatggctttaaaatgtcctatatgttggcagtcctaccctgaaaacttttttggcttatctttggttctgagctacagtcttcgcagagactaaattagtgactggccaccataaaaaaattgcccctcctggcnnnnn

SEQ ID NO: 23215 - DNA, 1069 bp, Homo sapiens
  misc_feature 1: n = A,T,C or G
nggaaacataggagtgaatgattcccctgttattgatgggagacaacctttgatttttttctcctacccattggatcctcatttaaaaaaaaaatctttgtttttctccttctccccagaggcaaactatgcaagaggcaccagacttcctctttctggtgaaggaccaacttttcagccgcatagctccaagcaaactgtcctgtcttggcaagctacaatcgatgctgctagacaggccaaggctgcccaaactatgagcacctctgcacccccacctgtaggatctctctcccaaagaaaacgtcagcaatacgccaagagcaaaaaacagggtaactcgtccaacagccgacctgcccgcgcccttttctgtttatcactcaataaccccatccgaagagcctgcattagtatagtggaatggaagtatcctttttttgggggaagtctttctcattttctctttgaccatctgtttttttctaggatttgctctcgcgggggacacaaagctgtagcagtctggaatgcgagtaacagaagttgtatataaggggtttcattgtatataccttcctgtctcttcgggttgcagaggggtggctgtacgggtatatttagcccactgtctggatgtgtgtatagtagtagtagtagggggagggagtgacagcctgaaacttcacaggggcagataattaaaatgtgaaaccaacctttggttattggacattagatggttagttttaaattcagtgttgtctttgggcaatagcatgcattgaacctattgcaaacaaggtatacagattagaaaaaaagactgtataagactctgtttgaagggaatacatttttgacctttagtagaatcttctcattctgatgtttgaaatttgcttctgcaactacaattaatgctaaggttgcttctagtctgacatttggtgatcctaattattcaggtagctgcagatatgagcacatgcttcctagggagagattacttttgattttttttctctgatcagtgctataacttcctggaatttccttttgacaagtt

SEQ ID NO: 23216 - DNA, 987 bp, Homo sapiens
  misc_feature 1, 2, 3, 986, 987: n = A,T,C or G
nnncaccagtacctgcccttcagtcaaaaatgactcttgatcaacagcacattgaaacacctggtcaaaatataccaactaaagtaacttcagcagtggttggaccaagtcatgaagtccaggagcaaagttctggcccattcaagaaacagtctgctaccaatcttgaatctgaagaagacagtgaagctcctgttgatagtacattaaataataacagaaaccaagagtttgtttctagtagtagaagtataagtggagagagtgctacatcagagagtgaatttaccttagggggtgacgacagtggtgtgtcaatgaacccagctaggagtgcacttgcactgttggccatggcccaatctggggatgcagtcagtgtcaagattgaagaagaaaaccaagatttaatgcattttaaccttcaaaagaaaagagctaaaggaaaagggcaagttaaagaggaagacaacagtaatcagaaacagctgaaaagacctgcccaaggcaaacgccagaatccaaggggaacagatatttacttaccgtatactcctccttcctcagaaagctgccatgatggttatcagcatcaagaaaaaatgagacagaagatcaaagaggtggaggaaaaacaaccagaagtcaaaacaggatttattgcttctttcttagattttctgaaatccgggcccaagcagcagttttccactcttgctgtacgaatgcctaacaggactagacggccagggacccagatggttcgtacattttgtcccccaccacttcccaagccttcatctacaacacccacacctttagtgtctgaaactggcggtaacagtccatcagataaagttgataatgaacttaaaaacttggaacatttatcttcattttcttctgatgaagatgatcctggatatagtcaagatgcttataaaagcgtctctactcccttaactactttggatgctacttctgann

SEQ ID NO: 23217 - DNA, 3545 bp, Homo sapiens
  misc_feature 3543, 3544, 3545: n = A,T,C or G
cgacccacgcgtccggtcagtttgataaaacatggtggagacagcggctgaaatggaagcatatgttctagaagacattcttgaggtggagtctttcattttggatcaggatgatttggaaaatccaatgctggaaacagcttccaagttgctcttatcaggtactgctgatggtgcagacctcaggacagtagatccagaaacacaggctagactggaagctttactagaagctgcaggaataggaaaattgtccacggctgatggtaaagcctttgcagatcctgaagtacttcggaggttgacatcgtctgttagttgtgcgttggatgaagctgctgctgcacttacccgtatgagagctgaaagcacagcaaatgcagggcagtcggacaaccgcagtttggcagaagcctgttcagaaggagatgtaaatgctgtgcgaaagttactcattgaagggcgaagtgtaaatgaacacacagaggaaggggagagcctcctttgtttagcttgttctgctggatactatgagcttgcacaggttttgttggcaatgcatgcaaatgtggaagataggggaatcaaaggtgacattacacctttaatggctgctgctaatggaggacatgtcaaaattgtgaagttgctgctagctcataaagcagatgttaatgcacagtcttcaacaggcaatacagcacttacatatgcttgtgctggaggctatgtagatgttgtaaaggtgctcttggaatccggtgctagtattgaggaccataatgaaaatggtcatacccctcttatggaagctggaagtgctggacatgtggaagtagccagattgctgctagaaaatggggctggcattaatacgcattctaatgaatttaaagagagtgcccttaccttagcttgttacaaaggacacttagagatggtgcgatttcttttggaagcaggcgcggatcaagagcataaaacagatgaaatgcacactgctctgatggaggcttgcatggatggccatgttgaagtagctaggttacttcttgacagcggtgcccaagtgaacatgcctgctgattcatttgagtcaccattaactttggctgcatgtggtgggcatgtggaacttgcggctttacttattgaaagaggagctagcctggaagaggtcaatgatgaaggttatacaccattgatggaagcagctcgagaaggacatgaagaaatggtggcattacttcttggtcaaggagcaaatatcaatgcacagacagaagaaactcaagaaactgccttgactctggcttgctgtggaggctttctggaagtggcagactttctaattaaggcaggagccgatatagaactagggtgttctacccctttaatggaagctgctcaagagggtcatttggagttagttaaatacttattagctgcaggagctaacgttcatgcaacaacagcaacaggggatacagcactaacatatgcctgtgaaaatggtcatactgatgtagcagatctggaacatgaatctgaaggtggaagaactcctttaatgaaagctgctagagctggtcatgtttgtactgttcagttcttaattagtaaaggagcgaatgtgaatagaaccacagctaataatgaccatactgtactgtccctggcttgtgcagggggtcatctggcagtggtggaactacttttggctcatggggcagatcctactcaccgtttgaaagatggctcaactatgttgatagaagcagcaaaaggtggccatacaagtgttgtttgctatctcttggattatcctaataacttgctttcagcccctccaccagatgtcactcagttaactcccccatcccacgatttaaatagggctcctcgtgtaccagttcaagcactgcccatggttgttccacctcaggagcctgacaaaccacctgccaatgttgccaccactcttcccatcaggaataaagctgcttctaaacaaaagtccagcagccatttgccagcaaacagccaggatgtacagggttacatcaccaatcagtctccagagagcattgtagaagaggctcagggaaagttaacagaactggaacagaggataaaagaagccatagaaaagaatgcacagctgcagtccttggaactggctcatgctgaccaacttaccaaggagaagatcgaggagctcaacaaaacaagggaggaacaaattcagaagaaacaaaagattttggaggaactacagaaagtagaacgagagttacaactgaaaactcagcagcagctaaaaaagcagtatctagaggttaaagctcaaagaattcaacttcagcaacagcagcaacagtcttgccaacacctgggattactaactcctgttggagttggagagcagctttctgagggagactatgcacggttacagcaagtggatcctgttttacttaaagatgaaccccagcagactgctgctcagatgggttttgcgccaatccagcctctggcgatgcctcaagctttgcctctggcggcaggtcccttgcctccagggtccatcgcaaatcttacagaactgcaaggagtgatagttggacagccagtactgggccaagcacagttggcagggctggggcaaggaattctgacagaaacacaacaagggttaatggtagccagccctgctcagaccctcaatgacacgctggatgacatcatggcagcagtcagtggaagagcatctgcaatgtcaaacactcctacccacagtattgctgcatccatttcccaacctcagactccaactccaagtcctatcatctctccttcagccatgcttcctatctaccctgccattgatattgatgcacagactgagagtaatcatgacacggcgctaacacttgcctgtgctggtggccacgaggaactggtacaaacactgctagagagaggagctagtatagagcaccgagacaagaaaggttttactccactcatcttggctgccacagctggtcatgttggtgttgtggaaatatgctggacaatggtgcagtacattgaagcccagtctgaaagaaccaaggacacaccactctccttggcttgttctgggggaagacaggaggtggttggagctattgttaggctcgaggggcaaataacaggagcacaggaaggttctgattacacacctctaagtctggtgctcatggggctatgtgaacatcatccaactattactatattggagagctggatcactctagaactgtatgcaattggcatttctactttggtgtagcggtatgcatgggctcagcggcgtaagcctgtagaaatggtctgataaggcgatgaatcaatgtaactgcctattactggtctgagacacgaggctgtcacgtgtagacaaagtgaccataaggtcacacagtagtcctcgcgggcgacgcgaactataaaccaatcaaaacacaaagaaacctgctctgaacgctatctcagcannn

SEQ ID NO: 23218 - DNA, 1558 bp, Homo sapiens
  misc_feature 1, 1551, 1552, 1553, 1554, 1555, 1556, 1557, 1558: n = A,T,C or G
ngcccaccacactgtcgggaacataggtacggcgcgggttaatcggacgaggcaggatccatccaaacaccagaacctcccacctgtcctcctctctccctcacctgccagggacggacagctgccctgagccttcacacagtgttcctctactcagaagtgcctgtccccacttctctgccctgcagtctgtcatctggtacgatctcccgggtgaacggagctttcgcagctggagaaggctcatccacctgcagacatggggcgcagaaagtcaaaacgaaagccgcctcccaagaagaagatgacaggcaccctcgagacccagttcacctgccccttctgcaaccacgagaaatcctgtgatgtgaaaatggaccgtgcccgcaacaccggagtcatctcttgtaccgtgtgcctagaggaattccagacgcccataacgtatctgtcagaacccgtggatgtgtacagtgattggatagacgcctgcgaggcggccaatcagtagcgacacagaggacccgccccctgagcagccccgcgtactgtggatccagctgttcggttctggtccagagacattccaggggtccagggtgtgggtcctgggctgtcacagccgtgtgtgtgtgtgtgtgtgtgtgtgtgtgtgtgtgtgtgtgtgtggtggtgtgtgtgtgtgtgtgtgtgtggtgtgagtgagtgtgtgtgtgtgtggctgcgcgtgtcactggggtgggcgtgagtgtgtgctcacaggtacgcggtggtgtcgggttcctgggcctgaggggcctgaactgatctcacttggctccgaaagcctttgctgtgttccctgcagcccctggccccccagccttggggctctggctccccccggcggaattgggggactgtttcctgacatcctggacaagggaagcccactagaggctggaacaggacctctccagcctcctcaccagcaccgtgcccatctcaactggacttcccgccctccttctccaccttctagtgcccgtggccggggattcaaagccgccgttccccaggtccctgggctgggccctgacagggagccgcccccctccccatggtaaccaggaagcccgtttcatgttcagttgcttttgtagaggaagcaagggctgggatggggacagctgtcaatcacaagcccttaaataaagcagccagcgcacaaaaaaagctgaaaaaaaaaaaaaaaaaaaaaaaaaaagcgtgggggggcgcgcccggggcccccgagaaaaacttttcaaaacccaggggggggggcgcggggggcccagagggaagggaaagggggcaaaaggggtcccacagagaaaacccggggacacgcaaacaaggggggggagatcccacacacaaaaaaaaaaggccccggggggaacaccggaggggtttgaggaaacaacccaaagaaggggaggtccgaggagggcaattacaggggaggcttctaaacaacgggggagcccaaaggagaaccgccagaattaaaaattaacccccggaccnnnnnnnn

SEQ ID NO: 23219 - DNA, 1133 bp, Homo sapiens
  misc_feature 1, 1132, 1133: n = A,T,C or G
nacgcgtccgaaaagtggattctctcctgaaatcctggagaaatttgacacgggggcctgcggacggtccttcctctgccagcccccgccctccccactcaggcgcacacctccctgactgacgcattttggcgcacaagctgtaacatggcggcagcgactgcggcctgaactctagggagccgggttgatttttaaagcttcaaaatcctaagactcagcactgttgcggggagcacagggatcagttgtccttgtttttttttggtcttttcttcatttgaagattaagtattggagccatgggaataaaggttcaacgtcctcgatgtttttttgacattgccattaacaatcaacctgctggaagagttgtctttgaattattttctgatgtgtgccccaaaacatgcgagaactttcgttgtctttgtacaggtgaaaaggggaccgggaaatcaactcagaaaccattacattataagagttgtctctttcacagagttgtcaaggattttatggttcaaggtggtgacttcagtgaaggaaatggacgaggaggggaatctatctatggaggattttttgaagacgagagtttcgctgttaaacacaacaaagaatttctcttgtaatggcaaccagagggaaggatacaaatggttcacagttcttcataacaacgaaaccaatcctcatttagatggggcatcatgttgtttttggacaagtaatctctggtcaagaagttgtaagagagattgaaaacaagaaacagatggtgtaagcacaccgtttgcggaggtccggatactcagttgtggaagagctgattcccaagttcctaagtcagaacgagaccccgacggctatctctcatttcctcctctcatttagtgctgagatagtccaggatttcagctcttctgtctttgtccgaagtgtttgcgagatccagaacgaaacgacctcgacattccgaaaccacaaacacaaaccaggtttgcggccggaccgctccagcgctggcttgtctcgcattctcaggggagcgccaaggggtctcacagcgtcatagagggccgggtgccccggtcgcagacaggagagagaacttcacggcgttaagtann

SEQ ID NO: 23220 - DNA, 1433 bp, Homo sapiens
  misc_feature 1, 2, 3, 4, 5, 6, 7, 8, 9, 10, 11, 12, 13, 14, 1418, 1419,1420, 1421, 1422, 1423, 1424, 1425, 1426, 1427, 1428, 1429,1430, 1431, 1432, 1433: n = A,T,C or G
nnnnnnnnnnnnnncagcccagacgggcgggcagggccgggctccgcaggtcgtaatctgaaggagtggctgagggagcaattttgtgatcatccgctggagcactgtgaggacacgaggctccatgatgcagcttacgtcggggacctccagaccctcaggagcctattgcaagaggagagctaccggagccgcatcaacgagaagtctgtctggtgctgtggctggctcccctgcacaccgttgcgaattgcggccactgcaggccatgggagctgtgtggacttcctcatccggaagggggccgaggtggatctggtggacgtaaaaggacagacggccctgtatgtggctgtggtgaacgggcacctagagagtacccagatccttctcgaagctggcgcggaccccaacggaagccggcaccatcgcagcacccctgtctaccacgcctctcgcgtgggccgggcagacatcctgaaggccctcatcaggtacggggctgatgttgacgtcaaccaccacctgactcctgatgtccagcctcgattctcccggcggctcacctccttggtggtctgccccttgtacatcagcgcagcctaccacaacctccagtgcttccggctgctcctcctggctggcgcgaaccctgacttcaactgcaatggtcctgtcaacacacagggattctacaggggctcccctgggtgcgtcatggatgctgttctgcgccacggctgtgaggcagccttcgtgagcctgctggtagaatttggagccaacctgaatctagtgaagtgggaatcgctgggcccagagtcgagaggaagaagaaaagtggaccctgaggccttgcaggtctttaaagaggccagaagtgttcccagaaccttgctgtgtctgtgccgtgtggctgtgagaagagctcttggcaaacaccggcttcatctgattccttcgctgcctctgccagaccccataaagaagtttctactccatgagtagactccaagtgctgcggttgattccagtgagggagaaagtgatctgcagggaggtggacaccgagccctgagtgctgtgctgctgctggtctcctgatggctgttgctgcagaagatgtcctcgtagactgtcattgctcctcaggtgcctgggccgctgaacagtccttgggtcattgtcagctgagaggcttatactaaagttattattgtttttcccaagttctctgttctggattttcagttgcatattaatgtaacgggccatggggtatgtacatgtaggggctgaggttggaggcttactaatttccctgtagggaagactcccagcacttctggaactgtgcttctctttatttttctacttctcaatttgatggttcgattaaagccttctagtatctcaannnnnnnnnnnnnnnn

SEQ ID NO: 23221 - DNA, 1883 bp, Homo sapiens
cgctcactaaacgttagctctcgccaataacatcactgattcactataaagtttctctggctgtgtgctattcgctgcgtccacagcagtgaagaagacagacgcagcccctgaccaacctcgccaagcccgggcgccgagccaggacgttgagccaagtccccatctcctaggactcgcagtgcggaggctgcgggccccgaccagcgccgagactacaagtcccagaagggcgcgcggcgacatcgccgggcccgccccccgcgcacgcgcggcgccgtgacgctaaggccgcgagcgagcgcgggtggctgcggcggctgcggccggcggggcggggcggggccacctggcagtggctgcctttagggcggagccggctcccgctctcctcagtctgcggtgggctagcggacggtccggcttccggcggccgtttctgtctcttgctggctgtctcgctgagtcgcggccgccttctcatcgctcctggaaggtcccgagcgcgacaccatgtcggagcccgggggcggcggcggcgaggacggctcggccggattggaagtgtcggccgtgcagaatgtggcggacgtgtcggtgctgcagaagcacctgcgcaagctggtgccgctgctgctggaggacggcggcgaggcgccggccgcgctggaggcggcgctggaggagaagagcgccctggagcagatgcgcaagttcctttcggacccgcaggtccacacggtgctggtggagcgctccacgctcaaagaggacgtcggtgatgaaggagaagaagaaaaagaattcatttcctataacatcaacatagacattcattatggggttaaatccaatagcttggcattcattaaacgtactcccgtgattgatgcagataaacccgtgtcttctcagctccgggtccttacactcagtgaagactcgccctacgaaactttgcattctttcattagcaatgcagtggctcctttttttaagtcctacattagagagtctggcaaggcagacagggatggtgataaaatggctccttcagttgaaaagaagattgcagaactcgaaatgggactccttcacttgcagcaaaatattgaaattccggagatcagcctgccaattcatccaatgatcacaaatgttgcaaaacagtgttatgagcgtggagaaaagccaaaagttacagactttggtgataaggttgaagacccaacatttcttaatcagttacaatctggagttaaccgctggatccgagaaattcaaaaagtgaccaaactggatcgagatcctgcatcaggaactgccttacaggaaattagtttttggctaaacttggaacgtgcgttataccgcatccaggagaaacgggagagcccggaagttctcctgactctggatatcttgaaacatggcaagcgcttccatgccaccgtcagttttgacactgacacaggtctaaaacaggctttggaaactgtgaatgactacaatcctctgatgaaagatttccctctgaatgatttgctgtctgccacggagctggacaaaataagacaggcgcttgttgccattttcacacatttgagaaagatccgaaacacaaaatatcctattcagagggcactgcgtttggtggaggcaatttcaagagacttgagttctcaattactcaaagtattgggcactaggaaattgatgcatgttgcttatgaagaatttgaaaaagttatggtagcatgctttgaagtttttcagacttgggatgatgagtatgagaaacttcaggtattgttgagagacatcgtcaaaaaacctcgtgccgaattcttggcctcgagggccaaattccctatagtgagtcg

SEQ ID NO: 23222 - DNA, 2859 bp, Homo sapiens
  misc_feature 1, 2, 3, 4, 5, 2836, 2843, 2859: n = A,T,C or G
nnnnnaaacaacatctactttagcacccatggctttctcagcaacttaaaagatacggggcctgacgaactgagaccaatgctggcacagaatttaatgctaaagaggttttctgatgcttgggaaatgtgcaggattctgaatgatgaggctgcctggaatgagttggccagagcttgtctacatcacatggaagtggagtttgcaatccgtgtttatcggagaattggaaatgttggcatagtgatgtccttggaacaaataaagggaatagaggactacaatcttttggcaggacaccttgccatgtttaccaacgattataacctggctcaggacttgtaccttgcatccagctgtcctattgctgccctggagatgagaagggatttacagcattgggacagtgctctacaactggcaaagcatttggccccagaccagataccttttatatcaaaagaatatgctattcagcttgaattcgcgggtgattatgtaaatgctttggctcattatgagaaaggaataacaggtgataataaggaacatgatgaagcttgtctggctggagtggcccagatgtccataagaatgggagacatacgtcgaggggttaaccaagccctcaagcatcccagcagggtccttaaaagagactgtggagccatattggagaatatgaagcaattttcagaagcggcccaactgtatgaaaaaggtctctactacgataaagcagcatctgtttacatccgctctaagaattgggcaaaagttggtgatcttctgccccacgtttcttctcctaagatccatttgcagtatgccaaagccaaggaagcagatggaagatacaaagaagctgttgtagcttatgaaaatgcaaaacagtggcaaagtgtaatccgcatctatctggatcacctcaataatcctgaaaaagctgtcaatattgttagagagacccagtctctggatggagccaaaatggtagccaggttttttctacagcttggtgactatgggtctgccatccagtttcttgtcatgtccaaatgcaacaatgaagctttcacactggctcagcaacacaacaaaatggaaatctatgcagatattattggttctgaagacactactaatgaagactatcaaagcattgccttatactttgaaggagaaaagagatatcttcaggctggaaaattcttcttgctgtgtggccaatattcacgagcacttaaacacttcctgaaatgcccaagctcggaagataatgtggcaatagaaatggcaattgaaactgttggtcaggccaaagatgaactgctgaccaatcagctgatagaccatctcctgggggagaacgatggcatgcctaaggatgccaagtacctgttccgcttgtacatggctctgaagcaataccgagaagctgcccagactgccatcatcattgccagagaagagcagtctgcaggcaactaccggaatgcacacgatgttctcttcagtatgtatgcagaactgaaatcccagaagatcaaaattccctccgagatggccaccaacctcatgattctgcacagctatatactagtaaagattcatgttaaaaatggagatcacatgaaaggggctcgcatgctcattcgggtggccaacaacatcagcaaatttccatcacacattgtacccatcctgacgtcaactgtgattgagtgtcacagggcaggcctgaagaactctgctttcagcttcgcagctatgttgatgaggcctgaataccgcagcaaaatagatgccaaatacaaaaagaagatcgagggaatggtcaggagacccgatatatctgagatagaagaggccacgactccatgtccattctgcaaatttcttctcccagagtgtgaactcctctgtcctggatgtaaaaacagtatcccatattgcattgcaacaggtcgacacatgttgaaagatgactggacggtgtgtccacattgtgacttccctgctctatactcagaattgaagatcatgctaaacactgaaagcacatgtcctatgtgttcagaaagattaaacgctgctcagctgaaaaagatttcagactgtacccagtacctgcgaacggaggaggaactgtgattggcacgtgcagatacaatgctcctgagaagacagcattttccacaggaggctgtttcctcccctggtggatttaagagacggtcctttctggatacagagaaatgaaacaacggtgacctctccaggtcggcactttccacttctgtacggtggcaaaacgatgacatgtaaccttgctgtttattgtactttgtatattatttcctcttcaaagtctttcttacatactctatcctctgcactgttaatagtaacctatgacataattgtaaatattcagctttttgctaacttttgtattttgaaaaactttaaaataaaattgttgactagatatctgtgacgtttttctggatttggagacagaaaaagagataaaggtagttctgaaggacattgtcaagtttgaacacagatgtgaatggtgtaaaaagcttgaaatgaaaagctgttgtttacacaaatcacagctattaagcagaatcagcccagaagcaaaacatcaaaaattaggaaaaccaatcttgtaaagaatgaatgaaactatcagcttatacctatctgccgagtcattctactgcatactacagaattcccgtcacaaaattaagtcatttgacttccccctgaaaaccatacattgtttggaatcatcttctctgaggctgtgtgaaggttncttttcncccatatcaccggacn

SEQ ID NO: 23223 - DNA, 2828 bp, Homo sapiens
  misc_feature 1, 2, 3, 2827, 2828: n = A,T,C or G
nnncagggtccccgcgcaccgcggagtgggctgtgattggaggaggagcccgtgccgggcgggcccgagcgggtgtcgagccggttcctccagtctgccccgcgcgcggagctgcgcgcactgggtccccaagagcccgcgggcgtccggcagccgagcgcacgttctttcggatgcacacgcccgggtccctggcgtctgacgccgtggggagggcagcgaggccccaggtacttactacaccattctttggcgaaggctattcagcagtggtgacctcttccaatccaacactctacagattattatctctggactcccagctgacaccctgccggaggcaagagctactaagccaactggaactgtgccttttctcttgtcaaggtttttttcttacacaggaaaaagaaagaaaaaaaaaagatgaagttgggcaaagtggagttctgccattttctgcagctaatagctcttttcctgtgtttttctgggatgagtcaagcagaactctcaaggtccagatcaaagccctatttccaatcagggaggtcccggaccaagcgcagctgggtgtggaatcagttctttgtgctggaggaatacatgggttcagaccccctctatgtaggaaagcttcactctgatgttgataaaggagatggttccatcaaatacatcttgtcaggcgaaggggcaagttccattttcattattgatgagaacactggggatattcatgccaccaagagactggatcgtgaggagcaggcctactacacgctccgagctcaagcgctggataggctcaccaacaaacccgtggagcccgagtcggagtttgtcatcaaaattcaggatatcaacgacaatgaacccaaatttttggatggcccatacacggcaggagttcccgaaatgtctcccgtggggacctcagtggtacaagtgacagcgacggatgctgatgatcctacatatggcaacagtgccagagtggtctacagtattctgcaaggacagccgtacttctcagtggagccaaagacaggagtcatcaagactgcccttccaaacatggatagagaggctaaagaccagtatttgcttgttattcaggcaaaggatatggttggtcaaaatggaggactgtcaggaactacatcagtcactgtgaccctaactgatgtcaacgataatccacctcgctttcctcgaaggtcttatcaatataacgtcccagagtcattacctgtagcctcagttgtggccagaattaaagctgctgatgcagatattggagctaatgctgaaatggagtacaagattgtggatggtgatggtttgggcatttttaagatttctgttgacaaagaaacccaggaaggaatcattactatacagaaggagctggattttgaagccaaaacaagttacacgctacggatagaagctgcaaataaagatgccgaccctcgctttctgagcttgggtccgttcagtgacacgacaactgtgaagataattgtggaagatgtagatgagccccctgtgttctcttcacccttgtaccctatggaggtgtcggaagctacccaggttgggaatatcattggcactgtagcagctcatgacccagattcttccaatagccctgtgaggtactcaattgacagaaacacagacttggagagatacttcaatattgatgccaacagtggggtcatcacaactgccaagtctttggatcgagagacaaatgctattcacaatatcacagtccttgcaatggagagccagaatccatctcaagtaggaagaggctatgtggccatcactatacttgacatcaatgataacgcccctgaatttgccatggactatgagaccaccgtctgtgaaaatgcccagccggggcaggttatccagaaaatcagtgctgtggataaagatgagccatccaatggacaccagttttacttcagcttaacaacggatgcaacaaataaccacaacttttcattgaaagataacaaagacaacacagcctcaatactgaccaggagaaacggcttccggagacaggaacaatcagtttactatctgccaattttcattgtggacagtggatctccctcacttagcagcaccagcaccctcaccatccgcgtgtgtgactgtgatgctgacggcgtagcccagacctgcaatgcagaggcctatgtcctacctgctggcctcagtacaggagccctgatagccatactcgcctgtgtcttgacattattggtgttgatcctccttatcgtcactatgagaagacggaaaaaagagccccttatttttgacgaagaaagagacatcagagaaaatattgtgagatacgatgacgagggcgggggagaggaggacacggaagcgtttgacatggctgcactgagaaacctcaacgtcatccgagacaccaagacccggagggatgtgactccagaaattcaattcctgagtcgaccagcttttaaaagcatcccagataatgtcatctttagggaatttatttgggaaagattaaaagaagccgatgttgatcctggtgctcctccttatgactccctgcagacatatgcttttgaaggaaatggctcagttgctgaatcactcagctctttagattccatcagctcaaactctgatcagaactatgactacctaagtgactggggacctcgctttaaacgactcgcggacatgtatgggactggccaagagagtttgtactcatagccttggaaccttaattcgaaatgtactgaagaaaaagtaacann

SEQ ID NO: 23224 - DNA, 338 bp, Homo sapiens
caagcagtgaccctgatgatggatgccaccaatatgccagctgtcaaagccatcatatatcagtatatggaagagatttatcatagaatccccgactcagacccatcttctagcaaaacaaggcagatcatctccaccatccggacgcagaatcttcccaactgtcggctgatttcccgaagccactactcccccatctacctgtcgtttgtcatgcttttggctgccctgagctggcagtacgcggggtgccacctatcacaccccatcctaaagtaaggtcagctaaataagctatcgagcccataccccgaaaatgttggttatacccttcccgt

SEQ ID NO: 23225 - DNA, 2105 bp, Homo sapiens
  misc_feature 1, 2, 3: n = A,T,C or G
nnncaaagcagctcttatttgaaaaaccactgggttccgagttcattactacaggaaaaactgttctcttctgtggcacagagaaccctgcttcaaagcagaagtagcagttccggagtccagctggctaaaactcatcccagaggataatggcaacccatgccttagaaatcgctgcggctgtttcttggtggtgttggaatggtgggcacagtggctgtcactgtcatgcctcagtggagagtgtcggccttcattgaaaacaacatcgtggtttttgaaaacttctgggaaggactgtggatgaattgcgtgaggcaggctaacatcaggatgcagtgcaaaatctatgattccctgctggctctttctccggacctacaggcagccagaggactgatgtgtgctgcttccgtgatgtccttcttggctttcatgatggccatccttggcatgaaatgcaccaggtgcacgggggacaatgagaaggtgaaggctcacattctgctgacggctggaatcatcttcatcatcacgggcatggtggtgctcatccctgtgagctgggttgccaatgccatcatcagagatttctataactcaatagtgaatgttgcccaaaaacgtgagcttggagaagctctctacttaggatggaccacggcactggtgctgattgttggaggagctctgttctgctgcgttttttgttgcaacgaaaagagcagtagctacagatactcgataccttcccatcgcacaacccaaaaaagttatcacaccggaaagaagtcaccgagcgtctactccagaagtcagtatgtgtagttgtgtatgtttttttaactttactataaagccatgcaaatgacaaaaatctatattactttctcaaaatggaccccaaagaaactttgatttactgttcttaactgcctaatcttaattacaggaactgtgcatcagctatttatgattctataagctatttcagcagaatgagatattaaacccaatgctttgattgttctagaaagtatagtaatttgttttctaaggtggttcaagcatctactctttttatcatttacttcaaaatgacattgctaaagactgcattattttactactgtaatttctccacgacatagcattatgtacatagatgagtgtaacatttatatctcacatagagacatgcttatatggttttatttaaaatgaaatgccagtccattacactgaataaatagaactcaactattgcttttcagggaaatcatggatagggttgaagaaggttactattaattgtttaaaaacagcttagggattaatgtcctccatttataatgaagattaaaatgaaggctttaatcagcattgtaaaggaaattgaatggctttctgatatgctgttttttagcctaggagttagaaatcctaacttctttatcctcttctcccagaggctttttttttcttgtgtattaaattaacatttttaaaaagcagatattttgtcaaggggctttgcattcaaactgcttttccagggctatactcagaagaaagataaaagtgtgatctaagaaaaagtgatggttttaggaaagtgaaaatatttttgtttttgtatttgaagaagaatgatgcattttgacaagaaatcatatatgtatggatatattttaataagtatttgagtacagactttgaggtttcatcaatataaataaaagagcagaaaaatatgtcttggttttcatttgcttaccaaaaaaacaacaacaaaaaaagttgtcctttgagaacttcacctgctcctatgtgggtacctgagtcaaaattgtcatttttgttctgtgaaaaataaatttccttcttgtaccatttctgtttagttttactaaaatctgtaaatactgtatttttctgtttattccaaatttgatgaaactgacaatccaatttgaaagtttgtgtcgacgtctgtctagcttaaatgaatgtgttctatttgctttatacatttatattaataaattgtacatttttctaaaaaaaaaaaaaaaaaaaaaaaaaaaaaggacggccgctagact

SEQ ID NO: 23226 - DNA, 1177 bp, Homo sapiens
  misc_feature 971, 1176, 1177: n = A,T,C or G
ccgggcaggtaccgggatgtgatgctggagacctacagccacctgctctcagtagggtatcaagttcctagaaccagaggtggtcatgttggagcaaggaaaggaaccatgggcactgcagggtgagaggccacgtcacagctgcccaggagagaaattatgggaccataatcaacatagaaaaatcatcggttataaaccagcttcctctcaagatcaaaaaatttattctggggaaaaatcctatgagtgtgctgaatttggaaagagcttcacctggaagtcacagttcaaggtacatctgaaagttcctacaggagaaaaactctatgtatgtatgaatgtgggagggctttgtacagaagccagaattcatcacacatcagaaaacccatatgagagagaagccccctaagtgcaatgaatgtggaaaatccttttttcaagtatcgtctcttttcaggcatcacagaattcataccggagaaaaactatatgaatgtagtgaatgtgggaaaggtttcccttataactcagatctcagtatacatgagaaaattcatactggagagagacaccatgaatgcactgactgtggcaaagcgttcacacaaaagtccacactcaagattcatcagaaaatccatacaggcgagagatcctacatctgtatggaatgccgggcaggcttcatccagaaaacacaattgattgcacaccgaagaattcatagtggagaaaaaccatatgaatgcaataactgtggcaaatccttcatttccaagtcaccaacttcaggtacatcaacgtgttcacacaagagtgaagccctatatatgtaccgaatatggggaggtcttcagcaaataattccaaactcatgacactgagaagatcaaagtagagagaaatctccatagtactgagtggggaggcttactaacgtcgaggtgatatcatccaaaaatccnggtagaaacctagatggggacgggggaaaccccgaaagcagaccacggtcccaaatcacagcgaaactcattgtcgatgtctggtctcggacgagctgtacacaaattcagggacctaaggcggggaatcacaacgacaaaacagaacatgaccggggccgacaaaacacaatatagcgagacacacgacatagtgaccagatann

SEQ ID NO: 23227 - DNA, 630 bp, Homo sapiens
  misc_feature 630: n = A,T,C or G
gcgcggcgtgagcatgctttttcctgtttggctgggaaagggaaggctgaactgctgagtctgacacttaacaggacttcggcattcccctgaatacagactagatcagagattttatttttttaattgaaaagtaacttgggttctctttagaaacccttatttggtgtgcgcatctggctatttcacagagatttcagttttgcaaagaagtcggagttgatttcttccctcagacaagctattggttgttggtgggcaacagaagttgctcagcatagacaggggaaaaaaccggttacggatgagactgaaagaaaacctcaaaggagaactctgagaattcatctcaggatgaagctgcaagggcaaaggagaagtacttgtgacacaagcaaatgggtccattgatcaacagatgcaagaagattcttctcccaactactgtacctcctgcaacgatgagaatctggctccttggaggcctgctgccattcctgctgctcctctctggcctgcagagacccacagagggttctgaggttgcaattaaaatcgacttcgacttcgcaccaggttcttttgatgatcagtaccaaggctgtagcaacaggttatggagaaactaan

SEQ ID NO: 23228 - DNA, 1632 bp, Homo sapiens
tttgcagtaagtcttgtgtctccttttttttttttttttttgagacagagtctcaccctgtcacccaggctggatggagtgcagtggtgtgatctcggctcactgcaagctccgcctcctgggttcacacttttctcctgcctcagcctcctgagtagctgggactacaggcgcccgccaccacgcccagctaattttttttgtagttttagtagagtcggggtttcaccgtgttaaccaggatggtctcgatctcctgcccttgtgatccgcccgcctcggcctcccaaagtgctgggattacaggcgtgagctaccacgcccggccgtcttgtgtcttctttactgtgactgggtcgtttttaagaaaggttatcagctttgtgtttggtttcccacagttgataaaaatctatcaaaaacattataatttgcaaggaaaaaggtttttcaatggctgcaggaaccagaaagaaatagcatttcttatctgtataaacacaaacatttaaagctagtcacaccgcaggtaaatccaatatagtatgcaaaagttctataaaaatgaacaagagatacacgtttactttcattgctccaacagtcaaatgtaaatctgcatgagagttgcgctgcagcagtttgctggtccaatttaagagttcaaggtcctttttgtacatctggcccactgatgtccacatcccagataaattttcaaaagacggaaatcagggcaaagactccatataacaaagcgcaaggatatgctactaaaagttgctgtccttccatggctaatgcagaaataaatattttggaagcagaaaaactacaccatccaataatcccagcagtgagaatgattcctaccattccttgcaaagaaaatatcactgcaaagctggaaagtaggatcatgggcagaagacaatatccaaggacacttgccacacaaccaaatgaaacacctgtcatactcattaagtttaataaacaaaacattcctagacatccaattgcactgatcccgtatacatagccaaactggattttgccagccagtagcaatgtggctccaaaagcaaggcaaaaaaccattggacctgccaaatcagtttcattcatgatgctgccatctgctacttttaacggatgtaatactgttagtgttttttgccagatgtggtcaaaattgatacctaactcttctaataaaggtggctcatcctcaaagttgtttccatagaaaggctgaggtgaagctggagtatatgcctgagttggctggtaaatctgcccggtgtatggctgttgtggctgcatcatgtctggagggacaaatctgccttgctgcgaatagtcatagccagcatactgtttgctatagggtcctccacttcctccataatcataggactgctgtgactgatcatcgatgctgtaacttgtctggtagaaatccgtgtttaagttttcaaagcctgacattgcaaataatcaaactctgagcgctgcgctggcggcaaaggcagtagcttcactaatcccaaacaacccccaaactctgtttcagaccctgaaccagccccgttgctacgtgtcacagggccggacgcgtgggtcgactcc

SEQ ID NO: 23229 - DNA, 2216 bp, Homo sapiens; identical to SEQ ID NO: 22164
  misc_feature 1, 2, 3, 2215, 2216: n = A,T,C or G

SEQ ID NO: 23230 - DNA, 2883 bp, Homo sapiens
acccacgcgtccggtgatctgcaataaagccctgaaaaccttcatttgctgatatcaattcattcaggacaaaaaccctcactgctccttcctgattggccttgagatcacgcaggcagccctgacgaaacccgaactagtggggtcaggagacacacacaatatgttgagaagattgttatcaaaatgcaatgtatgggtggcccctttctctttcggttctaggcgcttcaggagccgcggcttaaggtgcagacatggccaagtctaagacccatgccacacacaaccagtcccgaaaatggcacagaaatggtatgaagaaaccccgatgacaaagatacaaatctcttaaggaggtggaccccaagttcccgaggaacatacgctttgccaagaggcacaagaagggcctaaagaagatgcaggccaacaatgccaaggccatgagcataggtgccaaggctatcaaggccctcgtaaagcccaaggaggttaagcccaagatcccaaagggtgtcagccgcaagctcgatcgacttgcctacattgcccaccccaagcttgggaagcgtgctcgtgcccgtattgccaaggggctcaggctgtgccggccaaaggccaaggccaaggccaaggatcaaaccaaggcccaggctgcagccccagcttcagttccagctcaggctcccaaacgtacccaggcccctacaaaggcttcagagtagatatctctgccaacatgaggacagaaggactggtgcgaccccccacccccgcccctgggctaccatctgcatggggctggggtcctcctgtgctatttgtacaaatagcacagggaggacgccccagccccatgcagatggtagcccaggggcgggggtggggggtcgcaccagtccttctgtcctcatgttggcagagatatctactctgaagccctttgtaggggcctgggtacactttgggagccctgagctggaactgaagctggggctgcagcctgggcccttggtttgaatccttggcccttgtggccttggcccttgggcccttggccttgccttggcctgttggccggcacagcctgagcccccttggcaaatacggggcacgagcacgcttcccaagcttggggtgggccaatgtaggcaagtcgatcgagcttgcgggctgacaccctttgggatcttgggcttaacctccttgggctttacgagggccttgatagcctcggcacgtgcactcatggccttggcattgttggcctgcatcttctttaggccctttttgttgtgcttcttggcaaagcgcatgttcctcaggaacttggggtccacccccttaagagattcgtatctttgtgatcggggtttcttgataccatttctgtgccattttcgggagccgcggcttatggtgcagacatggccaagtccaagaaccacaccacacacaaccagtcccgaaaatggcacagaaatggtatcaagaaaccccgatcacaaagatacgaatctcttaagggggtggaccccaagttcctgaggaacatgcgctttgccaagaagcacaacaaaaagggcctaaagaagatgcaggccaacaatgccaaggccatgagtgcacgtgccgaggctatcaaggccctcgtaaagcccaaggaggttaagcccaagatcccaaagggtgtcagccgcaagctcgatcgacttgcctacattgcccaccccaagcttgggaagcgtgctcgtgcccgtattgccaaggggctcaggctgtgccggccaaaggccaaggccaaggccaaggccaaggccaaggccaaggatcaaaccaaggcccaggctgcaagcagctgcagccccagcttcagttccagctcaggctcccaaacgtacccaggcccctacaaaggcttcagagtagatatctctgccaacatgaggacagaaggactggtgcgaccccccacccccgcccctgggctaccatctgcatggggctggggtcctcctgtgctatttgtacaaataaacctgaggcaggaaaaaaaaaaaaaaaaaaaaaaaaaaaaaaaaaaaaaaaaaaaaaaaaaaaaaaaaaaaaaaaaaaaaaaaaaaaaacgggggggcatactttgaggggggggaggagaaaaaaggaggagaagaaagaggggagcaagaggggcgacacaggacggaccacaggagcccacattttttgcaggacaaagggggggaaaaacgcggggggaccccaaaatgagggaggggcgaagaaataaatgcagcaagaaacgagagggaacacgagcggagaaaagaaaaactagcacacgaaaacccacggaggaaaaagcaagcaggggagcgagagagaggggaagagaagagaagacaggggagccagaagaacgcacagacaaacagcgaacaagaaagaaaagagagaagaaagaaacaaacaaaacacaaaccgaagagaagagagagaaaagcgaacggcaaaaagaacaccacataattttagagaggggggagaagggaggtagaaagaggcggggttttaaagatactggataatgttgagggaggtgggaaaggagggaggaaagagaaagaagaagagatggagggagagagaggggagaagagatagaggagcacagggaacgagagggggcgggaaggagcagaaaagagggggagagagctgaggaggagaagggagagaacagaaagaaagagggcggagggagaaggggagaagtcgcgaagcccggtgaggggaggcgagagcaggagagacgaaggaacgcgaggagaggcgaacagaggaaagaaagaagagaaagggggagtgaacggacccgga

SEQ ID NO: 23231 - DNA, 1693 bp, Homo sapiens
  misc_feature 1552, 1690, 1691, 1692, 1693: n = A,T,C or G
gcgtgtccgcggccctgcgagggctccccggctccggacagcccagggcggccgggggaggagcgcgctgcgacggccgtggcgaaagtgcggttgtggatgcgcggagaggccggcagcggtggcagcggcagcggaggaggaagctgagcagggcggcggcggcggtggaacctgcggggctggggcgcgcgccatgggccgcctgcactgcactgaggacccggtgccggaggccgtgggcggcgacatgcagcagctgaaccagctgggcgcgcagcagttctcagccctgacagaggtgcttttccacttcctaactgagccaaaagaggtggaaagatttctggctcagctctctgaatttgccaccaccaatcagatcagtcttggctccctcagaagcatcgtgaaaagcctccttctggttccaaatggtgctttgaagaagagtctcacagccaagcaggtccaggcggatttcataactctgggtcttagtgaggagaaagccacttacttttctgaaaagtggaagcagaatgctcccacccttgctcgatgggccataggtcagactctgatgattaaccagctcatagatatggagtggaaatttggagtgacatctgggagcagcgaattggagaaagtgggaagtatatttttacaactaaagttggtggttaagaaaggaaatcaaaccgaaaatgtgtatatagaattaaccttgcctcagttctacagcttcctgcacgagatggagcgagtcagaaccagcatggagtgtttctgctgatttctgtccctgcatctcccctggccccgttccctgccctcctcccttccctgggtgactgctctgagaggcacttcactcacaggcctgtgggatgctccatggggccctgctggctccatggggcccaggtgcaaagggtttctgaaaaacagcaggattaagtactgaaagagcccaacacaattaccctgtaaactctctgttagggcaaccaccaccacctgtcttccaggacacatttttagatactctgacaggccactgcatctcagattcaggggagaaaataagttgtcacctccccttcaaagttccagagtaaacaaatggtgccatcattcaagataacatgctgatcaccctcctcccaaaaagcaagagcttgtttatggctgaggaatcggcggattgtctgaatgacacatatacagagcccccacggatttctgcacactctgggtctgtgctggtggaacattgccaatcagttcttaatgaggcacctgtgtgtaaatacatgcttggtcttctctgcagagaactgaggctaaactctgtccctacttctggttttgccctgtcatgtcgtaacgaggtgggccttttgaggccattttagtttgagttcgagccaaccacctctgttggttagatgatgaataaaaaggttctgaagaaaagatatgaaaaaaaataactatccatttttcaagataatataactatttctccatctccctttccattatnttagttttgtttataaaactgtttggcccctttgccccaattttttttaatttggacaactttttcttggcgcgccaatattgggcttccttggcaattcccccctttggggacgggttaaaaaaacacgggccgggnnnn

SEQ ID NO: 23232 - DNA, 1739 bp, Homo sapiens
  misc_feature 1, 2, 1733, 1734, 1735, 1736, 1737, 1738, 1739: n = A,T,C or G
nncacgagggtgtagttgtgaccttcgcggtaggtgccggttggggccgctcgtgattgttatcttggtgctgcagaggacagcagaagaggagattgggtcagaaaactgccctgccgcaccagagcacagcgcactagtgggacaggggtcctgactcagacttaactggctgtgtctcgtggtttttcactgtcctggaaaaggcctgaagtggcactgaaatgaggcatagatgagtccccacgacagtccggtttgtagattccctgatctgcaattcttcccgttccttcatggatttgaaggctctcctttcttccttgaatgactttgcatccctctcgtttgctgagagttgggacaatgttggattactggtggaaccaagcccaccacatactgtaaatacactcttcctgaccaatgacctgactgaggaagtgatggaggaggtgctgcaaaagaaggcagacctcattctctcctaccatccgcctatcttccgacccatgaagcgcataacctggaacacatggaaggagcgcctggtgatccgggctctggagaacagagtcggtatctactctcctcatacagcctatgatgctgcgccccagggcgtcaacaactggttggctaaagggcttggagcttgtacctccaggcccatacatccttccaaagctcccaactaccctacagagggaaaccaccgagtagaattcaacgttaactacacccaagacctggacaaagtcatgtctgcagtgaaaggaattgacggtgtttctgtcacttctttttctgctaggactggtaatgaggaacaaacacggattaatctgaattgtactcagaaggctttgatgcaggtggtagattttctttcccggaacaaacaactttatcagaagacggaaattctgtcactggagaagcctttgcttctacatactggaatgggacggttatgcacactggatgaatctgtctccctggcaaccatgattgatcgaataaaaagacacctaaaactatctcatattcgcttagcccttggggtggggagaaccttagagtctcaagtcaaagtcgtggccctgtgtgctggttctgggagcagcgttctgcagggtgttgaggctgacctttacctcacaggtgagatgtcccatcatgatactttggatgctgcttcccaaggaataaatgtcatcctctgtgaacacagcaacactgaacgaggctttctttctgaccttcgagatatgctggattctcacttggagaataagataaatattatcctatcagagactgacagggaccctcttcaggtggtataattgcagaaacatcaggataacacattctacaaatcagctggatgccaacttaaatttgtaacatgagtcagtgggactggtgtgcttccagagagtgtcttcgagggtatcatcatttccggtttgttaatcttattcaccaaatgttctatcgctcgtaaggtaaaactgtaatataactaccatattaaataacaaatgttcattataaactctaggaaagattgaataaaatctgtttacttaacaaactttggaaggagctcaagtgattctgtccttagtttaattgtagatgggatggatccatttgggtatctctgcccttggttagttaacattatgcttgaaaaacttggcttgaacacttctaggtagtagccnnnnnnn

SEQ ID NO: 23233 - DNA, 947 bp, Homo sapiens
  misc_feature 1, 4, 8, 947: n = A,T,C or G
ngcncgtntcgttagcccgtcccggtccggaattccccggtcgtccctcgcggccggacaactttaaacaggtgatagaagcggccaatgggaccaccaataactgccacaacaatgagacggtgattctgacgcctaccatggactcgcgactctacatgctctccttcctgcccttcctggtgctgctggttttcatcaggaacctccgagccctgtccatcttctccctgttggccaacatcaccatgctggtcagcttggtcatgatctaccagttcattgttcagaggatcccagaccccagccacctccccttggtggccccttggaagacctaccctctcttctttggcacagcgattttttcatttgaaggcattggaatggttctgcccctggaaaacaaaatgaaggatcctcggaagttcccactcatcctgtacctgggcatggtcatcgtcaccatcctctacatcagcctggggtgtctggggtacctgcaatttggagctaatatccaaggcagcataaccctcaacctgcccaactgctggttgtaccagtcagttaagctgctgtactccatcgggatctttttcacctacgcactccagttctacgtcccggctgagatcatcatccccttctttgtgtcccgagcgcccgagcactgtgagttagtgggtggacctgtttgtgcgcacagtgctggtctgcctgacatgcattcttggccatcctcatcccccgcctggacctggcatcttctccctggtgggctccgtgagcagcagcgccctggccctcatcatcccaccgctcctggaggtcaccaccttctactcagagggacatgggctccccctcaccatcttttaaggacgccctgatcagcattcctgggccttcgatgggcctttggtggtgggggacctattgaggcn

SEQ ID NO: 23234 - DNA, 3708 bp, Homo sapiens
  misc_feature 1, 2, 3701, 3702, 3703, 3704, 3705, 3706, 3707, 3708: n = A,T,C or G
nngtattaagggcatcccatctctaatttcaggagagtgaatctatctcttgagctgcctgataattcggtgcctccctcacaagagctcttccaggagttcacttcacaaatgtgtactgagttcccactctgtgttaaccagaatggttccagcgatgtctgcaggaaacaacgtctgcttggaggagttcagagggtactggagggaggaagcacagttggagctagacgctttcttcaggagcttacctggcgcatgcgtggtgcgcacgcgtcccgtctcctcggccgacaagctctcgcgagacgagccgtgcaggctgaaaaaatggcgccacccagtacccgggagcccagggtcctgtcggcgaccagcgcaaccaaatccgacggagagatggtgctgccaggcttcccggacgccgacagctttgtgaagtttgctcttgggtccgtggtggcagtcaccaaggcatctgggggcctaccacagtttggcgatgagtatgatttttaccgaagttttcctggcttccaagcattttgcgaaacacagggagacaggttgcttcagtgcatgagcagagtaatgcagtaccatgggtgtcgcagcaacattaaggatcgaagtaaagtgactgagctggaagacaagtttgatttactagttgatgccaatgatgtaattctggagagagtgggtattttactggatgaagcctcaggtgtaaacaagaatcaacagcctgtcctccctgccggcttgcaggtccccaaaacggtagtgtccagctggaaccgtaaggcagcagaatatggcaaaaaagcaaaatctgaaactttccggctgcttcatgcaaaaaatatcatccgacctcagctcaagtttcgagagaagattgacaattccaacacaccatttcttcctaaaatcttcatcaaacccaatgctcagaaacctctccctcaagctctctctaaggaaaggcgggaacgcccacaggatcgtcctgaggacttggacgtcccccctgcactggctgatttcatccatcagcagagaacccagcaggttgagcaagacatgtttgcacatccttatcaatatgaactaaatcactttaccccagcagatgcagtgcttcaaaagccacaaccccagttatacagacctatagaagagacaccatgccatttcatatcctccctggatgaactcgtggaactcaacgaaaagctcttgaattgtcaggaatttgcagttgacttggagcaccactcttacaggagcttcctgggactgacctgcctgatgcaaatttctactcggacggaagacttcatcattgacaccctcgagcttcgaagtgacatgtacattctcaatgagagcctcacagacccagccatcgttaaggtctttcatggtgctgattcagacatagaatggctacagaaagactttgggttgtatgtagtaaacatgtttgatactcatcaggcagcacgccttcttaacctgggcaggcactcactcgatcatctcctgaaactctactgcaacgtggactcaaacaagcaatatcagctggctgattggagaatacgccctctgcccgaggagatgctcagctacgcccgggatgacacccattacctgctatatatctatgacaaaatgaggctggagatgtgggagcgcggcaacgggcagcccgtgcagctgcaggtggtgtggcaacggagcagggacatctgcctcaagaaattcatcaaacctatcttcacggatgagtcctaccttgaactctataggaagcagaagaagcaccttaacacacagcagttgacagcctttcagctgctgtttgcctggagggataaaacagctcgcagggaagatgaaagttacggatatgtactgccaaaccacatgatgctgaaaatagctgaagaactgcctaaggaacctcagggcatcatagcttgctgcaacccagtaccgccccttgtgcggcagcagatcaacgaaatgcaccttttaatccagcaggcccgagagatgcccctgctcaagtctgaagttgcagccggagtgaagaagagcggaccgctgcccagtgctgagagattggagaatgttctctttggacctcacgactgctcccatgcccctccggatggctatccaatcatcccaaccagtggatctgtgccagttcagaagcaggcgagcctcttccctgatgaaaaagaagataacttgctgggtaccacatgcctgattgccacagctgtcatcacgttatttaatgaacctagtgctgaagacagtaaaaagggtccattgacagttgcacagaaaaaagcccagaacatcatggagtcctttgaaaatccatttaggatgatcagcaaccgttggaagctggcccaggtacaagtacaaaaagactctaaagaagctgtcaagaagaaggcagctgagcaaacagctgcccgggaacaggcaaaggaggcgtgcaaagctgcagcagaacaggccatctccgtccgacagcaggtcgtgctagaaaatgctgcaaagaagagagagcgagcaacaagcgacccaaggaccacagaacagaaacaagagaagaaacgactcaaaatttccaagaagccaaaggacccagagccaccagaaaaagagtttacgccttacgactacagccagtcagacttcaaggcttttgctggaaacagcaaatccaaagtttcttctcagtttgatccaaataaacagaccccgtctggcaagaaatgcattgcagccaaaaaaattaaacagtcggtgggaaacaaaagcatgtcctttccaactggaaagtcagacagaggcttcaggtacaactggccacagagatagtcctggaagacacgtggcgcctgtggaccggaagcaccaaatgctggtgctgcttttgtacatacatatttttaaaccattaaaattcttcctgaagaaaaaaaaaaagatctgatagaaaaaaaacaaaaaaaaaaaaaaaaaaaaaaaacaaaaaaaaaaaaaaaaaaaagaaaaaaaaaaaacaaaaaacacaagagagaaaaaacagacaacaaagaagacaggagaagaaacagacaggagtcgaacagacaaaacaccaaaaccaaaaaactacacaaaaagcgaaaagacgcacaagaaacaaaacgaacgacgacaagacacgccaacacgcaacacacaaacaaacagaacagaacgacagcaaagcgaacaaagcccgcacacaaaaaggaaaacccacagcgaaaaagaaaacaacaaaccaccaccagcacggacagaacaaccagtaaggagaaaacacaaaaaaaacagaaacaagcaagatgaaaaaaacacaaaagaagacgcccaaagcaagagcaacacagccacgacgcaaaccagcgaggccagaaaccagagatacaggacaacactaacacacagcacacagacaagcaaactagaacagcaagcaacagaaatacagaaacgcagacaaacacacaccgcgggagcgcaccgcccaaaacagaagaaagaatacagcagccgcaaccaccaccacgcacaccccacacacacaaagcactaacagccaagaaagcacacacacaacaaaacaccagaccaaccannnnnnnn

SEQ ID NO: 23235 - DNA, 6247 bp, Homo sapiens
agacgctgtggacacgcttgtcccagacctgggcgccctcctgccgggagccaggactggccgcagcaggcgctgtccgggcccgtgggcggggtttcgggagggggcggagccaggcccacggccggtgtcaggttgctccggtaacggtgacgtttcgcggcgtgggcggggccagcacgcaggttgcatattttaggaagtgaggaggaggcgcgggctggagctgcggcggggtctggggcgcagagcagcggcgggaggaggcggacacgtggcaacagcggtagcagcccgggcggcggcagcaacagcggcggcggcatcggcccgagccgccggccgccctcccaccctcccgccccgcggcagccctagctccctccacttggctcccctggtcccgctcgctcggccgggagctgctctgtgcttttctctctgattctccagcgacaggacccggcgccgggcactgagcaccgccaccatggggaagggggttggacgtgataagtatgagcctgcagctgtttcagaacaaggtgataaaaagggcaaaaagggcaaaaaaaagacagggacatggatgaactgaagaaagaagtttctatggatgatcataaacttagccttgatgaacttcatcgtaaatatggaacagacttgagccggggattaacatctgctcgtgcagctgagatcctggcgcgagatggtcccaacgccctcactccccctcccactactcctgaatggatcaagttttgtcggcagctctttggggggttctcaatgttactgtggattggagcgattctttgtttcttggcttatagcatccaagctgctacagaagaggaacctcaaaacgataatctgtacctgggtgtggtgctatcagccgttgtaatcataactggttgcttctcctactatcaagaagctaaaagttcaaagatcatggaatccttcaaaaacatggtccctcagcaagcccttgtgattcgaaatggtgagaaaatgagcataaatgcggaggaagttgtggttggggatctggtggaagtaaaaggaggagaccgaattcctgctgacctcagaatcatatctgcaaatggctgcaaggtggataactcctcgctcactggtgaatcagaaccccagactaggtctccagatttcacaaatgaaaaccccctggagacgaggaacattgccttcttttcaaccaattgtgttgaaggcaccgcacgtggtattgttgtctacactggggatcgcactgtgatgggaagaattgccacacttgcttctgggctggaaggaggccagacccccattgctgcagaaattgaacattttatccacatcatcacgggtgtggctgtgttcctgggtgtgtctttcttcatcctttctctcatccttgagtacacctggcttgaggctgtcatcttcctcatcggtatcatcgtagccaatgtgccggaaggtttgctggccactgtcacggtctgtctgacacttactgccaaacgcatggcaaggaaaaactgcttagtgaagaacttagaagctgtggagaccttggggtccacgtccaccatctgctctgataaaactggaactctgactcagaaccggatgacagtggcccacatgtggtttgacaatcaaatccatgaagctgatacgacagagaatcagagtggtgtctcttttgacaagacttcagctacctggcttgctctgtccagaattgcaggtctttgtaacagggcagtgtttcaggctaaccaggaaaacctacctattcttaagcgggcagttgcaggagatgcctctgagtcagcactcttaaagtgcatagagctgtgctgtggttccgtgaaggagatgagagaaagatacgccaaaatcgtcgagatacccttcaactccaccaacaagtaccagttgtctattcataagaaccccaacacatcggagccccaacacctgttggtgatgaagggcgccccagaaaggatcctagaccgttgcagctctatcctcctccacggcaaggagcagcccctggatgaggagctgaaagacgcctttcagaacgcctatttggagctggggggcctcggagaacgagtcctaggtttctgccacctctttctgccagatgaacagtttcctgaagggttccagtttgacactgacgatgtgaatttccctatcgataatctgtgctttgttgggctcatctccatgattgagcccctcccacgggcggccgttcctgatgccgtgggcaaatgtcgaagtgctggaattaaggtcatcatggtcacaggagaccatccaatcacaagctaaaagctattgccaaaaggtgtgggcatcatctcagaaggcagtggacctatgagcagaggaaaatcgtggagttcacctgcccacagccttcttcgtcagtatcgtggtggtgcagtgggccgacttggtcatctgtaagaccaggaggaattcggtcttccagcaggggatgaagaacaagatcttgatatttggcctctttgaagagacagccctggctgctttcctttcctactgccctggaatgggtgttgctcttaggatgtatcccctcaaacctacctggtggttctgtgccttcccctactctcttctcatcttcgtatatgacgaagtcagaaaactcatcatcaggcgacgccctggcggctgggtggagaaggaaacctactattagccccccgtcctgcacgccgtggagcatcaggccacacactctgcatccgacacccaccccctctttgtgtacttcagtcttggagtttggaactctaccctggtaggaaagcaccgcagcatgtggggaaacaagatcttgatatttggcctctttgaagagacagccctggctgctttcctttcctactgccctggaatgggtgttgctcttaggatgtatcccctcaaacctacctggtggttctgtgccttcccctactctcttctcatcttcgtatatgacgaagtcagaaaactcatcatcaggcgacgccctggcggctgggtggagaaggaaacctactattagccccccgtcctgcacgccgtggagcatcaggccacacactctgcatccgacacccaccccctctttgtgtacttcagtcttggagtttggaactctaccctggtaggaaagcaccgcagcatgtggggaagcaagacgtcctggaatgaagcatgtagctctatggggggaggggggagggctgcctgaaaaccatccatctgtggaaatgacagcggggaaggtttttatgtgcctttttgtttttgtaaaaaaggaacacccggaaagactgaaagaatacattttatatctggatttttccattataatagccatctttatttgtaaaaatccagatataaaatgtattctttcagtctttccgggtgttccttttttacaaaaacaaaaaggcacataaaaaccttccccgctgtcatttccacagatggatggttttcaggcagccctcccccctccccccatagagctacatgcttcattccaggacgtcttgcttccccacatgctgcggtgctttcctaccagggtagagttccaaactccaagactgaagtacacaaagagggggtgggtgtcggatgcagagtgtgtggcctgatgctccacggcgtgcaggacggggggctaatagtaggtttccttctccacccagccgccagggcgtcgcctgatgatgagttttctgacttcgtcatatacgaagatgagaagagagtaggggaaggcacagaaccaccaggtaggtttgaggggatacatcctaagaggccaaatatcaagatcttgttcttcatcccctgctggaagaccgaattcctcctggtcttacagatgaccaagtcggcccactgcaccaccacgatactgacgaagaaggctgtgtggcaggtgaactccacgattttcctctgctcataggtccactgctgcccgtagctgtcttccacatcgttgatccagcggtcatcccagtccactcggaggcccaacaggtgaattgggaggaagccgttctcagccagaatcacaaagtaagtaaagaagcctcccagggcctggatcattccaatctgcccataggccatgctgatcagccgctcattcacaagtttgtctgttttgggatttctgggctgtctcttcatgatgtcactctcagcctgctcataagccagggagatggcaggaaccatgtcagtgcccaagtcaatgcagaggatggtgacagtccccagtggtagtggaatgtttgcaataataaatatcaggaacggggtgatctcgggaatgttactggttaaggtataagcaatggatttcttcaagttatcaaagatcagacgaccttcctctactccagtcacaattgaggcaaagttgtcatccagaagaatcatgtcagcagcttgcttggacacatctgagccagcaatccccatagcaaccccaatgtctgctttcttcaaagctggagagtcattcacaccgtcaccagtcacagccacgatagcaccctgtctttggcagccttccacaatgatgagcttctgctgaggggaggtcctggcaaacactatctcagtgtggtacttcaaaatgtcatccagctgctcggaggtcatgtcctttagatcactgccgtgtactacgcaggccttggcatccctggggttcacctggctgactgggatgttgaggcgggcagcaatgtcttccacggtctcattgccttctgagatgatgcccacacctttggcaatagctttagctgtgattggatggtctcctgtgaccatgatgaccttaattccagcacttcgacatttgcccacggcatcaggaacggccgcccgtggagggtcaatcatggagatgagcccaacaaagcacagattatcgacagggaaattcacatcgtcagtgtcaaactggaacccttcaggaaactgttcatctggcagaaagaggtggcagaaacctaggactcgttctccgaggccccccagctccaaataggcgttctgaaaggcgtctttcagctcctcatccaggggctgctccttgccgtggaggaggatagagctgcaacggtctaggatcctttctggggcgcccttcatcaccaacaggtgttggggctccgatgtgttggggttcttatgaatagacaactggtacttgttggtggagttgaagggtatctcgacgattttggcgtatctttctctcatctccttcacggaaccacagcacagctctatgcactttaagagtgctgactcagaggcatctcctgcaactgcccgcttaagaataggtaggttttcctggttagcctgaaacactgccctgttacaaagacctgcaattctggacagagcaagccaggtagctgaagtcttgtcaaaagagacaccactctgattctctgtcgtatcagcttcatggatttgattgtcaaaccacatgtgggccactgtcatccggttctgagtcagagttccagttttatcagagcagatggtggacgtggaccccaaggtctccacagcttctaagttcttcactaagcagtttttccattgccatgcagtttgcaatgtaagtgtcagacagaccgtgacacgtggccagcaaaccttccggcacattgggctacgatgataccgatgaggaagatgacagcctcaattccaggtgtactcaaggatgagagaaaggatgaagaaagacacacccaggaacacatccacacccgtgatgatgtggataaaatgttcaatttctgcagcaatgggggtctggcctccttccagcccagaagcaagtgtggcaattcttcccatcacagtgcgatccccagtgtagacactataccacgtgcggtgccttcaacacattggttgaaaagaaggcaatgttcctcgtctccagggggttttcatttgtgaaatctggagacctagtctggggttctgattcaccagtgagcgaggagttgatccacctgtgcagccatttgcagatatgattctgaggtcagcaggaattcggtctcctccttttacttccaccagatccccaaccacaacttcctccgcatttatgctcattgtctcaccc

SEQ ID NO: 23236 - DNA, 432 bp, Homo sapiens
  misc_feature 1, 2, 3, 429, 430, 431, 432: n = A,T,C or G
nnncacgaggtattccagtgaaaccgaccgcctgggaggtgtggcttattcagtcgctttattaataaaagagatcaattaagctttcctctccccacccaccccggaggtgccgggctttgaatcctcgggaggaaaaaatggcagggctgcaagcttcctccccaagtttccaggagcacctgccaccagccttgaacacctcccccaccgaggctccgaaatccacaatcctggccgtagactttgcaaaacgaggggagggacacacgcagcgtgtcccccattcccgccgggataagcacgcacaggcttctgagcgcctgctgatccacacaatcatgagagagaaagttccagggggaaacgatccggcttctccgcagtcccgggtctccagccgcgcgacccagacgtgacatgcatcannnn

SEQ ID NO: 23237 - DNA, 9186 bp, Homo sapiens
  misc_feature 1, 2, 9186: n = A,T,C or G
nnagcccagtcgagccgcgctcacctcgggctcccgctccgtctccacctccgcctttgccctggcggcgcgaccccgtcccggcgcggcccccagcagtcgcgcgccgttagcctcgcgcccgccgcgcagtccgggcccggcgcgatgggggccgccgccggccggagcccccacctggggcccgcgcccgcccgccgcccgcagcgctctctgctcctgctgcagctgctgctgctcgtcgctgccccggggtccacgcaggcccaggccgccccgttccccgagctgtgcagttatacatgggaagctgttgataccaaaaataatgtactttataaaatcaacatctgtggaagtgtggatattgtccagtgcgggccatcaagtgctgtttgtatgcacgacttgaagacacgcacttatcattcagtgggtgactctgttttgagaagtgcaaccagatctctcctggaattcaacacaacagtgagctgtgaccagcaaggcacaaatcacagagtccagagcagcattgccttcctgtgtgggaaaaccctgggaactcctgaatttgtaactgcaacagaatgtgtgcactactttgagtggaggaccactgcagcctgcaagaaagacatatttaaagcaaataaggaggtgccatgctatgtgtttgatgaagagttgaggaagcatgatctcaatcctctgatcaagcttagtggtgcctacttggtggatgactccgatccggacacttctctattcatcaatgtttgtagagacatagacacactacgagacccaggttcacagctgcgggcctgtccccccggcactgccgcctgcctggtaagaggacaccaggcgtttgatgttggccagccccgggacggactgaagctggtgcgcaaggacaggcttgtcctgagttacgtgagggaagaggcaggaaagctagacttttgtgatggtcacagccctgcggtgactattacatttgtttgcccgtcggagcggagagagggcaccattcccaaactcacagctaaatccaactgccgctatgaaattgagtggattactgagtatgcctgccacagagattacctggaaagtaaaacttgttctctgagcggcgagcagcaggatgtctccatagacctcacaccacttgcccagagcggaggttcatcctatatttcagatggaaaagaatatttgttttatttgaatgtctgtggagaaactgaaatacagttctgtaataaaaaacaagctgcagtttgccaagtgaaaaagagcgatacctctcaagtcaaagcagcaggaagataccacaatcagaccctccgatattcggatggagacctcaccttgatatattttggaggtgatgaatgcagctcagggtttcagcggatgagcgtcataaactttgagtgcaataaaaccgcaggtaacgatgggaaaggaactcctgtattcacaggggaggttgactgcacctacttcttcacatgggacacggaatacgcctgtgttaaggagaaggaagacctcctctgcggtgccaccgacgggaagaagcgctatgacctgtccgcgctggtccgccatgcagaaccagagcagaattgggaagctgtggatggcagtcagacggaaacagagaagaagcattttttcattaatatttgtcacagagtgctgcaggaaggcaaggcacgagggtgtcccgaggacgcggcagtgtgtgcagtggataaaaatggaagtaaaaatctgggaaaatttatttcctctcccatgaaagagaaaggaaacattcaactctcttattcagatggtgatgattgtggtcatggcaagaaaattaaaactaatatcacacttgtatgcaagccaggtgatctggaaagtgcaccagtgttgagaacttctggggaaggcggttgcttttatgagtttgagtggcgcacagctgcggcctgtgtgctgtctaagacagaaggggagaactgcacggtctttgactcccaggcagggttttcttttgacttatcacctctcacaaagaaaaatggtgcctataaagttgagacaaagaagtatgacttttatataaatgtgtgtggcccggtgtctgtgagcccctgtcagccagactcaggagcctgccaggtggcaaaaagtgatgagaagacttggaacttgggtctgagtaatgcgaagctttcatattatgatgggatgatccaactgaactacagaggcggcacaccctataacaatgaaagacacacaccgagagctacgctcatcacctttctctgtgatcgagacgcgggagtgggcttccctgaatatcaggaagaggataactccacctacaacttccggtggtacaccagctatgcctgcccggaggagcccctggaatgcgtagtgaccgacccctccacgctggagcagtacgacctctccagtctggcaaaatctgaaggtggccttggaggaaactggtatgccatggacaactcaggggaacatgtcacgtggaggaaatactacattaacgtgtgtcggcctctgaatccagtgccgggctgcaaccgatatgcatcggcttgccagatgaagtatgaaaaagatcagggctccttcactgaagtggtttccatcagtaacttgggaatggcaaagaccggcccggtggttgaggacagcggcagcctccttctggaatacgtgaatgggtcggcctgcaccaccagcgatggcagacagaccacatataccacgaggatccatctcgtctgctccaggggcaggctgaacagccaccccatcttttctctcaactgggagtgtgtggtcagtttcctgtggaacacagaggctgcctgtcccattcagacaacgacggatacagaccaggcttgctctataagggatcccaacagtggatttgtgtttaatcttaatccgctaaacagttcgcaaggatataacgtctctggcattgggaagatttttatgtttaatgtctgcggcacaatgcctgtctgtgggaccatcctgggaaaacctgcttctggctgtgaggcagaaacccaaactgaagagctcaagaattggaagccagcaaggccagtcggaattgagaaaagcctccagctgtccacagagggcttcatcactctgacctacaaagggcctctctctgccaaaggtaccgctgatgcttttatcgtccgctttgtttgcaatgatgatgtttactcagggcccctcaaattcctgcatcaagatatcgactctgggcaagggatccgaaacacttactttgagtttgaaaccgcgttggcctgtgttccttctccagtggactgccaagtcaccgacctggctggaaatgagtacgacctgactggcctaagcacagtcaggaaaccttggacggctgttgacacctctgtcgatgggagaaagaggactttctatttgagcgtttgcaatcctctcccttacattcctggatgccagggcagcgcagtggggtcttgcttagtgtcagaaggcaatagctggaatctgggtgtggtgcagacgagtccccaagccgcggcgaatggatctttgagcatcatgtatgtcaacggtgacaagtgtgggaaccagcgcttctccaccaggatcacgtttgagtgtgctcagatatcgggctcaccagcatttcagcttcaggatggttgtgagtacgtgtttatctggagaactgtggaagcctgtcccgttgtcagagtggaaggggacaactgtgaggtgaaagacccaaggcatggcaacttgtatgacctgaagcccctgggcctcaacgacaccatcgtgagcgctggcgaatacacttattacttccgggtctgtgggaagctttcctcagacgtctgccccacaagtgacaagtccaaggtggtctcctcatgtcaggaaaagcgggaaccgcagggatttcacaaagtggcaggtctcctgactcagaagctaacttatgaaaatggcttgttaaaaatgaacttcacggggggggacacttgccataaggtttatcagcgctccacagccatcttcttctactgtgaccgcggcacccagcggccagtatttctaaaggagacttcagattgttcctacttgtttgagtggcgaacgcagtatgcctgcccacctttcgatctgactgaatgttcattcaaagatggggctggcaactccttcgacctctcgtccctgtcaaggtacagtgacaactgggaagccatcactgggacgggggacccggagcactacctcatcaatgtctgcaagtctctggccccgcaggctggcactgagccgtgccctccagaagcagccgcgtgtctgctgggtggctccaagcccgtgaacctcggcagggtaagggacggacctcagtggagagatggcataattgtcctgaaatacgttgatggcgacttatgtccagatgggattcggaaaaagtcaaccaccatccgattcacctgcagcgagagccaagtgaactccaggcccatgttcatcagcgccgtggaggactgtgagtacacctttgcctggcccacagccacagcctgtcccatgaagagcaacgagcatgatgactgccaggtcaccaacccaagcacaggacacctgtttgatctgagctccttaagtggcagggcgggattcacagctgcttacagcgagaaggggttggtttacatgagcatctgtggggagaatgaaaactgccctcctggcgtgggggcctgctttggacagaccaggattagcgtgggcaaggccaacaagaggctgagatacgtggaccaggtcctgcagctggtgtacaaggatgggtccccttgtccctccaaatccggcctgagctataagagtgtgatcagtttcgtgtgcaggcctgaggccgggccaaccaataggcccatgctcatctccctggacaagcagacatgcactctcttcttctcctggcacacgccgctggcctgcgagcaagcgaccgaatgttccgtgaggaatggaagctctattgttgacttgtctccccttattcatcgcactggtggttatgaggcttatgatgagagtgaggatgatgcctccgataccaaccctgatttctacatcaatatttgtcagccactaaatcccatgcacggagtgccctgtcctgccggagccgctgtgtgcaaagttcctattgatggtccccccatagatatcggccgggtagcaggaccaccaatactcaatccaatagcaaatgagatttacttgaattttgaaagcagtactccttgcttagcggacaagcatttcaactacacctcgctcatcgcgtttcactgtaagagaggtgtgagcatgggaacgcctaagctgttaaggaccagcgagtgcgactttgtgttcgaatgggagactcctgtcgtctgtcctgatgaagtgaggatggatggctgtaccctgacagatgagcagctcctctacagcttcaacttgtccagcctttccacgagcacctttaaggtgactcgcgactcgcgcacctacagcgttggggtgtgcacctttgcagtcgggccagaacaaggaggctgtaaggacggaggagtctgtctgctctcaggcaccaagggggcatcctttggacggctgcaatcaatgaaactggattacaggcaccaggatgaagcggtcgttttaagttacgtgaatggtgatcgttgccctccagaaaccgatgacggcgtcccctgtgtcttccccttcatattcaatgggaagagctacgaggagtgcatcatagagagcagggcgaagctgtggtgtagcacaactgcggactacgacagagaccacgagtggggcttctgcagacactcaaacagctaccggacatccagcatcatatttaagtgtgatgaagatgaggacattgggaggccacaagtcttcagtgaagtgcgtgggtgtgatgtgacatttgagtggaaaacaaaagttgtctgccctccaaagaagttggagtgcaaattcgtccagaaacacaaaacctacgacctgcggctgctctcctctctcaccgggtcctggtccctggtccacaacggagtctcgtactatataaatctgtgccagaaaatatataaagggcccctgggctgctctgaaagggccagcatttgcagaaggaccacaactggtgacgtccaggtcctgggactcgttcacacgcagaagctgggtgtcataggtgacaaagttgttgtcacgtactccaaaggttatccgtgtggtggaaataagaccgcatcctccgtgatagaattgacctgtacaaagacggtgggcagacctgcattcaagaggtttgatatcgacagctgcacttactacttcagctgggactcccgggctgcctgcgccgtgaagcctcaggaggtgcagatggtgaatgggaccatcaccaaccctataaatggcaagagcttcagcctcggagatatttattttaagctgttcagagcctctggggacatgaggaccaatggggacaactacctgtatgagatccaactttcctccatcacaagctccagaaacccggcgtgctctggagccaacatatgccaggtgaagcccaacgatcagcacttcagtcggaaagttggaacctctgacaagaccaagtactaccttcaagacggcgatctcgatgtcgtgtttgcctcttcctctaagtgcggaaaggataagaccaagtctgtttcttccaccatcttcttccactgtgaccctctggtggaggacgggatccccgagttcagtcacgagactgccgactgccagtacctcttctcttggtacacctcagccgtgtgtcctctgggggtgggctttgacagcgagaatcccggggacgacgggcagatgcacaaggggctgtcagaacggagccaggcagtcggcgcggtgctcagcctgctgctggtggcgctcacctgctgcctgctggccctgttgctctacaagaaggagaggagggaaacagtgataagtaagctgaccacttgctgtaggagaagttccaacgtgtcctacaaatactcaaaggtgaataaggaagaagagacagatgagaatgaaacagagtggctgatggaagagatccagctgcctcctccacggcagggaaaggaagggcaggagaacggccatattaccaccaagtcagtgaaagccctcagctccctgcatggggatgaccaggacagtgaggatgaggttctgaccatcccagaggtgaaagttcactcgggcaggggagctggggcagagagctcccacccagtgagaaacgcacagagcaatgcccttcaggagcgtgaggacgatagggtggggctggtcaggggtgagaaggcgaggaaagggaagtccagctctgcacagcagaagacagtgagctccaccaagctggtgtccttccatgacgacagcgacgaggacctcttacacatctgactccgcagtgcctgcaggggagcacggagccgcgggacagccaagcacctccaaccaaataagacttccactcgatgatgcttctataattttgcctttaacagaaactttcaaaagggaagagtttttgtgatgggggagagggtgaaggaggtcaggccccactccttcctgattgtttacagtcattggaataaggcatggctcagatcggccacagggcggtaccttgtgcccagggttttgccccaagtcctcatttaaaagcataaggccggacgcatctcaaaacagagggctgcattcgaagaaacccttgctgctttagtcccgatagggtatttgaccccgatatattttagcattttaattctctccccctatttattgactttgacaattactcaggtttgagaaaaaggaaaaaaaaacagccaccgtttcttcctgccagcaggggtgtgatgtaccagtttgtccatcttgagatggtgaggctgtcagtgtatggggcagcttccggcgggatgttgaactggtcattaatgtgtcccctgagttggagctcattctgtctcttttctcttttgctttctgtttcttaagggcacacacacgtgcgtgcgagcacacacacacatacgtgcacagggtccccgagtgcctaggttttggagagtttgcctgttctatgcctttagtcaggaatggctgcacctttttgcatgatatcttcaagcctgggcgtacagagcacatttgtcagtatttttgccggctggtgaattcaaacaacctgcccaaagattgatttgtgtgtttgtgtgtgtgtgtgtgtgtgtgtgtgtgtgtgagtggagttgaggtgtcagagaaaatgaattttttccagatttggggtataggtctcatctcttcaggttctcatgataccacctttactgtgcttatttttttaagaaaaaagtgttgatcaaccattcgacctataagaagccttaatttgcacagtgtgtgacttacagaaactgcatgaaaaatcatgggccagagcctcggccctagcattgcacttggcctcatgctggagggaggctgggcgggtacagcgcggaggaggagggaggccaggcgggcatggcgtggaggaggagggaggccgggcggtcacagcatggaggaggagggaggcgctgctggtgttcttattctggcggcagcgcctttcctgccatgtttagtgaatgacttttctcgcattgtagaattgtatatagactctggtgttctattgctgagaagcaaaccgccctgcagcatccctcagcctgtaccggtttggctggcttgtttgatttcaacatgagtgtattttttaaaattgatttttctcttcatttttttttcaatcaactttactgtaatataaagtattcaacaatttcaataaaagataaattattaaaaaaaaaaaacggggcctctttggcgggaaaaaggttaaagggaattggaatttcggcgcctttgaagggatgcggccaaaagggaaatgaaggacan

SEQ ID NO: 23238 - DNA, 1987 bp, Homo sapiens
  misc_feature 1, 2, 3, 4, 5, 1987: n = A,T,C or G
nnnnncgcgcgcgaacgtgtaagtgccagggtctcagggtcaggtcgcggctggtcactgtgcaggcgcttgggtgacgcgacgatctcagcggatctggtcaccttcgtctccccgccatggagacctcagcactcaagcagcaggagcagcccgcggcgaccaagatcaggaacctgccctgggttgaaaaataccggccacagaccctgaatgatctcatttctcatcaggacattctgagtaccattcagaagtttatcaatgaagaccgactgccacacttgcttctctacggtcccccagggacaggcaagacatctaccatcctagcctgtgcgaaacagctatataaagacaaagaatttggctccatggtcttggagctgaatgcttcagatgaccgaggaatagacatcattcgaggaccgatcctgagctttgctagcacaaggacaatatttaagaaaggctttaagctagtgatcttggatgaagcagacgccatgactcaggacgcccagaatgccttgagaagagtaattgagaaattcacagaaaataccagattctgcctcatctgtaactatctgtcaaagatcatccctgccttgcagtcccgctgcacgaggtttcggttcggtcccctgactcctgaactcatggttccccgcctggaacatgtcgtggaagaagagaaagttgatataagtgaagatggaatgaaagcactagtcactctttccagtggagacatgcgtagggctctgaacattttgcagagcaccaatatggcctttgggaaggtgacagaggagactgtctacacctgcaccgggcacccgctcaagtcagacattgccaacatcctggactggatgttgaatcaagatttcaccacagcctacagaaatattacagagttgaaaactctgaaggggttggcactgcatgatatcctgacagagatacacttgtttgtgcatagagttgactttccatcttcagttcgaatacatttattgaccaaaatggcagacattgagtacaggctttctgttggcaccaacgagaagatccagctgagctccctcattgctgcatttcaagtcaccagagacctgattgttgcagaggcctagatgctctgagggccattcacaattctcagggctcagcagtgatgggagaacagaggacagttccaggataaactgctgcctggggctgtgggatgaatcagtcaccccgaatcttggaaaaacccccttccaggagaggatgggcaggcatttaaaaagtaccatttttgtggttgtttggagcagggatgtacaaaataattttaatgtattaactcatactgcctgtcttttataggggaaaaaaataaccttttttattttaaagttataaggtttttaccttttagttgcttggatgacagggaattagcctaccccattttggtctggaacagaagactttcaaatttaatatggtccaagtgtcttcctactcaaggtaaacattatctccaaaattacatttatgattctaatatttggcattgtgtctgtatctaatttaaacagatgttaatggacgtctggccgaaactattatacttttataagatgagctgaatcctcttactttaaaaactggtctttttatttaccctctgtggtagaagagtcaccagcaggttccaaattgatgtgtatgataggaaaaaaaccttaattttaaatataatatagagccttaaactatgccactgggtggcagaggctgtataaaacgcacttgttttcatgcaggagcggggcaagtaaggttgagcctgactgtaaacctagaactgcggaaggactgggacttttgtacaaatttcacatttattttacagcaatggccgctgggcgggccgtataaaaaaaaccgctgcgggtggtcaacaaacaccacattaacacctcccagn

SEQ ID NO: 23239 - DNA, 6331 bp, Homo sapiens
  misc_feature 1, 2, 3, 4, 5, 6, 7, 8, 9, 10, 6331: n = A,T,C or G
nnnnnnnnnngggtctcccatactgcgtatagatgaatgggtcaggatatctggaacaaaatatggaggtgaagggtgagatcgggaaacaaagggtatggccccctagttcccaaagggagcagggagatgggaatagaattgaaggtaggttttaggctacttgggaggaggaatatttaggtaattgtggagactttctcctgtgtgatgaaggcggcagacactgtgatcctgtgggcaagaagtaaaaatgaccagctgaggatttcttttcctccaggactgtgttggggtgacaggatgcctgataaggatgacattcggctgctgccgtcagcattgggtgtgaagaagagaaaacgaggacccaagaagcagaaggagaacaagccaggaaaaccccgaaaacgcaagaagcgtgacagtgaggaggaatttggttctgagcgagatgagtaccgggagaagtcagagagtgggggcagtgaatatggaaccggaccgggtcggaaacgaagaaggaagcaccgagaaaaaaaggagaagaagacaaagcggcggaaaaagggggagggagatggggggcaaaagcaagtggaacagaagtcatcagcaactctgcttctgacctggggcctggaggatgtggagcatgtgttctctgaggaggattaccacacgctcaccaactacaaagccttcagccagttcatgaggcccctaattgctaagaagaatcctaagatcccaatgtctaagatgatgaccatccttggggccaaatggagagagttcagtgccaacaaccccttcaaggggtcagcagctgctgtggcggcggcagcggcagcagcagcagcagctgtagctgagcaggtgtcagctgctgtctcgtcggccacccccatagcaccctccggaccccccgcccttccaccaccccctgctgctgatatccagcccccacccatccgaagagccaaaaccaaagagggcaaaggtccaggccataagaggcggagtaagagcccccgagtgcctgatggacgcaagaagcttcggggaaagaaaatggcaccactcaaaataaaactagggcttctgggtggcaagaggaagaaaggaggctcgtatgtttttcagagcgacgaaggtcctgaaccagaggctgaggaatcagacctggacagtggcagtgtccacagtgcctcaggccggcctgatggccctgtccgcaccaagaaactaaagagaggccggccaggaaggaagaagaagaaggtcctgggctgtcctgcagtggccggggaggaggaggttgatggctacgagacggatcaccaggattactgtgaggtgtgccagcagggtggggaaattattctgtgtgacacctgccctcgtgcctaccacctcgtctgccttgatcctgagcttgaccgggctccagagggcaaatggagctgccctcactgtgagaaggagggggtccagtgggaggccaaggaggaagaagaagaatacgaagaggagggagaggaagaaggggagaaggaggaggaggatgatcacatggagtactgccgcgtatgcaaggacggcggggagctcctgtgctgtgacgcgtgcatctcctcctaccacattcattgtctaaaccctcccctgcctgacattcccaatggtgaatggctgtgtccccgatgcacatgccccgtgctgaagggtcgagtgcagaagatcctacattggcggtggggggagccacctgtagcagtgccagcccctcaacaggcagatggaaatccagatgtcccacccccccgtcctcttcaaggcagatcagagcgagagttctttgtcaagtgggtaggactatcctactggcactgctcctgggccaaggagcttcagctggaaatcttccatttggttatgtatcgaaactaccagcggaagaatgacatggatgagcccccacccctggactatggctccggcgaggatgatgggaagagcgacaagcgtaaagtgaaagacccgcactatgctgagatggaggagaagtactatcgttttggcatcaagccagagtggatgaccgtccaccgcatcatcaaccacagtgtggataaaaaggggaattaccactatctagtaaaatggagggacttaccatatgaccagtccacgtgggaggaagatgaaatgaatatccctgaatacgaagaacataagcaaagctactggagacaccgagaactaattatgggggaagaccctgcccagccccgcaagtataagaagaagaagaaggagctacagggtgatgggcctcccagttctcccactaatgatcctaccgtgaaatatgagactcagccacggtttatcacagccactggaggcaccctgcacatgtatcagttggaagggctgaactggctacgcttctcctgggcccagggcactgacaccattctagctgatgagatggggctaggcaagaccatacaaaccatcgtcttcctctactcactctacaaggagggccacacaaaaggtcccttcctggtgagtgccccactctctaccatcattaactgggagcgggagttccagatgtgggcacccaaattctatgtggtgacatacacgggtgacaaggacagccgggccatcattcgtgagaatgaattctcctttgaggacaatgccatcaaagggggcaagaaagcttttaagatgaaaagggaggcacaggtgaagttccatgttctcctgacatcgtatgagctgatcaccattgatcaggcagcacttggttccatccgctgggcctgtcttgtggtagatgaggcccatcgactcaagaacaaccagtccaagtttttcagggttctcaatggttacaagatagatcataagttgctgctgacaggaaccccattgcagaataatctggaggagctcttccatctcctgaacttcctcaccccagagagatttaacaacttggagggcttcctggaggagtttgctgacatatccaaagaggaccagatcaagaaactgcatgatttgctggggccacacatgctgcggagactcaaggcagatgtctttaagaacatgccagccaagacagagctcatcgttcgggtggagctaagccccatgcagaagaaatactacaaatacatcctgactcgaaattttgaggccttgaattcacgaggtggtgggaaccaggtgtcgctgcttaatatcatgatggatcttaagaagtgctgcaaccatccatacctttttcccgtggctgctatggagtcccccaaactccccagtggggcttatgagggtggggcacttattaagtcgtctgggaagctcatgctgctccagaagatgctgcgaaagctgaaggagcaaggacaccgagtgctcatcttctcgcagatgaccaaaatgttagacttgcttgaggacttcttagactatgaaggctacaagtatgagcgcatcgatggtggtatcacgggtgccctgaggcaggaggccatcgatcggtttaatgctcctggggcccaacaattctgcttcctcctgtccacccgagctgggggcctgggcatcaatctggccactgctgacactgtcatcatctttgattctgactggaacccccataatgacatccaggcctttagccgggctcatcggattggccaggccaacaaagtgatgatttaccggtttgtgactcgcgcgtcagtggaagagcgaatcacacaagtggccaagagaaagatgatgctgacacacctggttgtgcggcctgggctgggctccaaggcaggctccatgtccaagcaggagcttgacgacattctcaaatttggcactgaagagctattcaaggatgaaaacgagggggagaacaaggaggaggacagcagtgtgattcattatgacaatgaggccatcgctcggctgttggaccggaaccaggatgcaactgaggacactgacgtgcagaacatgaatgagtatctcagctccttcaaggtggcacagtacgtcgtgcgggaagaagacaagattgaggaaattgagcgagagatcatcaagcaggaggagaatgtggaccctgactactgggagaagctgctgaggcatcactatgagcaacagcaggaagacctagcccggaatctaggcaagggcaagcgggttcgcaagcaagttaactacaatgatgctgctcaggaagaccaagacaaccagtcagagtactcggtgggttcagaggaggaggatgaagacttcgatgaacgtcctgaagggcgtagacagtcaaagaggcagctccggaatgagaaagataagccactgcctccactgctggcccgagtcgggggcaacattgaggtgctgggcttcaacacccgtcagcggaaggctttcctcaatgctgtgatgcgctgggggatgccaccacaggatgccttcaccacacagtggctggtgcgggacctgaggggcaagactgagaaggagtttaaggcctatgtgtctttgttcatgcgccatctgtgtgagcctggggcagacggctctgaaacctttgccgatggggtccctcgggagggactgagtcgccagcaggtgttgacccgcattggagtcatgtctctcgtcaaaaagaaggtgcaggagtttgagcacatcaatgggcgttggtcaatgccggaactgatgcctgaccccagcgccgattctaagcgctcctccagagcctcctctcctaccaaaacgtctcccaccactcctgaggcttctgctaccaacagtccctgcacctctaaacctgctactccagctccaagtgagaaaggagaaggcataaggacacctcttgagaaggaggaagctgaaaaccaggaggaaaagccagagaagaacagcagaattggggagaagatggagacagaggctgatgcccccagcccagccccatcacttggggagcggctggagccaaggaagattcctctagaggatgaggtgccaggggtgcctggagagatggagcctgaacctgggtaccgtggggacagagagaagtcagaagatgtaaaaggtgaccgggagcttcgaccagggcctcgagatgagccacggtccaatgggcgacgagaggaaaagacagagaagccccggttcatgttcaatatcgccgatggtggcttcacagagcttcacacactgtggcagaatgaggaacgggcagctatttcctcggggaaactcaatgagatctggcacagaagacatgactattggcttctggctgggattgtcctccatggctatgcacggtggcaggacatccagaatgatgctcaatttgccattatcaacgagccatttaaaactgaagccaataaggggaactttctggagatgaaaaataagttcctggcccggaggttcaagctcctggagcaggcgctggtgattgaggagcagctgcggcgggcggcctacctgaacctgtcgcaggagccggcgcaccccgccatggccctccacgcccgcttcgccgaggccgagtgcctggccgagagccaccagcacctctccaaggagtcgctggcggggaacaagccggccaacgccgtcctgcacaaggttctgaaccagctggaggagttgctgagcgacatgaaggcggacgtgacccgcctgccagccacgctgtcccgaataccccccatcgcagcccgccttcagatgtccgagcgcagcatcctcagccggctggccagcaagggcacggagcctcaccccacaccggcctacccgccgggtccctacgctacacctccggggtacggggcggccttcagcgccgcacccgtaggggccctggccgccgcaggcgccaattacagccagatgcctgcagggtccttcatcacagccgccaccaacggcccaattcaccgattttttaaaaaagttccagaaatccagtgacgaatgtggtatacaaaaaaatatataaattctttcaacttagaataattaagtcataaaatacatagggtacaaataccacattccgttctaaaatgatatcttaggatcatcaaaagaaaaagaggatttggattatgcaaaaaatgattcctatatatataatcaattatctaactgacatttttgcaaatctaccacaacttcgccttttattgcatatgctaaacaagcagatgctaagtctgtaaactgtgaattaacctcctttttaattaattgttcn

SEQ ID NO: 23240 - DNA, 326 bp, Homo sapiens; identical to SEQ ID NO: 23214
  misc_feature 1, 2, 322, 323, 324, 325, 326: n = A,T,C or G

SEQ ID NO: 23241 - DNA, 378 bp, Homo sapiens
  misc_feature 1, 80, 81: n = A,T,C or G
natgagcgggcgcagtgattataggctttcgctctaagattaaaaatgccctagcccacttcttaccacaaggcacaccnngcaccccttatccccatactagttattatcgaaaccatcagcctactcattcaaccaatagccctggccgtacctgcccgggcggccgaggtacgcgggtcaacttcacctcggcaacaattacttacctggcccaggaggatgggcccgttgtgattggctctaccagtgcacctggacagggaggaatcctggctcagcgggagtttgacaggcgattctcccctcattttctggactgggcagcctttggggtcatgacccttccctccatcggcatccccctgctattgtggt

SEQ ID NO: 23242 - DNA, 410 bp, Homo sapiens
  misc_feature 407, 408, 409, 410: n = A,T,C or G
acttgcacatttctggactacaaaggcatttcttcctgcaatgacgaagaataaccatggccatattgtcactgtggcttcggcagctggacatgtctcggtccccttcttactggcttactgttcaagcaagtttgctgctgttggatttcataaaactttgacagatgaactggctgccttacaaataactggagtcaaaacaacatgtctgtgtcctaatttcgtaaacactggcttcatcaaaaatccaagtacgagacattgctcacctacagtgacgtcgtgggcgcggatgtgctggacgaggtggtgactgtgctcagtgacactgcgtgggacgcagagcttgcaatggtgagagagcagcgcaaccgtctgtgtgaccttctgggcgtacctgcccnnnn

SEQ ID NO: 23243 - DNA, 443 bp, Homo sapiens
  misc_feature 440, 441, 442, 443: n = A,T,C or G
cgcggcggcggccgaggtacatataatttgcctggccgggcacggtggctcacgcttgtaatcccagcactttaggaggccgaggtgggcggataacgaggtcacaagttctagaccagcgttgcctaccaagtttagcaattccgggaatgccaactgtccttacagtcactctcgtatttgcttagctatgagaataatttggggctaacttcaccaaaaaagaaaaacaggcgagaacgtcactctagtaacaataaaagccactggattttgctttcatcaaatgtggcaccttgtgaaccacctttcttaaaagtatttattttaacctttaaaaatttctgccaagtagagctttcttcttttacactgagcaacccacttcagtgccagcagcctacgggcacagaagccaggcaatggttctgggacacagnnnn

SEQ ID NO: 23244 - DNA, 1673 bp, Homo sapiens
  misc_feature 1, 2, 3, 4, 5, 6, 1645, 1646, 1647, 1648, 1649, 1650, 1651,1652, 1653, 1654, 1655, 1656, 1657, 1658, 1659, 1660, 1661,1662, 1663, 1664, 1665, 1666, 1667, 1668, 1669, 1670, 1671,1672, 1673: n = A,T,C or G
nnnnnngaacaaaggtctgtgtggttgtcttcacgggcaatcaggaagggagagagctggggaccatattctgcaatgcagccaaatccgaggaagagaaactgaagggagaagtagatggcaatggttatgataaaaagggataaaactaaatcttcgggacttctttaagtgctacgttaatgtttcactgctcgtctagaaactcctaaatccagctttctatcatctgccccacattggtcccattgagtacattctgtgatttctaattccagcctctccattcttttctcattattgcctcccccgccccccaactttgtgtaatttacttctgtattcagcagcctggatagcatatcattccatcaccccattttcttgccaccattggccatctttttgtatcattccacttattctgtcttttccattccttcattcaaactgctagagaaaaacagttgtgtaatgaatgccactaaatattcaaggcctccaacctcagccaagtcctcacaccaacacgcagtcacaccaacacacacctttatgggttcctggtccatttccttctctaattaccatggcagttattttacacctctactgctgtccttaatcccataccccaccctcatcaggtgaccctgtttccttttttagagaaattgaagctcttagacattggtttccacagtaataattttaaaacttcttacaactacctacaaagcagatgttctatcctatctacagagcagaaaattgaaattctcaagtagcagacccggtattaaagtgcagatctgactttaaagtccatgttcattttacacagcaggctgcctcttaagatagtatttattgagcacacactttgtgtaggttctgattttggtagatgtcatgctttatattaatctttacaacaactataagtaagaggtattaacctcacttaacagatgaggaagcaagaatccagaatgtgccagaaggcacattctgcagatttcgtgcaaacatttatacacagcttcttttttttttttttgagacagagtctcgctctgtcacccaggctggagtgcagtggagcgatctaggctcactgcaacctccgccacccgggttcaagcagttctcctgcctcagcctctcgagtagctgggattacaggcatgcgccaccacgcccagctaattttgtttttgtattttaagtagagacggggtttcactatattggtcaggctggtcttgaactcctgaccttgtgatccgcccgcctcggcctccaaaagtgctgggattacaggtgtgagccaccacggccggcctatacaaagtttcttattgagaaaagtggttccaatcatgttttttgccccctttagctgctatctcttgaacagaaaagtttgttaggaaggtaaaagttgctgactaggaccttacccacagggtggcactctgtccttgggaaatataaatgcaagtaaaacaggtttgaacttcttaacttccagaagataggaggatgggacctgtgatactgtgctgctggtgggaggacccttccacatcaacatttgtgtgtatccttgcaataaacttccattgtgaattaaaaaaaaaannnnnnnnnnnnnnnnnnnnnnnnnnnnn

SEQ ID NO: 23245 - DNA, 548 bp, Homo sapiens
  misc_feature 545, 546, 547, 548: n = A,T,C or G
gcgtccgggagcggtggagggcgtcactgggtttcggcgtctggcaagcggttcagctgtctgctccctagcagccggccttcgggtcgggcgtctccgccggctactgccgcttcagttctcccggtgtggccacgagtcggtagccatcctaatggatatgggttggttcctgttttctatttggaactttaaaaaaaattaaagcaggttgcactgctgtgatccatcctcatctcctaaagatgcatcctgacttatctccacacttgcacactgaagaatgcaacgtcttgattaacttgcttaaggaatgtcacaaaaatcacaacattctgaaattttttggttattgtaatgatgttgatcgggagttgagaaaatgcctgaagaatgagtacgtagaaaacaggaccaagagcagggagcatggcattgcaatgcgaaagaaactttttaatcctccagaggaatccgaaaaataaattgtattttcactcgatgccttggctgagagaagacctaaagactctgggttgataccnnnn

SEQ ID NO: 23246 - DNA, 378 bp, Homo sapiens
  misc_feature 1: n = A,T,C or G
nagcccttcccagggctgatgacgcatctggctgacgaggctgactgtcagcctctggcctctctcccagaggtgtgccctcagatcaaagaggacacctcccccccttaagaggatttatttcctcgaaggcacagcttctatgatctgtgtttttctttcttcctttcccattcacatttaattccttgtagccgccaagtttttgagaacaaagctgtttagaaagcaatgaagaacccaacatccctgatgtagtattcctggccaaaatattgatgtgactcctcatcatgagaacagaccaattcactttgagagaaatactacaaaataatggtctacagtcttcaaaaaagtcattgccaactaccttac

SEQ ID NO: 23247 - DNA, 550 bp, Homo sapiens
gtggtcgcggccgaggtaccccattaactgtgaatgaatctgagcttggtttcctttattgcttcctctgcaatatgattgctgaaacacattttaaaaattcagaagcttgtcactcctgttaatgggaggatcagtcacacatgtgtagtactctgctatggtgctggcttcctttaaactcaggatagatgccaggtgggctccgtttccgtaagactgacactcgagctcggcatcagaccagttcctcagcttcctgaagtaaccatagcaattggacttgtggtaaaaccatccaggagcacagctgggtctcatgatgatatcacccaggactcctgttttggccaggcagctcagcaataggagcagccgcatgcttctggaagccatcttcctcctaccctgaggatgtagctagtgcaaggatctcagagaccttactagcgcttctttgaaactccagggttctccttgatctgcaaatctgtttggcaaccaagactctaagggcccctgccttcttcagtgtctccagtccccgcgt

SEQ ID NO: 23248 - DNA, 689 bp, Homo sapiens
  misc_feature 1: n = A,T,C or G
nagaagatttctaaccaattgctatttatttgacactaacaattagctaaatgtggctgaattatctcatgttaactctaagtctgttattttgaaaacagctaaactagtaagttcttcagtttctcaaacttaagcactttgtcttatttatcgcgggtaaattattgctgaaaaaaaattactttccattttcatttgtgatttcatgaggccactgacattttcattgttttttttaggatgctgtatcgctgtaatattcaactcttatcattacatctttgcgagctccaattaagttgaacatgtaattttattttttggaagtagaatacagttatcaaaacgttaatttctaagcattagcattatgcaagaaaagagctgataaatggcaaggaagtaattcatccatgcatttattcatgcaatgacctttcaacaattttctttttttaattctactctggtgcaaggcctcactgataacttgggggaagatggctgacaaaaaaaaaaaaagaaggaaaggggaaagggaagggcatgcggaagaggaagaggaaggggaagaggaaggggaaggaaagaaaaaaagaaggagggaggaaggggaaagggaaggacaagggaggaaggaagggttattacaggaagatgaacctgttaatggcacactcaaagga

SEQ ID NO: 23249 - DNA, 1397 bp, Homo sapiens
acttctagaattaattaacgcggggctacgccttaggctggggcagcattgaaccagaggagttcttgaccccaaagaaacttcagtgtgtggacctccatgttatttccaatgacgtgtgtgcgcaagttcaccctcagaaggtgaccaagttcatgctgtgtgctggacgctggacagggggcaaaagcacctgctcgggtgattctgggggcccacttgtctgtaatggtgtgcttcaaggtatcacgtcatggggcagtgaaccatgtgccctgcccgaaaggccttccctgtacaccaaggtggtgcattaccggaagtggatcaaggacaccatcgtggccaacccctgagcacccctatcaaccccctattgtagtaaacttggaaccttggaaatgaccaggccaagactcaagcctccccagttctactgacctttgtccttaggtgtgaggtccagggttgctaggaaaagaaatcagcagacacaggtgtagaccagagtgtttcttaaatggtgtaattttgtcctctctgtgtcctggggaatactggccatgcctggagacatatcactcaatttctctgaggacacagataggatggggtgtccgtgttatttgtggggtacagagatgaaaggggggtgggatccacactgagagagtggagagtgacatgtgctggacactgtccatgaagcactgagcagaagctggaggcacaacgcaccagacactcacagcaaggatggagctgaaaacataacccactctgtcctggaggcactgggaagcctagagaaggctgtgaaccaaggggggagggtcttcctttggcatgggatggggatgaagtaaggagagggactggaccccctggaagctgattcactatggggggaggtgtattgaagtcctccagacaaccctcagatttgatgatttcctagtagaactcacagaaataaagagctgttatactgtggtttaaaaaaaaaaaaaaaaaaaaaaaaaaaaaaaaaaaaaaaaaaaaaaaaaaaaaaaaaaaaaaaaaaaaaaaaaaaaaaaaaaaaaaaaaaaaaaaaaaaaaaaaaaaaaaaaaaaaaaaaaaaaaccggcccccccccggggggaaccccaaatcccccttaaaggaatttttttacccccccccactggccctttttttaaaaacttgggaagggaaaaaaccgggggttccccaaataaaatcccttgaaaaaaaatcccctttttgcaagtgggaaaaaaacaaaaaagcccccccccaaccccctttccaaaaatttgcccccccgaatgggcaaataaaaaatgaacccgtaaatttttgttaaaattccccttaaaatttttgaaaaaaccccc

SEQ ID NO: 23250 - DNA, 2019 bp, Homo sapiens; identical to SEQ ID NO: 22489
  misc_feature 2005, 2006, 2007, 2008, 2009, 2010, 2011, 2012, 2013, 2014,2015, 2016, 2017, 2018, 2019: n = A,T,C or G

SEQ ID NO: 23251 - DNA, 686 bp, Homo sapiens
actgaagaagagatgctgtggttgagatttgttttcctctctcctgggttttagatcttaattctcgttccttgttcacaccactggtatgctttatcctggtgttttccaaatgctctgatttgtcagagttgttgcctgtgaatgggaggatggaccagctgggattagcctttgcgctgtccttggaaggaaccattttgggtttatttttcgttgcgtctagtgctttgaccttcttggcatgtttacttcctttgtagtgggcctcggcctggctatctgagttaaagcgaagctgacagacattacaagaaataacttgtttcttctttgggggaatggatactccaaatgtatggttaataaccgctttttgcacaggatccattgtgttaaaatttggaaagagcccaacagcagaactactgtccactggaaaagacataaatggtttgatatccagtgaaggctgcatcatcagggtaggtgtgcgcacaagagcaggaagggtagtagtgtggcatgtactgccgagcatctgccatgtgccaaacaacctgctacttgttgtgtacacattgttgaagaagacatagtccctgttttccaaaagcttatagtctttgccaagcctttgccatactttgcaagcctcgtgccgaattcttggcctcgagggccaa

SEQ ID NO: 23252 - DNA, 4237 bp, Homo sapiens
  misc_feature 4225: n = A,T,C or G
acgcggggaggcgcttccggaaaccgcgggagagggtcgctgacgtggaggcgtccgaagggcagcagggtgtgtcggggctcggattaagacatcggagtcggagacctgagagatgttaaccaaattcgagaccaagagcgcgcgggtcaaagggctcagctttcaccccaaaagaccttggatcctgactagtttacataatggggtcatccagttatgggactatcggatgtgcactctcattgacaagtttgatgaacatgatggtccagtgcgaggcattgacttccataggcagcagccactgttcgtctctggaggagatgactataagattaaggtttggaattacaagcttcggcgctgtcttttcacattgcttgggcacttagattatattcgcaccacgttttttcatcatgaatatccctggattctgagtgcctccgatgatcagaccatccgagtgtggaactggcaatctagaacctgtgtttgtgtgttaacagggcacaaccattatgtgatgtgtgctcagttccaccccacagaagacttggtagtatcagccagcctggaccagactgtgcgcgtttgggatatttctggtctgaggaaaaaaaacctgtcccctggtgcggtggaatcggatgtgagaggaataactggggttgatctatttggaactacagatgcagtggtgaagcatgtactagagggtcacgatcgtggagtaaactgggctgccttccaccccactatgccccttattgtatctggggcagatgatcgtcaagtgaagatctggcgcatgaatgaatcaaaggcatgggaggttgatacctgccggggccattacaacaatgtatcttgtgccgtcttccaccctcgccaagagttgatcctcagcaattctgaggacaagagtattcgagtctgggatatgtctaagcggactggggttcagactttccgcagagaccatgatcgtttctgggtcctagctgctcaccctaaccttaacctctttgcagcaggccatgatggtggtatgattgtgtttaagctggaacgggaacggccagcctatgctgttcatggcaatatgctacactatgtcaaggaccgattcttacgacagctggatttcaacagctccaaagatgtagctgtgatgcagttgcggagtggttccaagtttccagtattcaatatgtcatacaatccagcagaaaatgcagtcctgctttgtacaagagctagcaatctagagaatagtacctatgacctgtacaccatccctaaagatgctgactcccagaatcctgatgcgcctgaagggaaacgatcctcaggcctgacagccgtttgggtcgctcgaaatcggtttgctgtcctagatcggatgcattcgcttctgatcaagaatctgaagaatgagatcaccaaaaaggtacaggtgcccaactgtgatgagatcttctatgctggcacaggcaatctcctgcttcgagatgcggactctatcacactctttgacgtacagcagaagcggactctggcatctgtgaagatttctaaagtgaaatacgttatctggtcagcagacatgtcacatgtagcactactagccaaacacgccattgtgatctgtaaccgcaaactggatgctttatgtaacattcatgagaacattcgtgtcaagagtggggcctgggatgagagtggggtatttatctataccacaagcaaccacatcaaatatgctgtcaccactggggaccacgggatcattcgaactctggatttacccatctatgtcacacgggtgaagggcaacaatgtatactgcctagacagggagtgtcgtccccgggtactcaccattgatcccactgagttcaaattcaagctggccctgatcaacagaaaatatgatgaggtactgcacatggtgaggaatgccaaactagttggccagtctattattgcttatctccagaagaagggctatcctgaagtggcactgcattttgtcaaggatgagaaaactcgctttagtctggcactggagtgtggaaacattgagattgctctggaagcagccaaagcactggatgacaagaactgctgggaaaagctgggagaagtggccctgctgcaggggaaccaccagattgtggaaatgtgctatcagcgtaccaaaaactttgacaaactttccttcctgtatcttatcactggcaacttagaaaaacttcgcaagatgatgaagattgctgagatcagaaaggacatgagtggccactatcagaatgccctatacctgggtgatgtgtcagagcgtgtgcggatcctgaagaactgtggacagaagtccctggcctatctcacagctgctacccatggcttagatgaagaagctgagagcctaaaggagacatttgacccagagaaggagacaatcccagacattgaccctaatgccaagctgctccagccacctgcacctatcatgccattggataccaattggcctttattgactgtatccaaaggattttttgaaggcaccattgccagcaaagggaagggaggagcactggctgctgacattgacattgacactgttggtacagagggctggggagaggatgcagagctgcagttggatgaagatgggtttgtggaggctacagaaggtttgggggatgatgctcttggcaagggacaggaagaaggaggtggctgggatgtagaagaagatctggagctccctcctgagctggatatatcccctggggcagctggtggggctgaagatggtttctttgtgcccccaaccaagggaacaagtccaactcagatctggtgtaataactctcagcttccagttgatcacatcctggcaggctctttcgaaacagccatgcggctccttcatgaccaagtaggggtaatccagtttggcccctacaagcaactgttcctacagacatacgcccgaggccgcacaacctatcaggctctgccctgcctaccctccatgtatggctatcctaatcgcaactggaaggatgcagggctgaagaatggtgtaccagctgtgggcctgaagcttaatgacctcatccaacggttgcagctgtgctaccagctcaccacagttggcaaatttgaggaggctgtggaaaaattccgttccatccttctcagtgtgccacttcttgttgtggacaataaacaagagattgcagaggcccagcagctcatcaccatttgccgtgagtacattgtgggtttgtccgtggagacagaaaggaagaagctgcccaaagagactctagaacagcagaagcgcatctgtgagatggcagcctatttcacccactcaaacctgcagcctgtgcacatgatcctggtgctgcgtacagccctcaatctgttcttcaagctcaagaacttcaagacagctgccacctttgctcggcgcctactagaactcgggcccaagcctgaggtggcccaacagacccgaaaaatcctgtctgcctgtgagaagaatcccacagatgcctaccagctcaattatgacatgcacaacccctttgacatttgtgctgcatcatatcggcccatctaccgtggaaagccagtagaaaagtgtccactcagtggggcctgctattcccctgagttcaaaggtcaaatctgcagggtcaccacagtgacagagattggcaaagatgtgattggtttaaggatcagtcctctgcagtttcgctaaggccccctttgtgtgcatgggtcagtcaccatatgttccccccagagaatgtgtctatatcctccttctaacagcaccttccccctgcagctactcttcagatctggctctctgtaccctaaaacctagtatctttttctcttctatggaaaatccgaaggtctaaacttgacttttttgaggtcttctcaacttgactacagttgtgctcataattgtccttgcctttccagcttaattattttaaggaacaaatgaaaactctgggctgggtggagtggctcatacctgtaatcccaggcactttggggaggctacggtggggcagatcatctgagggccagggagtttcgagacctggcctggccaacatgggcaacacccccgttttcttaattaaaaatataaaaatttagcctggggcatgggtaggcntgcgcctattag

SEQ ID NO: 23253 - DNA, 1391 bp, Homo sapiens
  misc_feature 1, 1391: n = A,T,C or G
nagtccacccacgcgtccgatgaggcaagtcacgttacaccaaatcagcagatcaaaagacaaacacatatttctgagacttgaaggtccacatgcccccgccccctgcactccagccttggtgacagagtgagactctgtctcaaaagaaaaaaaggatgaaatggcgaatcagtttgggtcttggcagaaatcaacataaggaatatgacaagaccccagtaggtaaccctgagtgctcaggtccgagctgtggtctcttttacggcttcatgaaaggaccgtgccctcacggaggggaccacggcttggcttgtggggtcttaggtgatggctgccttctttcttcatcaccacacccagcttcttgctggcacttaggggaagagagcagcaaatgagagatttaccttttatctcccagcgagcgagatgtttccctgttcagagaggaagtaacatcacttatgcttgactggtgtttcttttgttgttgtttgtttttctttcaattggaattctgtatttaagatgttatgtcagctgacacatgggacactcctgaagaggtgactggccccccaccctgtttggcggtgagtttccgcaccaccggcctcagaagtgtccctcttgcttcgtctcttgttcgcttgctttgtaaatactttggtcccaagctgagacaattgctgtgtaaaacgtgaagagtcaatcccaaagggtgttatttgtcagaagaacttgccgtgtgccttcaccgaaggcagtcaagtctgcagttggatttttctcactggtgaatgacaagaaacagggataattttgcactgcggagatattacgggagttgtctatatgattatatatagtacctgattctttgaacatattattgaactccaaaatgaattcgacctccattcaggcttcctgaaatctctgaagttgctgaaatttgtatattattttccttttccaatgcaagatctgctggtgacgggaaatgactgtctggttttattatggtttataaattaataaatgggctatttaattctgtatataaatttacagcaagtacgtacactggaatgaatgaggcaatcacgttacaccaaatcagcagatcaaaagacaaacacatatttctgagacttgaaggtccacatcccccgccccctgccaagatggagtccccctctcctgcccaggctggagtgcagtggcgcagtctcagctcgctacaacctccatcccccgggttcaggtgattctcgtgcctcagcctcccgagtagctgggattgcaggcatgcaccaccacggctggctaattttttgtgtttttagtagagacagggtttcaccatgttggccaggctggtctcn

SEQ ID NO: 23254 - DNA, 1510 bp, Homo sapiens
cacgcgtccgactggttattttggtttgctaaaattatgtcacttataattttgatttatatacaagagtgaagaattgaaggaaatactgaggagagacgtatgaactattttcttcatctcaattcctattttatcaaatgcaaaatgtaatcctaaccagttgattttctataattggtatcttagtactggggaggagtatcacatgaggaaagatttttcaaagcatgtcagctgaggcacaagaatcgcttgaacccaggaggtagaggttccagtgagccgagattgtgccactgcactccagcctgggcaacagagtgagacaccgtctcaaaaaaaaacaaaaacaaaacaggtcaaaaatcagttgcacaagttgtatgaaaccaggtattctgcagctctgtctcttgtttattaagatatgcacagtttctgaatcaacaaatatatctgtgattcttttatactactacataaaagaacaggagtaattcttgccttataaattaaatgtcaaacatttcctatatgtaatcatttgttcctaaaatatgatttagtcccagcatgcttatccctgttttctctttttctctccagctcctatctagttcttcaacaaatcctgtcaactctaccttccaaatgcctcttgaatccagccatctcaccacctccaacactaccaccatttttcttaaagccaccatcatctcttccctggactattacaataccttcctaattatctccctgcctctgctattgattctttagggtccgttttccacacagtagccaaagcaatttttaaaaaaattattttaaaatgtgattctcttctttgtggctttccatcacagcctagaaaaaattgaaagatctgtaaggccctaatgacctgtccttcactacgtgtctgaccctatagcctactgttctccccttgtgcggtgtactgcagccacgttggccttcttggtattctttgaatacaagggagcttctacttcaaggcatttacattggctgttgccttagcttagaacgctctttctccagatagccgcagagcccgctctctcacctgactcatgtctctgctcaaatgttaatgatcaagaggcagtccccggcctcccccttaaaattacaacctgtcactctccaatcctttcctcacgattttctcaaaagcacttaccgctaaccaacattatatctaaattttttttgtctctttttattggaatgtaagtttcatgtaagcaggaactgtatatcactgctataccctcagcatttaaaacaatggctgtacctccggggtggcgctggggttggctccatgaccaagatctatgggggacgtcagagaaacggcgtcatgcccaaccacttcagccgaggctccaagagtgtggcccgccgggtcctccaagccctggaggggctgaaaatggtggaaaaggaccaagatggcggccgccaccgcggtgga

SEQ ID NO: 23255 - DNA, 1761 bp, Homo sapiens
  misc_feature 1746, 1747, 1748, 1749, 1750, 1751, 1752, 1753, 1754, 1755,1756, 1757, 1758, 1759, 1760, 1761: n = A,T,C or G
tatagggagtcgacccacgcgtccgccacgcctccctataagacaaagcgcggccgacgggctccgagcgcggcccctgggttcgaacacggcacccgcactgcgcgtcatggtgcaggcctggtatatggacgacgccccgggcgacccgcggcaaccccaccgccccgaccccggccgcccagtgggcctggagcagctgcggcggctcggggtgctctactggaagctggatgctgacaaatatgagaatgatccagaattagaaaagatccgaagagagaggaactactcctggatggacatcataaccatatgcaaagataaactaccaaattatgaagaaaagattaagatgttctacgaggagcatttgcacttggacgatgagatccgctacatcctggatggcagtgggtacttcgatgtgagggacaaggaggaccagtggatccggatcttcatggagaagggagacatggtgacgctccccgcggggatctatcaccgcttcacggtggacgagaagaactacacgaaggccatgcggctgtttgtgggagaaccggtgtggacagcgtacaaccggcccgctgaccattttgaagcccgcgggcagtacgtgaaatttctggcacagaccgcctagcagtgctgcctgggaactaacacgtgcctcgtaaaggtccccaatgtaatgactgagcagaaaatcaatcactttctctttgcttttagaggatagccttgaggctagattatctttcctttgtaagattatttgatcagaatattttgtaatgaaaggatctagaaagcaacttggaagtgtaaagagtcaccttcattttctgtaactcaatcaagactggtgggtccatggccctgtgttagttcatgcattcagttgagtcccaaatgaaagtttcatctcccgaaatgcagttccttagatgcccatctggacgtgatgccgcgcctgccgtgtaagaaggtgcaatcctagataacacagctagccagatagaagacacttttttctccaaaatgatgccttggggtggggagtggtagggggaagagctcccaccctaaggggcacacactgagttgcttatgccacttccttgttcaaaataaagtaactgccttaatcttatactcatggcttggagttaccttatattcaggtatatgtgatattttgcctggtttgttaaaattgccccatttagattccttctataattgttcttatagataagtaatttatatatgagctgtgttagtattttttcagtgtgagatctctggattctttcacaataaagctgttgaattttaacaggagtattagtacataaattttctactcaacaattccgagataggattatgcctagtttgtcatatcacagaaaaactccaagttaacttcatgttttggaagggcaggtcgtttttaaagtatttctttttttaactggatgaaaaatcttcatgttaggattaattttcttaatcacctccacactgtacagaggaaactcaagccttaaatgtttaagtaaactctgtctcagttttaggattaaaatacccaccggtggtgtgatgatgccatataccgcagggcttgcttctgtcaagtgtgactctatctcagtaattaaaataagtgctgatctacttgatttttttttaaatggaattcatttctaaaatgggcatttataaatatgagcnnnnnnnnnnnnnnnn

SEQ ID NO: 23256 - DNA, 4889 bp, Homo sapiens
  misc_feature 1, 2, 4885, 4886, 4887, 4888, 4889: n = A,T,C or G
nncaatttctacaccgacgatgatgatggcaagaaagcaagatgtccgaattcccacctacaacatcagtgtggtgggattatctgggaccgagaaggaaaagggccagtgtgggattggaaagtcttgtttgtgcaaccgcttcgtgcgcccgagtgctgacgagtttcacttggaccatacctccgtcctcagcaccagtgactttggagggcgagtggtcaataatgaccactttctctactggggagaagttagccgctccctggaggattgtgtggaatgtaagatgcacattgtggagcagactgaatttattgatgatcagacttttcaacctcatcgaagcacggccctgcagccctatatcaagagagctgctgcgaccaagcttgcatcagctgaaaaactcatgtacttttgcactgaccagctggggctggagcaggactttgagcagaaacaaatgccagacggaaagctgctggttgatggttttcttcttggtattgatgttagcaggggcatgaataggaactttgatgaccagctcaagtttgtctccaatctctacaatcagcttgcaaaaacaaaaaagcccatagtggtggtcctgactaagtgtgacgaaggtgttgagcggtacattagagatgcacatgcttttgccttaagcaaaaagaacctccaggttgtggagacctcagcgagatccaatgtaaacgtggacttggctttcagcaccttagtgcaactcattgataaaagtcggggaaagacaaaaatcattccttattttgaagctctcaagcagcagagtcagcagatagctacagcaaaagacaagtatgagtggctggtgagtcgcattgtgaaaaaccacaatgagaactggctgagtgtcagccgaaagatgcaggcctctccagaataccaggactatgtctacctggaagggactcagaaagccaagaagctgtttctacagcacatccaccgcctcaagcatgagcatatcgagcgtaggagaaagctgtacctggcagccctgccattagcttttgaagctcttatacctaatctagatgaaatagaccacctaagctgcataaaagccaaaaagctcttagaaaccaagccagaattcttgaagtggtttgttgtgcttgaagagaccccatggatgccaccagtcacattgacaacatggaaaacgaacggattccctttgatttaatggataccgtccctgcagaggcagctatacgaggcccacttagagaagctgaggaacgaaaggaaaagagttgagatgcgaagggcgtttaaagaaaacctggagacttctcctttcataactcccggaaagccttgggaagaggcccgtagttttattatgaatgaggatttctaccagtggctggaggaatctgtatacatggatatttatggcaaacaccaaaagcaaattatagataaagcaaaggaagaatttcaggagttgcttttggaatattcagaattgttttatgaactggagctggatgctaagcccagcaaggagaagatgggtgttattcaggatgttctgggagaggaacagcgatttaaagccatttacaaaagctccaagcagagcgttgatgcccttattctgaaacacattcattttgtgtaccacccaacaaaggagacatgccccagctgcccagcttgtgtggacgctaagattgagcacttgattagttctcggtttatccggccgtctgaccggaatcagaaaaattcactctctgaccctaacattgatagaatcaacttggttatattgggcaaagacgccttgcccgagagttggccaatggagattagagctctttgtacaaatgatgacaagtatgtgatagatggtaaaatgtatgagctttccctgaggccaatagaggggaatgtcaggcttcctgtgaactctttccagacgccaacatttcagccccacggctgtctctgcctttacaattcaaaggaatcgctatcctatgtagtggaaagtatagagaagagtagagagtccacgctgggccggcgggataatcatttagtccatctcccccttacattaattttggttaacaagagaggagacaccagtggagagactctgcatagcttaatacagcaaggtcaacaaattgctagcaaacttcagtgtgtctttctcgaccctgcttctgctggcattggttacggacgcaacattaatgaaaagcaaatcagtcaagttttgaagggactcctggactctaagcgtaacttaaacctggtcagttctactgctagcatcaaagatttggctgatgttgatctgcgaattgttatgtgtctgatgtgtggagatccttttagtgcagatgacatactttttcctgtccttcagtcccaaacctgtaaatcttcccattgtggaagcaacaactctgttttacttgaactaccaatcggactgcacaagaagcggattgaactgtctgttctttcataccattcctcctttagcatcagaaagagccggttggttcatgggtacattgttttttattcagccaaacgtaaggcctctttggctatgttacgtgcctttctttgtgaagtgcaggatattatccctattcagcttgtagcactcactgatggcgctgtagatgtcctggacaatgacttaagtagggaacagctaactgagggggaggagattgctcaagaaattgacggaaggttcacaagcatcccctgtagccaaccccagcataaacttgagatctttcacccattttttaaagatgtggtggaaaaaaagaacataatcgaggctactcatatgtacgataatgctgccgaggcctgtagcaccaccgaagaggtgtttaactccccccgggcaggatcaccgctctgcaactcaaacctgcaggattcagaagaagatatcgagccatcttacagcctgtttcgagaagacacatcactgccttctctgtccaaagaccattctaagctctctatggaactggagggaaatgatgggctgtctttcattatgagcaattttgagagtaaactgaacaacaaagtacctccgccagtcaaaccaaagcctcctgtccattttgaaattacaaagggggatctatcttatttagaccaaggccatagggatggacagaggaagtctgtgtcttctagcccctggctgcctcaggatgggtttgatccttctgactatgctgaacccatggatgctgtggtgaagccaaggaatgaagaagaaaacatatactccgtgccccatgacagcacccaaggcaaaatcatcaccattcggaatatcaacaaagcccagtccaacggcagcgggaatggttctgacagtgaaatggacaccagctctctagagcgagggcgcaaggtttccatcgtgagcaagccagtgctgtacaggacgagatgcacccggctggggcggtttgctagttaccggaccagcttcagcgtggggagtgatgatgagctggggcccatccggaagaaagaggaggatcaggcatcccagggttataaaggggacaatgctgtcattccatacgaaacagacgaagacccgcggaggaggaatattcttcgcagcctaaggaggaacactaagaaaccaaagcccaaaccccggccatccatcacaaaggcaacctgggagagtaactattttggggtgcccttaacaactgtcgtgactccagagaagccgatccccatttttattgaaagatgtattgagtacattgaagccacaggactgagcacggaaggcatctaccgggtcagcgggaacaagtctgagatggagagtctgcagagacagtttgatcaagaccacaacctggacctggcagagaaagactttacggtgaataccgtggctggtgccatgaagagctttttctcagaactgcctgaccccctggtcccgtataacatgcagatcgacttggtggaagcacacaaaatcaacgaccgggagcagaagttgcatgcccttaaggaggtattaaagaaatttccaaaggaaaaccacgaagtcttcaagtatgtcatctctcacctaaacaaggtcagccacaacaacaaggtgaatctcatgaccagcgagaacctctccatctgcttctggcccaccttgatgagacctgatttcagcactatggacgccctcacagccacgcgcacctaccagacaatcattgaactctttatccagcagtgccccttcttcttctacaatcggcccatcaccgagccccccggcgccaggcccagctccccctctgccgtggcttccaccgtccccttcctcacttccacgcctgtcacaagtcagccgtcgcccccacagtcgcctccacccaccccccagtccccaatgcagccactgcttccctcccagcttcaagccgaacacacgctgtgagccaccaagacctggggcgacaggagaaccggtcctctctctgacggggtggcatttggccttgaacaaaaccaagtccactggggacagaggcaggggcaagtggctctccccattaccttctcaagacctcagtgggagcaccagccaatggtaccatcggcctgggctgccagggtaccctgggcctggcgctgcagaccatgagctggcttggggccaattgaagacgaacaaaggcagcaacggggcagggccctcccttgtccgagcaacacccagggtctggcaacacagcccggatgcacctctgtgtacacaccagggcgagaagggcaggctgccggaaagaagacggaaaannnnn

SEQ ID NO: 23257 - DNA, 1321 bp, Homo sapiens; identical to SEQ ID NO: 22053
  misc_feature 1, 2, 1320, 1321: n = A,T,C or G

SEQ ID NO: 23258 - DNA, 2929 bp, Homo sapiens; identical to SEQ ID NO: 21129

SEQ ID NO: 23259 - DNA, 217 bp, Homo sapiens
  misc_feature 217: n = A,T,C or G
actgttattatccctatttgccaatgagagaaagaaggcaagatagcttaaggaagttttcctaattgcccagctagaaggcaggacacatttgccagcagggggccgtttgcccccatgtgtaagggaggcagggcccatctctcccacggcgaggttgagctgattactttctgagaacagttagagtgggtgcgtgatctgaaatgggttaccn

SEQ ID NO: 23260 - DNA, 1013 bp, Homo sapiens
agcgtccggacttctccgcctcggtgggctgggtcggcggctggagcattacccctactgcgggtcccgctgctggcagcgctggaaactgggtggacggcatgggttggtctcaggatttgttccgcgccttgtggagatcgctgtcaagggaagtgaaagagcacgtgggcacggaccaattcgggaacaaatactactacatcccgcagtacaagaactggagaggacaaactattcgagagaaaagaattgtagaagcagcaaataaaaaagaagtagactatgaagcaggggatattccaacagaatgggaagcttggattagaagaacaagaaagactccacctactatggaggcaggaaatactaaagaatgaaaaacacagagaagaaatcaaaataaaaagccaagatttttatgaaaaagaaaaactccttagtaaagagaccagtgaggaactcctgcctccaccagttcaaactcaaattaaaggccatgcctctgctccatactttggaaaggaagaaccctcagtggctcccagcagcactggtaaaacctttcagccaggatcctggatgccacgagatggcaagagccacaatcaatgaatgcattatggtcaaatcttttcatgtatatggatgtgactattttaacaaataaaagaagtgaaaagttatttaccttgtattttctgaatgtacaatagtttcctattctattaatcttgagttcatttttagtatgcacaagaaatgtgagattatgtactgtagaaacctaacttcttttagacttaaatccttcatttgacttagtcattgttatttatgaatttgcttagatttgtttttccctctttggattactcccttgagaaggatcctgtagctgtgaatgcttagtacattttggatctttatgatcatttgggaaccactcatagatagaactgggtacaaataatgagggtaaatattttttcctctttggattactcccttga

SEQ ID NO: 23261 - DNA, 1245 bp, Homo sapiens; identical to SEQ ID NO: 22135

SEQ ID NO: 23262 - DNA, 308 bp, Homo sapiens
  misc_feature 1, 2, 3, 4: n = A,T,C or G
nnnnaccctacctacccgtaaaatatgaaatactcagaagtaaagtgtgtgggcaatcagaagcatagccttgaaggacctgacagcagtatgaaaagattaaataggccaggcatggtggctcacgcctgtgatcccagcacttttggtaggccgaggtgggtggaccacctgagatcaggtgttcaagaccagcctgaccaacatggtgaaaccctgtctctactaaaagtacggttgggctcggtgaatcagtccgtgatacaacactggatagagcggcggacacaagcaggagcgccaagacc

SEQ ID NO: 23263 - DNA, 948 bp, Homo sapiens
  misc_feature 934, 943, 944, 945, 946, 947, 948: n = A,T,C or G
tctctggagagcagcaggtaagtggtttcccgcactgccggtatccgccgccatccggactcccgggtcctctgtgcaggttggaggatggttggttgtggcgagcgaggctgaaggagccgggacgcggggctctgggcctcgggaactgagccggtactcacctccgccccttctccccgtcgctgtccgcagccatggccctacgctaccctatggccgtgggcctcaacaagggccacaaagtgaccaagaacgtgagcaagcccaggcacagccgacgccgcgggcgtctgaccaaacacaccaagttcgtgcgggacatgattcgggaggtgtgtggctttgccccgtacgagcggcgcgccatggagttactgaaggtctccaaggacaaacgggccctcaaatttatcaagaaaagggtggggacgcacatccgcgccaagaggaagcgggaggagctgagcaacgtactggccgccatgaggaaagctgctgccaagaaagactgagcccctcccctgccctctccctgaaataaagaacagcttgacagacaacaacacacacccaaacacaacaacaccaccaacaaacacagaaacacagacaccccacgacaacgagagccgaccgccgcacgcggcagcgaccaacgagcgaacgaacgaccacaggggcgacgatcacgaccacaccgggcgcgcgagacaaacagttcacagactaaccacggcgaccccggccaacccccccggcccccatcgacccagccacagaccgacgacgccgcgacaaagggcggcccccctcacccacccgacagcacgcaccgcactacaacagagacaggagaccgagcgacccgagagcaccgacagcagccgcagcaacagcaacacgccgccaccgacgaacccgcgtccgcccngcgcgcgcnnnnnn

SEQ ID NO: 23264 - DNA, 976 bp, Homo sapiens; identical to SEQ ID NO: 23058
  misc_feature 974, 975, 976: n = A,T,C or G

SEQ ID NO: 23265 - DNA, 1807 bp, Homo sapiens
  misc_feature 1, 1719, 1720, 1721, 1722, 1723, 1724, 1725, 1726, 1727,1728, 1729, 1730, 1731, 1732, 1733, 1734, 1735, 1736, 1737,1738, 1739, 1740, 1741, 1742, 1743, 1744, 1745, 1746, 1747,1748: n = A,T,C or G
nacttccgtccccgcgatccccggtccagccccccgggcccccggcgggctctgcgctgccggagcttgggcgtctgctgctgtcccggagcgccaagtcgtccgaggtccggccgcccggccggggcggggccagggaggcccggccttcccgcttcctgcctgagccgcaggcccgcccctgcgtcctccgcccgcctctttcccgccgccgcctgggaggggacccgggctgccaggcgcccagctgtgcccagatggatgggacagagacccggcagcggaggctggacagctgtggcaagccaggggagctggggcttcctcaccccctcagcacaggaggactccctgtagcctcagaagatggagctctcagggcccctgagagccaaagcgtgacccccaagccactggagactgagcctagcagggagaccgcctggtccataggccttcaggtgaccgtgcccttcatgtttgcaggcctgggactgtcctgggccggcatgcttctggactatttccaggccaacactggacaaattgatgacccccaggagcagcacagagtcatcagcagcaacctggccctcatccaggtgcaggccactgtcgtggggctcttggctgctgtggctgcgctgctgttgggcgtggtgtctcgagaggaagtggatgtcgccaaggtggagttgctgtgtgccagcagtgtcctcactgccttccttgcagcctttgccctgggggtgctgatggtctgtatagtgattggtgctcgaaagctcggggtcaacccagacaacattgccacgcccattgcagccagcctgggagacctcatcacactgtccattctggctttggttagcagcttcttctacagacacaaagatagtcggtatctgacgccgctggtctgcctcagctttgcggctctgaccccagtgtgggtcctcattgccaagcagagcccacccatcgtgaagatcctgaagtttggctggttcccaatcatcctggccatggtcatcagcagtttcggaggactcatcttgagcaaaaccgtttctaaacagcagtacaaaggcatggcgatatttacccccgtcatatgtggtgttggtggcaatctggtggccattcagaccagccgaatctcaacctacctgcacatgtggagtgcacctggcgtcctgcccctccagatgaagaaattctggcccaacccgtgttctactttctgcacgtcagaaatcaattccatgtcagctcgagtcctgctcttgctggtggtcccaggccatctgattttcttctacatcatctacctggtggagggtcagtcagtcataaacagccagacctttgtggtgctctacctgctggcaggcctgatccaggtgacaatcctgctgtacctggcagaagtgatggttcggctgacttggcaccaggccctggatcctgacaaccactgcatcccctaccttacagggctgggggacctgctcggttcaagctccgtgggccacactgctgctgtgccaagaaggtgtacagcctccccaggatggggcctcatacaacccttcatctgcactcaacatttaatcgtgtccttgctgtctttttattttcctttttgtttgttagcaaaaacctctatttagatttcaataatcagagaagtgtaaaataaaacagattatattgtannnnnnnnnnnnnnnnnnnnnnnnnnnnnnatcccaaagcattttcatcaatgacagccctggaaagtgaaccatccatgtctgggagt

SEQ ID NO: 23266 - DNA, 5208 bp, Homo sapiens
  misc_feature 5207, 5208: n = A,T,C or G
gcggccgcccgggcaggtgcttgatacgtccgccattttgggcgcttcgctgatggtgtcggtgagcgcgtttcccgcctgagcgcaactagcggcgggtcgtgggcacctccaggagagcttgtttcatatccatatcccactgtattcctgctaatctgctaatgcagtaaattggaggaaaactgttaccaggataacctgtaatgggcaaggagccacaaagaagaaaacatttcttttaatttttaaacttggtttgaaagaccagcatgttttggaaatttgatcttcactcatcatcccacatagacacacttctagaaagagaagatgtaacactgaaggagttaatggatgaggaagatgttttacaggaatgtaaagctcagaaccgcaaacttatagagtttctgttaaaagcagaatgtctcgaagatttagtctcattcattatagaagaaccacctcaagacatggatgaaaagatcagatacaagtatccaaatatatcttgtgagttgctcacttctgatgtctcccagatgaatgatagactgggagaagatgaatccttgctaatgaaattatatagcttcctcctaaacgattcccctttgaatccactacttgccagtttcttcagcaaggtgctaagtattcttatcagcagaaaaccagaacagattgtggatttcttaaagaagaagcatgattttgtagaccttattataaagcacataggaacttctgctatcatggatttgttgctcaggctcctgacgtgtatcgaacctccacagcccaggcaagatgtgctgaattggttaaatgaggagaaaattatccagaggcttgtggaaatagttcatccatcgcaagaagaagatcgacattcaaatgcatcacaatcactttgtgaaattgttcgcctgagcagagaccagatgttacaaattcagaacagtacagagcccgaccccctgcttgccactctagaaaagcaagaaattatagagcagcttctatcaaatatttgccacaaggagaaaaatgagtcagccatagtcagtgcaatccagatattgctgactttacttgagacacgacgaccaacatttgagggccatatagagatctgcccaccaggcatgagccattcagcttgttcagtaaacaagagtgttctagaagccatcagaggaagacttggatcttttcatgaactcctgctggagccacccaagaacatgttcttcaagtatacatggaataactttttgcatacacaagtggaaatttgtattgcactgattcttgcaagtccttttgaaaacacagaaaatgccacaattaccgatcaagactccactggtgataatttgttattaaaacatcttttccaaaaatgtcaattaatagaacgaatacttgaagcctgggaaatgaatgagaagaaacaggctgagggaggaagacggcatggttacatgggacacctaacgaggatagctaactgtatcgtgcacagcactgacaagggccccaacagtgcattagtgcagcagcttatcaaagatcttcccgacgaagtcagggaacgatgggagacgttctgcacaagctccttaggagaaactaacaagaggaacacggtagatctagttacaacctgccatattcattcatccagtgatgatgaaattgactttaaagaaacgggtttctcacaggattcttctttgcagcaagccttttctgattatcagatgcaacaaatgacgtccaattttattgaccagtttggcttcaacgatgagaagtttgcagatcaagatgacattggcaatgtttcttttgatcgagtatcagacatcaactttactctcaatacaaatgaaagtggaaatattgccttgtttgaagcatgttgtaaggaaagaatacaacagtttgatgatggtggctctgatgaggaagatatatgggaggaaaagcacatcgcattcacaccagaatcccaaagacgatccagctcggggagtacagacagtgaggaaagtacagactctgaagaagaagatggagcaaagcaagacttgtttgaacccagcagtgccaacacggaggataaaatggaggtggacctgagtgaaccacccaactggtcagctaactttgatgtcccaatggaaacaacccacggtgctccattggattctgtgggatctgatgtctggagcacagaggagccgatgccaactaaagagacgggctgggcttctttttcagagttcacgtcttccctgagcacaaaagattctttaaggagtaattctccagtggaaatggaaaccagcactgaacccatggaccctctgactcccagtgcggctgccctggcagtgcagccagaagcggcaggcagtgtggccatggaagccagctctgacggagaggaggatgcagaaagtacagacaaggtaactgagacagtgatgaatggcggcatgaaggaaacgctcagcctcactgtagatgccaagacagagactgcggtcttcaaaagtgaggaagggaaactgtctacctctcaagatgctgcttgtaaagacgcagaggagtgtcccgagactgcagaggcgaagtgcgcggcgcccaggcctcccagcagcagtcccgagcagaggactggccaaccaagcgcaccaggtgacacttcagtgaatggccctgtatgacgggtgacgtctgctgctgctgactgaggactgcagaccgccaccactcaggggctctggaggggtcagctggagcccaccaagctgtcactgctgcactcactctgcaagggatcaggaccagcaacctttatattctagattctaagacattgtacagagaaattcagaagtgtaaaaatattgcacattgacaaataccaagaatttttgcgtatgtttatattgtattgttctaaataatgggtagcctgtgaaataagatcttgccacccatgtaataatagtagtaatactatagttaaaatggctgtaagaatagttttataaaagtgaatacacagatctattgtatttgaaacataactttgacaattattagtgtgaccaaagtattaggcggttttcatacatttttcaccttgtacaaaattatgaattcatttttcctccaggccgacaaggagttgtagaatgaaaatgccctctaagtgttattttggttgttctaacttacaaaagtgattttgaataagaaatatttggtgttctttttataaccagtttttgattggtaattgttttctgtattgtttaaaacggatcaaaaatgtaagtctattggtagagattaagtaaagtatttattgctacatcatagttgataaattgatgttatcgtaaagccatatgttctgttcaagtcttgtttgcttgaaatgattattcctacaagtgaaacactagactatttggagtgtatatggcttgtgttttgggatttttttttttttggcttttgtttttgtttgtttttttgtttcatttggtagttcatctgccttttaacccattcaccaaaatttaccttgttaacaagcatcaccaatgaacatttcagagcaatctgcatatttaacagacctaaaataaatcctattaggcaagtcagttgaaaatgctcgtgctgctaatggaattagagtgcgttcattttacaggctagtattttaaaagtagaaatcaaaatctggcaccgaagcatgctaattgtttactgtaccttgtgaggttttcactcataaatttaaaccagtgtatttttttagaactggtttgtgtatatatatagtgattatggatactaattcaatgtaatttataattttctatgtcaatacaaaaatacatcacagccttctcaaacagctcaagcaatatattgtatattgccatatcgtctggtgaaagggttaaattacttcacctcttgcacttttagatgcaaatcagtttttcatttctgtaatagaaaattattcacgtatttttacatcatttgtttttcctgaccagtatttaaaaccaaaaggatattctgaaaaatggccaacaatttttttagaagtagcatcccaagcagcgtgcctaaacattacattgcatatggaaataaaagaatcaaacgtctaatgccttattatttctgatttcctttttcattttaagtggtgtggagattccagcactcccaggacagtggagtcagcagtaagccctgggacaggtggcaagggtgggtcccttgacctttgcacgcctcctcaggaaccccctttcccgggtgagcccctctctgaagagactgtccttgggcctcctctggaagcagcacccccagaggacagggctcctcctgcttgcctcagggctgcctgacttgaatggcgttggacctcggggattactggtagataatatgctctggtctcgcctggtggtgagttttgccagccatggccagggtttggctccactggtggcacacgtggcctccgtggtatggacctggtggcttctccatcccactgtggcctctgtggtatggacctggtggcttctccatcctacccaaggtaacagtgtcttgcttcatcccactgactgctgggagagagcctctgggacttttctttggggcatcattttgttttgtctttcgtagcagggaaaggatatgacaatggggaggacagttcttttggaggttggaggggccaagccaaggacaggagcaagtgtgccctcattttgtttctacttttaatttctgtgtgttggccatactgaattatgagactaacagatgtctacaatacaatacctgtattcaaaataacaaaaataaagcctgattctttgtttctagaaaaaacaaaggaggcgaaccaaaaaaaataccaacaggggcaccgatatacctacacccgtctgtgacaaaggggcccaaacacagggaacaataacaagaacggacgggctatcaaaactcaagggcaggcgcgatacgaccgtgaaaacaaaactcgtaggagatgagaacaaccgaacagcgaggtagcaaaactccgacaaaatcgcaccgaaaaatataacacaacacactgcccgcagcgagcgattacnn

SEQ ID NO: 23267 - DNA, 3309 bp, Homo sapiens
  misc_feature 3309: n = A,T,C or G
tgtgggtgagttggctgccggtgagttgggtgccggtggagtcgtgttggtcctcagaatccccgcgtagccgctgcctcctcctaccctcgccatgtttcttacccggtctgagtacgcgggattgaaaaactttttgagcgttatggtgaaaatggaagattatccttttttggtttggagaaacttttaacaaacttgggccttggagagagaaaagtagttgagattaatcatgaggatcttggccacgatcatgtttctcatttagatattttggcagttcaagagggaaagcattttcactcacataaccaccagcattcccataatcatttaaattcagaaaatcaaactgtgaccagtgtatccacaaaaagaaaccataaatgtgatccagagaaagagacagttgaagtgtctgtaaaatctgatgataaacatatgcatgaccataatcaccgcctacgtcatcaccatcgtttgcatcatcatcttgatcataacaacactcaccattttcataatgattccattactcccagtgagcgtggggagcctagcaatgaaccttcaacagagaccaataaaacccaggaacaatctgatgttaaactaccgaaaggaaagaggaagaaaaaagggaggaaaagtaatgaaaattctgaggttattacaccaggttttccccctaaccatgatcagggtgaacagtatgagcataatcgggtccacaaacctgatcgtgtacataacccaggtcattctcatgtacatcttccagaacgtaatggtcatgatcctggtcgtggacaccaagatcttgatcctgataatgaaggtgaacttcgacatactagaaagagagaagcaccacatgttaaaaataatgcaataatttctttgagaaaagatctaaatgaagatgaccatcatcatgaatgtttgaacgtcactcagttattaaaatactatggtcatggtgccaactctcccatctcaactgatttatttacatacctttgccctgcattgttatatcaaatcgacagcagactttgtattgagcattttgacaaacttttagttgaagatataaataaggataaaaacctggttcctgaagatgaggcaaatataggggcatcagcctggatttgtggtatcatttctatcactgtcattagcctgctttccttgctaggcgtgatcttggttcctatcattaaccaaggatgcttcaaattccttcttacattccttgttgcattagctgtaggaacaatgagtggagacgcccttcttcatctactgccccattctcagggtggacatgatcacagtcaccaacatgcacatgggcatggacattctcatggacatgaatctaacaagtttttggaagaatatgatgctgtattgaaaggacttgttgctctaggaggcatttacttgctatttatcattgaacactgcattagaatgtttaagcactacaaacaacaaagaggaaaacagaaatggtttatgaaacagaacacagaagaatcaactattggaagaaagctttcagatcacaagttaaacaatacaccagattctgactggcttcaactcaagcctcttgccggaactgatgactcggttgtttctgaagatcgacttaatgaaactgaactgacagatttagaaggccaacaagaatcccctcctaaaaattacctttgtatagaagaggagaaaatcatagaccattctcacagtgatggattacataccattcatgagcatgatctccatgctgctgcacataaccaccacggcgagaacaaaactgtgctgaggaagcataatcaccagtggcaccacaagcattctcatcattcccatggcccctgtcattctggatccgatctgaaagaaacaggaatagctaatatagcctggatggtgatcatgggggatggcatccacaacttcagtgatgggctcgcaattggtgcagctttcagtgctggattgacaggaggaatcagtacttctatagccgtcttctgtcatgaactgccacatgaattaggagattttgcagttcttcttaaagcaggcatgactgtaaagcaagcaattgtatacaacctcctctctgccatgatggcttacataggcatgctcataggcacagctgttggtcagtatgccaataacatcacactttggatctttgcagtcactgcaggcatgttcctctatgtagccttggtggatatgcttccagaaatgttgcatggtgatggtgacaatgaagaacatggcttttgtcctgtggggcaattcatccttcagaatttaggattgctctttggatttgccattatgctggtgattgccctctatgaagataaaattgtgtttgacatccagttttgacctttcccagtaatcactgttgattacgagaatgttaccatgcagctttgcatctgttccttgtactgtatgcacattgctcaaaggaaagtcagtggcttgcactacttacaagtttcatagatttgagcctaaccacaagaggctggtgcttagtactgttttccctgcacgtaggggtcttttaaaaatataaagcttgtgataaagagaggagaatatgggactccatgaaccagtgttgatatgtttgattaagacttttcacaaaataatcatataaaacactagtctctttattagtagaaacttctgtggctatgcagaaatagagatcgaaccaaaaaaaatcatttaaactttaaaaatattttaaatggactttggggagacattttttgtgtgttttaagaatgaattgtagtgctctttaattcagctacatatattcatgtggtgatagggatcaacttgacacaactttgaaactgcataaagtagacataggaactagaggaaagctcaggctgcattagagtatgaatttagcattgggaaaagcccttattcttgaatctagagttactattctgtatatatttgctagtgtttaaaacctgcaggctaaactacttgaatcgtgatcgtttgtttgtgtgagcttcagcttaatgaagaattcatatggtccttggcttatctacaactggggtagggggtgaccaagggcggtgtgcaactaactcggtggatcttcattatggagggggaagacaagacgagcatgtgctttaatgtgtcctcttaaatttagagaatgtgttttggtgtctatttcagccaccttatggacattttgagacatacagagggtcacan

SEQ ID NO: 23268 - DNA, 1852 bp, Homo sapiens
  misc_feature 1, 2, 3, 4, 5, 6, 7, 8, 9, 1841, 1842, 1843, 1844, 1845,1846, 1847, 1848, 1849, 1850, 1851, 1852: n = A,T,C or G
nnnnnnnnngcatctcacagatccatttattcatgccattttcgaagttgagcccttgctagagattccgaggtcctcagtttcctcaaatagatagatatatatttttcccttaaatgagatgaaatgagtggcgtcctggggtggagggaggcgctggctggagtcggggctgggggtgggagggggtgagggaaaggttggggggggacgcatcactcaacgttgctgctgtcgaaggtgtggcactgaaagtccccgtcaacgtactccatgcctggcagcttcatcccgtacttgtccacgcaccagcagatgccacgcttgcggccacgggaaggtttgcactgctttctcttgtagaatcctttgcggtcacaattgggcaggtacacagcacggggcaccatgcgtgggctggctttgagctcctgcagggaagcctccatgtgtctgcggcaggggccctgctcagactcctgtctcatctcaggtgcagagatgatccgggggtgggcagtgttctcggctcccccgacaaacttggactgggtcagcttctttctgcggtccttcttcactgcttcagccttcagctcggagatgcgggtgtgtttgggccggaagatcttgggggagtaggtctcctcggccatctcagaggtggtgggctcctcgtgctcacgggagtctctctcgatcttgacttgctcgcggtagctcttttcgttgaggcaaaccccgcggccgtgcagcagggcgtgcagcggcttctcctcgtcctgccgggggaggcagcgcagcccctgggcgcagcgctcggtgtagacgccgcacgactgcccctcggccagggcgcaggtcatgcagcagccgcagcccggctccttgaccagctcgcagcccagggggctgggggggcacatggagagggctttctcgtcgcagggctcgcagtgcacgaaggagcccaggctctgggccggccccgcataggcggccagcagcaggaggaccgcggtgagcaacaccatcttctcttagtcgccccctttacctcggggtggggcaggagagcgagagtgcagggataaaggggccaagagggcccccggagatttttttgtttttgtttttgttttaaaatttctggcaggtagagcaggtgccctcccccagacacttgcaaaaatgtagagagaggtggagggctggggtgcctgcgagcaggtcccagttgcaagaattaaagccttgcaacaggttgggggaagcagggcagcgccaggtgcacgcagtgagcggaggccggagaaaccctcaagcctgagcgggtcagaattataggggaaaaaaagccacaaaattgttcacccccaagcaaccaccgaaataatgagatcggatgcagtggagatggcgttgggggtgggagagaaaaatggatttatctttaaaatttttgcttaaaatctaaaatacaccccgctttctaaccctcagctgccagcggtgcgcggcgccgcagaacaggtaagaggcgttggctgcagccgagagggtgggagaaaatgttgaaatcaagaaattaaaaaacaaaaacaaaaacaaaaaaaccccaaaccctaacacctcttttctcccactttgccacctcctcttcgaaattcgcaggttctacgcgaagtccggagaagggtgaaaacggaggaggggtaatgaaaaggagcaaaaaagggaaaaagcccacactgctttgcagctctttcctagctcttttcccctgcagaagtttccaaagagactaccccgcgttacttaattctagaagtacccccgannnnnnnnnnnn

SEQ ID NO: 23269 - DNA, 3519 bp, Homo sapiens; identical to SEQ ID NO: 23120
  misc_feature 1, 2, 3516, 3517, 3518, 3519: n = A,T,C or G

SEQ ID NO: 23270 - DNA, 7113 bp, Homo sapiens
  misc_feature 1, 2, 7103, 7104, 7105, 7106, 7107, 7108, 7109, 7110, 7111,7112, 7113: n = A,T,C or G
nnagacgacccacgcgtccggggcgagtagggaaagcggggagggacggacggaaggacggacggaacccgaggctcccggcggccgtcccctcccctccccctctccggtgcgcgcggagctggttttccgggttcccctggacggagctggatcctgcttctcgccaaggcaggaagtgagtttcgcactgcaattccgggcggtgtcacgagtgaaaagttttgttttttttttttcggcggagatcctcgttggggctgggaaactcctgcaaaactcgagaccaggaagccagcccgcaccccaacccccaccaaagccacctactcttcttctgtgggaggccagtccacatccgctctcacccgagagagatattcagctggatccaaagtgactgatgaagggaaggaaatcatgtcaagcgaagccttgaaaaagctgccctgagacggtgtcccgccgaaagaatgttggctcaattaagaaacatcagggagataaattcaacccagtgtgtctaaaaatgactacaaaacgaagtttgtttgtgcggttggtaccatgtcgctgtctacgaggggaagaggagactgtcactactcttgattattctcattgcagcttagaacaagttccgaaagagatttttacttttgaaaaaaccttggaggaactctatttagatgctaatcagattgaagagcttccaaagcaactttttaactgtcagtctttacacaaactgagtttgccagacaatgatttaacaacgttaccagcatccattgcaaaccttattaatctcagggaactggatgtcagcaagaatggaatacaggagtttccagaaaatataaaaaattgtaaagttttgacaattgtggaggccagtgtaaaccctatttccaagctccctgatggattttctcagctgttaaacctaacccagttgtatctgaatgatgcttttcttgagttcttgccagcaaattttggcagattaactaaactccaaatattagagcttagagaaaaccagttaaaaatgttgcctaaaactatgaatagactgacccagctggaaagattggatttgggaagtaacgaattcacggaagtgcctgaagtacttgagcaactaagtggattgaaagagttttggatggatgctaatagactgacttttattccagggtttattggtagtttgaaacagctcacatatttggatgtttctaaaaataatattgaaatggttgaagaaggaatttcaacatgtgaaaaccttcaagacctcctattatcaagcaattcacttcagcagcttcctgagactattggttcgttgaagaatataacaacgcttaaaatagatgaaaaccagttaatgtatctgccagactctataggagggttaatatcagtagaagaactggattgtagtttcaatgaagttgaagctttgccttcatctattgggcagcttactaacttaagaacttttgctgctgatcataattacttacagcagttgcccccagagattggaagctggaaaaatataactgtgctgtttctccattccaataaacttgagacacttccagaggaaatgggtgatatgcaaaaattaaaagtcattaatttaagtgataatagattaaagaatttaccctttagctttacaaagctacagcaattgacagctatgtggctctcagataatcagtccaaacccctgatacctcttcaaaaagaaactgattcagagacccagaaaatggtgcttaccaactacatgttccctcaacagccaaggactgaggatgttatgtttatatcagataatgaaagttttaacccttcattgtgggaggaacagaggaaacagcgggctcaagttgcatttgaatgtgatgaagacaaagatgaaagggaggcacctcccagggagggaaatttaaaaagatatccaacaccatacccagatgagcttaagaatatggtcaaaactgttcaaaccattgtacatagattaaaagatgaagagaccaatgaagactcaggaagagatttgaaaccacatgaagatcaacaagatataaataaagatgtgggtgtgaagacctcagaaagtactactacagtaaaaagcaaagttgatgaaagagaaaaatatatgataggaaactctgtacagaagatcagtgaacctgaagctgagattagtcctgggagtttaccagtgactgcaaatatgaaagcctctgagaacttgaagcatattgttaaccatgatgatgtttttgaggaatctgaagaactttcttctgatgaagagatgaaaatggcggagatgcgaccaccattaattgaaacctctattaaccagccaaaagtcgtagcacttagtaataacaaaaaagatgatacaaaggaaacagattctttatcagatgaagttacacacaatagcaatcagaataacagcaattgttcttctccatctcggatgtctgattcagtttctcttaatactgatagtagtcaagacacctcactctgctctccagtgaaacaaactcatattgatattaattccaaaatcaggcaagaagatgaaaattttaacagccttttacaaaatggagatattttaaacagttcaacagaggaaaagttcaaagctcatgataaaaaagattttaacttacctgaatatgatttgaatgttgaagagcgattagttctaattgagaaaagtgttgactcaacagccacagctgatgacactcacaaattagatcatatcaatatgaatcttaataaacttataactaatgatacatttcaaccagagatcatggaaagatcaaaaacacaggatattgtgcttggaacaagctttttaagcattaattctaaagaggaaactgagcacttggaaaatggaaacaagtatcctaatttggaatccgtaaataaggtaaatggacattctgaggaaacttcccagtctcctaataggactgaaccacatgacagtgattgttctgttgacttaggtatttccaaaagcactgaagatctctcccctcagaaaagtggtccagttggatctgttgtgaaatctcatagcataactaatatggagattggagggctaaaaatctatgatattcttagtgataatggacctcagcagccaagtacaaccgttaaaatcacatctgctgttgatggaaaaaatatagtcaggagcaagtctgccacactgttgtatgatcaaccattgcaggtatttactggttcttcctcatcttctgatttaatatcaggaacaaaggcaattttcaagtttgattcaaatcataatcccgaagagccaaatataataagaggccccacaagtggcccacaatctgcacctcaaatatatggtcctccacagtataatatccaatacagtagcagtgctgcagtcaaagacactttgtggcactccaaacaaaatccccaaatagaccatgccagttttcctcctcagctccttcctagatcagagagcacagaaaatcaaagttatgctaaacattctgccaatatgaatttctctaatcataacaatgttcgagctaatactgcataccatttacatcagagacttggcccagcaagacatggggaaatgtgggccatctcaccaaacgaccgacttattcctgcagtaactcgaagtacaatccagcgacaaagtagtgtgtcctccacagcctctgtaaatcttggtgatccaggctctacaaggcgggctcagattcctgaaggagattatttatcatacagagagttccactcagcgggaagaactcctccaatgatgccaggatcacagagacccctttctgcacgaacatacagcatagatggtccaaatgcatcaagacctcagagtgctcgaccctctattaatgaaataccagagagaactatgtcagttagtgatttcaattattcacggactagtccttcaaaaagaccaaatgcaagggttggttctgagcattctttattagatcctccaggaaaaagtaaagttcctcgtgactggagagaacaagtacttcgacatattgaagccaaaaagttagaaaagatgcctttgagtaatggacagatgggccagcctctcaggcctcaggcaaattatagtcaaatacatcacccccctcaggcatctgtggcaaggcatccctctagagaacaactaattgattacttgatgctgaaagtggcccaccagcctccatatacacagccccattgttctcctagacaaggccatgaactggcaaaacaagagattcgagtgagggttgaaaaggatccagaacttggatttagcatatcaggtggtgtcgggggtagaggaaacccattcagacctgatgatgatggtatatttgtaacaagggtacaacctgaaggaccagcatcaaaattactgcagccaggtgataaaattattcaggctaatggctacagttttataaatattgaacatggacaagcagtgtccttgctaaaaactttccagaatacagttgaactcatcattgtacgagaagtttcctcataagcactgtggacaaaaaaagcggggaagacagcaagatttattggaagatacttacaggggaaattaatattttgactatttttatatataaagaagaactcaaaaaattatgttcaaatttgtacattaatgaaataatggataaaggagaatataaaggagactgttgaattcataccatataaaacttgttaggtttttaaacatagcaatcaaggctacaaaaacaaacctgtgttgtttttgtatagattgtaggtttatttttggatttcatatacatgactgaactgtgtgcaaggcaatagttagccttgattttagcccagagacagatggcagagctatctctctcatagcttttatgcccttatttttattcaactggtattaatgtttttctcctgaaactactttttttgatgtgggcaagagatttgaagtgttggcttttgctatgtgcatattgaattgaagagtgagtaggtgaaggtggtgctggtgggttcactttccaaggccagactaaaacagttattttctataaaaatctggaagcaaagaatggggatggggagagctacgtggtagtatgtttttattaggagaataatgcaataaaatatgtaatgtcttttttataaagcaaaaaagacaataattgcatttatgagctcggcaggatctgttcttgtcatagccattgactatacatttgctactggtgattcagtttttaattttttagtcacaggaaatttttaactctactgtagatgcatgtccatgcattttctgtgttatggaaatccactgatttttttttttttttcaaatggtggtacttgcaatctgttttataattagtgctccatttaaatctaatttataatttttattttaagcagcaaatgaaacaaaaatggccagttttaagattgtgttgcctgtaacacaaaatgttacgaaggtttaggaaagcctctttgatttttgtttggccttgcattgccttggtaaagtaaaaggaaacagtacacttggagctaggaaaccaaagcaagctttgtgaaactggcacagtgatagagaattgctgtggagagttatagagcaaagggatgggtccttgaggcctgccagtgtgtaaaggtgttcaaataaagggctgtttctacaggtaacattaaatgtgaactcaacacttccagagtctttaaagggtttctatgtgtatcagtgtaatagtgttttaccaccaactgcctttctttgttcctagttactgtaacaaatatttgatgatagaggtttattaattttgtttatccagaccattaattttatttgtttttgttctatgtaatcaaataaaatttgagtaacatgtaatggtaaggattaatgcatggttatttggaccagaaaaaagtgccatagaagaccaataactgtttagttgaggctagtctggaacctttcattagagcaatatttggttattgcacttcatttttatttactaagaaatgcaatttgggaatttttaatctgttatgctttgtttatcaaccttgattttaattaagacttttataagactagcttaaaacaccaaccaacattatttttgcaaaagtgagttggactcactttccattcttgctagtcagagtaagtaggcagcacttttaaaaatatgtgaactcaaatattgcacttctttcaagatgttatcaattggttattgtactgtatagttttaataattttgattgaaaccctttaacaactctttgtaaattttaactcattttagttgattttcagtactatttacataggaattgatttttatggatatagtagaagaaatgtgctgtattttgataaaattcacttattgtatgtgtgttgtaatctaaaaaaaaaaagaatgacaaacagcttctttaagacaagtctcggtgttccctttattcttagtttgtttttaaatattaattttggcattctaaaatagctaacatttcttttattgatttcagattttcacaggcacattctacttttaatcagaaatatatttaataagtataattgtgaagttttcaactactttaccttgaaccacatataccaattataattttggaaaaggaattaagcctcacggaacaatggatcttcagcaaaccttaacttcattgtctgcacattacattgaagtattataaatgcaacagatgttatatgcactggcattttatcctactctagttagttaaaattttatagtattcttgcaacacataaagttgcgtaagaaactttaccaagaggagtattatagccaagttttctttgaaagtattggaaaactaaaattaaatgacaaggactttgaattagaattttgctgtaataaagtttcaaaatttgaataaaataattaaannnnnnnnnnn

SEQ ID NO: 23271 - DNA, 7113 bp, Homo sapiens; identical to SEQ ID NO: 23270
  misc_feature 1, 2, 7103, 7104, 7105, 7106, 7107, 7108, 7109, 7110, 7111,7112, 7113: n = A,T,C or G

SEQ ID NO: 23272 - DNA, 1244 bp, Homo sapiens
  misc_feature 1: n = A,T,C or G
nagtcgacccacgcgtccgggccaggctgttttaaactcctgacctgaggtgatccacccgccttggcctcccgaagtgctggaattacaggtgtgagccactgcgcccagctgagtaaatttcttgattgcacagaatgtacggtgatattggcggacttaaggacatcgaattgtttatcaggaataaagtattatgtgtgttttctgcggccctggataatgctgtagcattcagggtcgattgagtaaaaaaaatgtagagatggtttcctgtttgtttttgcttctagttttcattcatttgctatttattctcttctggctttgcttgtgtatgcatatatataaaaccattattattattatttttagtttctagtggaaggcttttatttggttctgtgaatagtcattttgtttcctaagaacttccagcaagttgtattcattccattcatctagaattcctaggctgcctttgtcgggcctgcaggtattaatggagaatagcagctttttatttttttatatttattttttgagacagagtctcactctgttgcccaggctggagtgcaatggcgcgatctcagctcactgcagcctccgcctcagaggttcagagtgattctcctgcctcagcctctggaatagctgggactacaggcacctgccaccacacccagctaactttttgtatttttagagaagatggggtttcatcatgttggccaagctggtctcaaactcctgatctcagtgatccatctgcctcagcctccccccgttataagatttttttcctctggtttttagtaaatgttttttttgagattgcttagcaccagaatgatttgcaaatttgaaaataggaactccactaggaatgccggatagaagagtgcttcacatttgtagagggagacaagaactaaatatcacgacgtctttctgagccttttggtttgctaacgtgccccaaattcttattccaaacggtataagataattatgtgtaaatgaataccagctctacttagttttatttcatatttgtgtatctgaatatattaaaatatctttttttttttttttgatgcggagtcttgctctgttgtccagcctggagtgcagtggcatgatctcggctcactgcaacctctgcctcccaggttcaagcgattctcctgcctcagcctcctaagtagctggtattacaggagtgtgccattagcctggct

SEQ ID NO: 23273 - DNA, 1813 bp, Homo sapiens
  misc_feature 1, 2, 1696, 1738, 1760, 1809, 1810, 1811, 1812, 1813: n = A,T,C or G
nngcgtgcgctgccggacgaggctcccgccgccgattgacccgcgctccgcccggcggattgacccgcggttccccgggagtcgggccgggaccttggtagctaatgtccgaagaaagtgactctctgagaaccagcccttctgtggcctcactctctgaaaatgagctgccaccaccacctgagcctccgggctatgtgtgctcactgacagaagacctggtcaccaaagcccgggaagagctgcaggaaaagccggaatggagacttcgagatgtgcaggcccttcgtgacatggtgcggaaggagtaccccaacctgagcacatccctcgacgatgccttcctgctgcgcttcctccgagcccgcaagtttgattacgaccgggccctgcagctcctcgtcaactaccacagctgtagaagaagctggcccgaagtcttcaataacttgaagccatcagccttaaaagatgtccttgcttccgggttcctcaccgtgctgccccacactgaccccaggggctgccatgtcgtctgcatccgcccagacagatggataccaagcaactatccaattactgaaaacatccgagccatatacttgaccttagaaaaactcattcagtctgaagaaacccaggtgaatggaattgtaattcttgcagactacaaaggagtgagtttatcaaaagcatctcactttggcccttttatagccaaaaaggtgattggcatcctccaggatggtttccccattcggataaaagcagtccatgtggtgaatgaacctcgaatatttaaaggcatttttgccatcataaaaccatttctaaaggagaaaatagcaaacagattcttcctccatgggtctgacttgaactctctccacacaaaccttccaagaagcatcctccccaaggagtatgggggcacggctggggagctggacactgccacctggaacgcggtactgctggcttcagaagacgattttgtgaaagagttctgccaacctgttcctgcctgtgacagcatcctgggccagacgctgctgcccgagggcctgacctcagatgcacagtgtgacgactccttgcgagctgtgaagtcacagctgtactcctgctactagcccgtcccccagggtcaccatctttaattcttttccttcttttctttggagaggcacaaggagaatttaagggtccatggattcagtcttgctccttgtaattaaactgcaggatggaggaacagcctgagatatgagcatgagcccattttggggtaagcctttggttactttaattactccatggaagacatggaaaatgtccccactgattcttaaacatttggaatcccagtctgcaactattaatctggaggctatatctattttgttttgctttttggttggggggtggtgatctggttcttacacatcttggaagcaagaacaatcaggaccaaagtcactttgatcccacttttccaggagaaaaaccacctgtttggccagtgagaactacttgtatgaaataatttggccaaaccttcagtgtgaccaaatgtgagactgggagtttgtgtttttcacaggaaccctaagtatagaacctctgctgctcatcaggaaacttactggagatgaaggccccagctgttgtcaccgggtttggaaagcaccttaantgaatcatgtaagcatcaggacataagcagcactttgtggtnaaatgtggaagccggagacttnaaagcacctctgggacccactggttgaagtttgcaatagaaacttaagnnnnn

SEQ ID NO: 23274 - DNA, 1138 bp, Homo sapiens
  misc_feature 1, 1129, 1130, 1131, 1132, 1133, 1134, 1135, 1136, 1137,1138: n = A,T,C or G
ncgtctgggcgtcttgcattactatcgtgcggctgcaggaggtgtcgagcggcgttatttttttttgcggtttgcctttttttttcttttttttttttggaaccgcggttgtttaaaagcctgagggaacctggaggggggctcccactctctaccttctttcctccgagtttgtgactccgacatggacaaagtgtgtgctgtttttggaggctcccgaggcattggcagagctgtggcccagttaatggcccggaaaggctaccgactggcggtcattgccataaacctggaaggggccaaagccgccgccggtgacctcggcggagatcatttggcatttagctgtgatgttgctaaagaacatgatgttcaaaatacatttgaagagatggagaaacatttaggtcgagtaaatttcttggtaaatgcagctggtattaacagggatggtcttttagtaagaacaaaaactgaagatatggtatctcagcttcatactaacctcttgggttccatgctgacctgtaaagctgccatgaggactatgattcaacaacagggagggtctattgttaatgtaggaagcattgttggcttaaaaggcaactctggccagtccgtttacagtgccagtaaaggaggattagttggattttcacgtgctcttgctaaagaggtagcaagaaagaaaattagagtgaatgtagttgcaccagtgacaatacttgtatggagtttattttgcacatttgcaagtatatgagtgtaatcttgggactggaactgcaaaggcttcagaggatttgtacacacagatatgacgaaagacttgaaagaagaacatttaaagaaaaatattcctcttgggaggtttggagaaactattgaggtggcacatgcggttgtgtttcttttagaatcaccgtatattacagggcatgttctggtagtggatgggggattacaactcattttgtaatttgcagattattcagttataggggtgattagcatcaagggcacactttggctactgattagacaattatacctacatgggtaacatgtgctaatcaaacctgctgatgctacaaatgttaatttctgtctttataaaaatatgtcnnnnnnnnnn

SEQ ID NO: 23275 - DNA, 3474 bp, Homo sapiens; identical to SEQ ID NO: 23059
  misc_feature 1, 2, 3, 4, 5, 3472, 3473, 3474: n = A,T,C or G

SEQ ID NO: 23276 - DNA, 1310 bp, Homo sapiens
  misc_feature 1, 2, 3, 4, 5, 6, 7, 8, 9, 10, 11, 1308, 1309, 1310: n = A,T,C or G
nnnnnnnnnnncacgttcaattaaagtaatttattgtattcttccagatcagacataaagagcatcttgggaattgataccacaacacaatgttatacaccattttcacaaccaggcttgcattgaattcttttttaaagaacatagtaattttaaaaaatctaaatatttacatattaataaaacatatatacagaagattgagacattatccatagatatggattttttttttgctaagaaagcctataaaaaggtttctgaataaagactgaacagtagtcacagtaagtaaacacaattttaatttacaaaatatgattttgctgttgcagttttgatacgtatttccagtgtgtagatccgttcatcgcacacatctttgggttgaacaagctccacccgtcctcaagtgctgaacaccccaagctgtggccccgccttggaaggcagtgcttctgaaggttcccagcagatctcttaacagaccacagttggaagttagcgtttctgccttgaccagcaacatactcatcctattttaacacggcgaaaggtcaccaattaatcttctcccttcccttgggtagtagctccttgtgggaggcagaggacggattttaaaacccatggtgcaaaaaacacaagagctgtggtttgcagtccttcatcagaccacttgagaaaacaaagggactgttgtcaggaacgggattacttactggccagaaatggaaaaaggctaacaaaaaggtatgatggaaataatttctccaaaccttccttgtagccccccaaaagaagaaaaagaagccacacatatatgagatgtaacttgtctagtagttagattgattctacaagccacgcctaaagccagctttttgttacagtacagggatgccttctctcatctttgatgactggctggtctttggtggaacagggatttatcccagagggcctctcctatctctaggtttagcgtttcagtgtgatgtgacatgaataccttggacagggtagtcaggaaattcgggttctaggcagggccccagccacggaggggttaacgggctctgggcaaccgcttaccctcattcatcctcagtttcccgggtgggactgagtagcctctacaataacttttagctcttaacattctgtgctttgccaaatccagggctaggggaaggcactggaactgctagtggacaggtgtgaaccccgggtttggtgatgtgtagtccaaattgttctcatgccaatttttggcctttgggtcaagtggcgaagattcaatgcaannn

SEQ ID NO: 23277 - DNA, 1260 bp, Homo sapiens
  misc_feature 1, 2, 44, 1256, 1257, 1258, 1259, 1260: n = A,T,C or G
nngaggcaggagaaccgcttgaacccgggaggaggaggaggttncagtgggccgagatcgagccactgcactccagcctgggcaacagagtgagactccatctcaaaaaaaaaaaaaaaaaaaaaaaaaaatctgggacccagtactgagtgaagacaccagagtgaaggagagaggccatgctgtgtccgagaagctcctactggggtggaagggacagctccacaaaggctgctcttgcaggggctctcctgcagcaaggtgcctgctgactgtccccagactgtctcccgacacagagggatgcaaaggcagcctcttcctgctcagtggaatagggaaattatatcacctttcacttcccactctcacttctgcccctgctacccttagtctttggcttttgctgacattttcccctcttatcttttctcctgaccaagttctaggtatttcatagggcagtctaggtgagggttggaaccccaatgagttgggcaacagaaacccagctcacactggctgtcactgtgggcaagctgttcccctcatctctaaaagtggagatgagattagtgtatgagtctggcttccattcaactgtgtgtgaaaaaaaattgtaaaattttctttctggtttacgcaagttaaaagtttatttctctcatatgaaaggagtcaaggcagacagaccaggatggggagggagatgtctacagggtcaaggacccaggctcttatttcgctgtctgacgtccttagtatgaggctttcaccttccaggatggctgcttggcctcctgccatggtctttgcattccagccagcaaagaggaagaaggcatgaagaaaggcctgcctctgactttaaaaacatttcttggaagtcccatactattttgcttaatctcctcgggcagaatttagtgttgtggccataccgagcttcaggagaagctgggaaattaaatctttattgcagatgcccatgtgctcagcagagaactggggtgcttcattctcgttgcttcttccaccggcctctccgcgagacatagctaaacttgaacttggcattccaagggtctggaaacatcttcgtgggacccatcgagaggttgtttaaagactggcacccgctcccgcgcccaggtgggggaaagggctggccagaagtgaaagtccggtcggggcgccacacctaggctgcggattccgagagactgggaggctggaggcccccgcgtgcctgcccnnnnn

SEQ ID NO: 23278 - DNA, 1439 bp, Homo sapiens
  misc_feature 1, 1435, 1436, 1437, 1438, 1439: n = A,T,C or G
nccggactcatcgggtctcggctgagccaccgggtgagctcaccgcccagctcaagccaggagattgcgggggtgccattcggtgccccgcgatttgcttgtaaatgcatcacgaagaggcagcccagaatgaagaaagcaagcaggagtgttggctcagtgcctaaagtgtctgcaataagtaaaacgcaaacagcacaaagacttaaacctgaaaacagctcttcagcatctacgggaggcaaacttgtaaaacctggaacagcagcatcattgtcaaagaccaagagcagtgatgaccttttagctggaatggccggaggggtaacggtgactaatggtgttaaaggaaagaaaagcacctgcccatctgcagcaccttcagcatctgcccctgccatgaccaccgtggagaacaaatccaagattagcacaggcacagcttcttcaaccaagcggagcacttctacaggtaataaagaatccagttctactagagaaagattacgtgaacgtacccgattaaaccagagcaaaaaactaccttctgcaggtcagggagctaatgacatggcattggccaaacgttcccgcagtcgaactgctacagaatgtgacgttcgtatgagcaagtctaagtcagacaatcagatcagtgacagagctgctttggaggccaaaggtgaaggatcttctcacactggcaaaaaccaaagacgtagaaattttacatttgagaaatgaactgcgagacatgcgtgcccagctgggcattaatgaggatcattctgagggtgatgaaaaatctgagaaggaaactattatggctcaccagccgactgatgtggagtccactttattgcagttgcaggaacagaatactgccatccgtgaagaactcaaccagctgaaaaatgaaaacagaatgttaaaggacaggttgaatgcattgggcttttccctagagcagaggttagacaattctgaaaaactgttggctatcagtccctgagcccagaaatcacccctggtaaccagagcgatggaggaggaactctgacttcttcagtggaaggctctgcccctggctcagggaggatctcttgagtcaggatgaaaatacactaatggacccatcagcacagtaactcccatggacaattagacagtgaggcaggaggtctaacaggccctcacatcgagcgatgatgggctggatgacatcctcccaaagtcgaaggttcccagataagcgccccggaaggagcccgggaagcaggacaggccggtgcgacgaggacccatgagaaaaccacacgaagggatccgaccgaagaggtaagaacagacctagacagggacaagcagggctcacaagaaaacgaagcagaaataaaaggagaaagacagggttttaaaagggaagagctcctannnnn

SEQ ID NO: 23279 - DNA, 3228 bp, Homo sapiens; identical to SEQ ID NO: 22886
  misc_feature 1, 2, 3216, 3217, 3218, 3219, 3220, 3221, 3222, 3223, 3224,3225, 3226, 3227, 3228: n = A,T,C or G

SEQ ID NO: 23280 - DNA, 993 bp, Homo sapiens
  misc_feature 992, 993: n = A,T,C or G
ttggagctcaccgcggtggcggccgccggaccaggtacgcggggagacttttgccacacacaaatttgtgaaaattaaacgagatgtggaaggagaacctcaggtgatttcattccctagtgaggcctctgagggcctccacactgcctggcagaacataccactgaactagtatgtgctaaaaggagggcacaaacatccgctccttccctaggcctgctggctctggttttctatgcagatgattcattggattgggggtgagtgtttgttatttctgggggcagatgtgagctttgagggttggaatatcgggaggcattccttagtttcctcaactagcctggaaagttaggagtctagggtaattaccccccaatgagtctagacctactattcactgctttgtgtgcattttggttctccctctttaaaaaaccctttacaaagaacaaagaaaaagtagatagtgctaaatattttagctcatgaaccttggttaggagttggcttgggggtacaagtccccaaatacctctggtttacagtacgcccagggagtggaaattctcgtcaggcaggtactttcacaggtgtaggatgggacgggacaaagtgaagccaggacaattcagttccttatagcttcttccttccatttcggagatctcaccatgccatctatcacagggttgcaaagaagatgctgagagttacacaaggcactccattggagtcagaagaacatgcacgagggtgggggccaagcgggagggtcaaatgccatccagaggactcagcgcaaaaaagccctagttgcgctcgaatcaacccggtggtagtgagtgcaagtccgttacaaaggcattcagccttggcatcctttcggcacgtgtaggacaacgttaccaagcgcaacacgaccaaggagagactaaaagcagcacgcgcacataacctaggaggggaaggcgacctaacaaccagtccann

SEQ ID NO: 23281 - DNA, 1866 bp, Homo sapiens
  misc_feature 1862, 1863, 1864, 1865, 1866: n = A,T,C or G
cgtccaaattaggctagggcggccgcgcgctaagatggcggcggcgtgagttgcatgttgtgtgaggatcccggggccgccgcgtcgctcgggccccgccatggccgtcaccatcacgctcaaaacgctgcagcagcagaccttcaagatccgcatggagcctgacgagacggtgaaggtgctaaaggagaagatagaagctgagaagggtcgtgatgccttccccgtggctggacagaaactcatctatgccggcaagatcttgagtgacgatgtccctatcagggactatcgcatcgatgagaagaactttgtggtcgtcatggtgaccaagaccaaagccggccagggtacctcagcacccccagaggcctcacccacagctgccccagagtcctctacatccttcccgcctgcccccacctcaggcatgtcccatcccccacctgccgccagagaggacaagagcccatcagaggaatccgcccccacgacgtccccagagtctgtgtcaggctctgttccctcttcaggtagcagcgggcgagaggaagacgcggcctccacgctagtgacgggctctgagtatgagacgatgctgacggagatcatgtccatgggctatgagcgagagcgggtcgtggccgccctgagagccagctacaacaacccccaccgagccgtggagtatctgctcacgggaattcctgggagccccgagccggaacacggttctgtccaggagagccaggtatcggagcagccggccacggaagcagcaggagagaaccccctggagttcctgcgggaccagccccagttccagaacatgcggcaggtgattcagcagaaccctgcgctgctgcccgccctgctccagcagctgggccaggagaaccctcagcttttacagcaaatcagccggcaccaggagcagttcatccagatgctgaacgagccccctggggagctggcggacatctcagatgtggagggggaggtgggcgccataggagaggaggccccgcagatgaactacatccaggtgacgccgcaggagaaagaagctatagagaggttgaaggccctgggcttcccagagagcctggtcatccaggcctatttcgcgtgtgaaaaaaatgagaacttggctgccaacttcctcctgagtcagaactttgatgacgagtgatgccaggaagccaggccaccgaagcccccaccctacccttattccatgaaagttttataaaagaaaaaatatatatatattcatgtttatttaagaaatggaaaaaaaaatcaaaaatcttaaaaaaacaagcaaacagtccagcttcctgtcctcctaaagtggcccctgttcccatctcccgggccagacagctgtccccccgtcctcctccccagcccagcctgctcagagaagctggcaggactgggaggcgacagatgggcccctcttggcctctgtcccagctctctgcagccagacggaaaggcggctgcttgcctctccatcctccgaaaaacccctgaggacccccccccatcctcttctaggatgaggggaagctggagccccaactttgatcctccattggagtggcccaaatctttccatctagggcaagtcctgaaaggcccaaggccccctccccagtctggccttggcctccagcctggagaagggctaacatcagctcattgtcaaggccacccccaccccagaacagaaccgtgtctctgataaaggttttgaagtgaataaagttttaaaaactaaaaaaaaaaaaaaaaaaaaaaaatcgaggggggggcccggtacccaaattcgccctttagggaggtctttttacaannnnn

SEQ ID NO: 23282 - DNA, 1047 bp, Homo sapiens; identical to SEQ ID NO: 23075
  misc_feature 1045, 1046, 1047: n = A,T,C or G

SEQ ID NO: 23283 - DNA, 590 bp, Homo sapiens
ctccaccgccgtggcggccgaggtacctttgctgaagcatctttgtgatcatattttgtttattaacccagccatctggatacatacacctgcaaagacggagtttcactctcattgcccaggctggagagcaatggcgcgatctcggctcaccgcaatctccgcctccctggttcagcccattctcctccgtcagcctcccgagtagctgggattacaggttcaactttccctatatacatatttgtctgctgaatttattggaactgctaccatctacaccaccatatgcagaataggaacagttattaaagataatgcacaccttaaaatattactactgggttattaatcctgctgacagtagtggcattacacctaaaggattagagccaaagattcctgaagacagaaatattcatgatgtgctacagttactggtggctttaatgtcagaacacccagcctcaatgataccagtatttaatcaaagaaatggaataagcacgttgggtgagagaaagaaagaaatcacatcctttatcctcccacacagccaaagattcctgaagacagagctgatgccatgt

SEQ ID NO: 23284 - DNA, 942 bp, Homo sapiens
  misc_feature 1, 916, 917, 918, 919, 920, 921, 922, 923, 924, 925, 926,927, 928, 929, 930, 931, 932, 933, 934, 935, 936, 937, 938,939, 940, 941, 942: n = A,T,C or G
nagtctctcctttagggaaattaaatcccttaacgaatgggatcagatggagaatttaagccaatgcccgtaggtcaggttccagaaaattccccccacccagtattaacaggccgaccctgcttagttccgagaccagatagatcggccctttcagtgatattgccgtagacgtctctaccaaattcctgacaggtggttactgaatctctctatgaactttccattcaaaactttccaagtttttccttatgtggaaccgaaatctttctttctcccgtgaaactttactactatcagataattgaagacagatctctttgtattctcttcaagcccaaaccaattctgttccttcaatctaaatagtggtaatatgaatgtttaagaaatgaaataagaaacatgtgcaggcactttggaaggtgctaagtgactgccctaaggaatgaaaagcaagggccaggtgggagtagcccagcgaaggcacttgggctgccaggaacaggaggcgtgggaaactctggcttaggaaaacatgaacacaggggcaacagaggcaaactgttgttcgagttaaatataaatctcaggctctttaaaggtaaaaggtttaaggataatccatttggaagaagaaaagagtgaggctgaaagtaaagccacatgacaagcatataaaaaaaaatgcagatgatacaaatatgaaagaggccttcagtgtttgtttattaagaatcttaatgcagtttactgatggattaaaaacagctaacattgtctgaaaattatgttacctataagaagttggaaataaataaaagcataatcactaaagacccccacccacccacaaaactcttttaaaaaattacatataaaaaaaccccgggggggaaaaaaaataaagaaaaannnnnnnnnnnnnnnnnnnnnnnnnnn

SEQ ID NO: 23285 - DNA, 2647 bp, Homo sapiens
  misc_feature 1, 2640, 2641, 2642, 2643, 2644, 2645, 2646, 2647: n = A,T,C or G
ncctactactactaaataaccggccggtcgactttttttttttttttttttttgacattaaataggtttaatgaatccacttcctttattgcagtaacctctgtacaaagcagcaactgcaatactcaaggttaaaacattagaaaagcatttgtgtgacaggtatattacagtattatcaaaatattacattttcagacttacttagcagataatcatccaccagagcttaaatctttaaattatttccatagtcttaaaaaatatgtaatgtcagaatgcatataaaaagaatgtaaaaggaaacctaaaatacaaatggaataatgtaacaaataaatatttgatttcagtaactgttaataatcagctcaacaccaccattctctctaaactcaatttaattcttataggaataatgaactgtcaaatgccatggcataattatttatttccaagctatcatcaatgattagaactaaaaaaaatttggcataaaaaaatcacaattcagcataaataaagctatttttagcttcaacactagctagcatctctaagaattgttgaaataagtactataaccttgaaaattttcgacctggtgtctagtgttaagtgaaagtaatgcattttttttaagtgaaaagcttcttacattatttcacagacagtattacccaccccacattatgaatagttagatatattttatgtactttatacccacatgtatgacgcatgacatttggttcctgtagtacagatcacaatgttgttttcctgaatgggaaaaacttaaaaaaaaaaaaaaaaaaggtaagtgtacctgtgcacatttcaagatagcagcactcagtccatgccctattatccatcttaaaagttcacacattattgtttactgaataatatttctactgtctttacccccaaacattgcaaaacctgcaatggaacaatgctgtgagttataatgtagaaatttttttttttttttttttagaaaatcagttacttcattttcttaatattctgaattcaagttatcagatctctatacctaggtcatactcatgaagcaaaaatgctgcacaccactgaaaataataacgttatagatgtctatcaagattcatgaaaaccagccaggcgcagtggctcgcacctgtaatcccagcactctgggaggctgaggcgggtggatcacaaggtcaagagatagacaccatcctagccaacacggtgaaaccctgtctctactcaaaatacaaaaattagctgggcatggtggcgtgcacccgtagtcccagctactagggaggctgaggcaggagaatcgcttgaactggggaggtggaggtcgcagtgagccaagatcacgttactgcattccagcgtggcaacagagcgagactccgtctcaaaaaaaaaaaaaaaaaaaaaaaaggattcgtgaaaacctgcataaattttccaccacagaaacttgtatcaattaacccacttaacagtattttaggcgaagtattctccatttttgaactggaaaattgtgtgaaattacagcatgcccttcaaatgatcacctttgttctctatgaaacctgtatctgttaatctgatttgaacatatgtttacttaaaccaaagtttgcctaatgaatcttgatcactttaaaatgcaaaataccagcaacataaatttcattatatatacacatatgcatctgtgtatgcatattacatatatatacacacacacacacaaatatgtagacataaatcccttgaaatgttttcaggaaatccttccttgaattataaatgaaaaacttcacattaataatttcatataaagcttttagtaacagtacatatgcactgtcaaaattttactagactatgatgtcaaaacagacatttcaaaagcacaaactggcagtttttcttaacaaaagttttaaaatattaagaatggattaaattttaatattcagaataatctgttcaaacctgagtgtattaagactaagtgtacttgacaattgaatgaattaagcctaaaaacatttctctaagaaaccagtggtccatttaaccatttgatgaaacattattttaatgacttataaaggatagtacagtatactgaaattccacttaaatactgaaatattctactaaatgacattgttttgtctaaatttcctccagaaaaatctgttagcatttcttaaaagtccctcagatttgagggaaattctaaattaggacagttttctctccaaataaatataaatgatcttgagtatttttgtttaaagaatgacgtgatttttaagcatggtatatagaagtatgggatgaatcttcaatcttccctaaggtttcaataaataataataaatatagtatgaatagccggtcagggcgctcaaaaaggtatttgggggggcttttttccctagctctatattcacatatactcatataaaccttaccatggggttactttttggttaccatttccccttccccatttttgattaacctgccctaattctcacctttaatatctaacagatacctgtatagaattaacaaaacacatacagtactcaacactaaatggtcaannnnnnnn

SEQ ID NO: 23286 - DNA, 930 bp, Homo sapiens
  misc_feature 1, 2, 926, 927, 928, 929, 930: n = A,T,C or G
nnggaggtgtaggtgggtggggtcatttcactagtgttgtctcagttaggcctccattcctactttcctttgaaagctgttcttcttgtgtactcaacccagaaaattccaggcctattgtcctcagccctcactagagtcctagatacgcaccgttttattttctttttttggtgtaaagattcagttaaaaaatatcttccttcagacatctgctgactacaggaaattattgtcatagcccatgtgaaggtcataatgagactaagatgacgttttaaaactcctgaactctgtagggaaaagcaagtagaagctattattcttactcgctggtaacatactgtagatagctccaggactgagacccgaggcccggaggacacacttagtgttctccctatgtcacagtcctacaggccagcaaaagtgagtacaactgtcccagcatgtcagttacacatactggccctaaatgttcagcataatttaaaagggaaagaaaaaagttggcttttcagacaaaattttgtgtgaactgaacaacgtcagactatgcttctttgggtccaaataattttaactttacagctctcagatgttctggcagctcattctttgttcatttcacctattatacaagtgtttctgggtccaagccacagagcaaaatagacacaaataaatcaaataataaatgtttcatataaaggagaaaatgctaatggtctgttatctataccagcagtccccaacttttctggcaccagggactggtttcatggaagacaatttttgcagggacccaggaagtgcggggtagtgggtggtaggatggctttgggatgaaactgttccgcctcagatcctcaggcattgaggagcctgcaacctagatccctcacatgtgcagttcacaacagggnnnnn

SEQ ID NO: 23287 - DNA, 1240 bp, Homo sapiens
  misc_feature 1240: n = A,T,C or G
ggagtcgacccacgcgtccggcgctcacggcgtgggactgagcagctacctttcaactgagaaagatgccagccccaaaaccagcacttctctgggaaagggctccttcttggacaagatctcgcccagtgtcttacgtaattctcggccccgcccggcctccctgggcacggggaaagattttgcaggtatccaggtaggcaagctggctgacctggagcaggagcagagctccaagcgcctgtcctaccaaggacagagccgtgacaagcttcctcgccccccctgtgtcagtgtcaagatctccccaaagggtgtccccaatgaacacagaagggaggccctgaagaagctgggactgttgaaggagtagactctgcgaccagtacagaccctgtcctggctgaacaagaagagacacatgctccacttgggagcctttgccaccacgcaactcagggctcaagatgaatgggagggagagatttgagtccaagcatacatttatattcagtgttgtgccattgagttcccatgtggatcattctgaaggtgatctccacaagagggtgtgtgtgtgtgtgtttggtgtgtgtgtggagggggggccgctggatacatcactgaagctattgatataacacaatgagtcactgttcagaatttgctcttgtcagatgttttcttacattgggtagagtccagcctagtgagagctgagtgacaggggctggccatgcctgagacaaaaagtcaaatgagacaatggacgtgtcaatgacttgaaaaaaagtcacatccagcaatgcaggtcacatgaaatatgggcctcctggaatccctacagtggatggcagactggctcatacttgcagatcctctctcagttccacgccttctggacaaggctgggctaagaggagctgattcgttatctctgcaccccatggcctcttcagttgtcagcagttcccaagacaggttcgtactgtaaccatctcatgatgaatgatagcgaacgccctgtggctgaaaggcagaagggaccatgtttggcctactcacgggaggagccgtgcccacggtgaaatcaccccaggggtgtccgaagcgaccggaatcaggttcggcacacaagcagcgggtggggaacagggcaccggtatccaacaaacctgggcggagtatgtccgaaccattgttactaaggatggggtgtccacccactctgtccaaagcn

SEQ ID NO: 23288 - DNA, 346 bp, Homo sapiens
accacaaattaatggttaaaatgcatccctcatacgacaatgtaacttcttcctctcactgttgatggcctatcttcctgaaaacattaatctgggggtgagaacttgggagatacacacagttgggttcaccataaatgaggagcctcactgacagtggaagatgcacaggaaaagaaagaagactatgggctgcttccttagaattgtcttcctgcttgctgtgttactgctagagcttcctgtgtgggctccatatggtccctattcttcccaccactcatgaaaacaccaaagagcaggctcagagtgaccacagccaagccccagctctgccagcaggccc

SEQ ID NO: 23289 - DNA, 835 bp, Homo sapiens
  misc_feature 1, 831, 832, 833, 834, 835: n = A,T,C or G
nactggaggcagtgattttggggcagagaatttgcaacacgtggtagtgaactgtgaggagttgaggggtctgaagactgaaagagtcgaatggttgttggcaggacctagaagaatcccttaggatgaagctgagtcttaccaaggtagttaatggctgtcgcctaggaaaaataaaaaacctgggcaaaacaggggaccacaccatggatattccaggctgccttctgtataccaagactggctccgccccaacctcacccatcacacgctgcataatatccacgggggttcctgccatggtcagcttacgctgtcatccctagcagaacatcatgaagtctgtgacagaatataaagaaggagtgtggaaagtttataggtaaaaattaagttacttatatgtgccttgtgatgtgttaattggagttggaggtgctgttacctcttgtgatctttcattcatatgttgtttattcataaatttaataagtattatttgaacatctaagagccaggcatggaagtcaagatgtgactaggaaacagttgctgtctcatggaatttggaggctagctgggataaacgatagagaattctagtaaaaaatgtggttcctgttacaggattagggaatttggatgggtattcatgacaggcaggagggagaggatataacttggtcttaggtatattgtgcaaaggggtcggaataacacaggatcttttttggttacggtcataaaaccaaggaaggttttggaaaaattgggggttcgggagaggaaaaagtacacgtgaggggcccaaagttgtggaactcgggggannnnn

SEQ ID NO: 23290 - DNA, 351 bp, Homo sapiens
accactggtttgcaaatagagaaacctctaagactcttcttactcatttccttgaccaaaataaaactatgagtggaaaatggagtgatgagcagtaagcacactggaaaagtgggatgatcttgaagcaaattgctgataatcacttctgggattcagactgagacttgagcaagcttcaaggttggatgactgaattgaagacttccatgttaaattggttatcttgagaaggatacaagttaatttcagatattgatgatgctcaaatacttccccgctcaactagagtcagacatttttcacaaagtgaagaaactggaaatgaagtttttggtgctttgaatgagg

SEQ ID NO: 23291 - DNA, 2233 bp, Homo sapiens
  misc_feature 2233: n = A,T,C or G
acttttttttttttttttgccggagtcgagcgggtgctgctagcggaggcgccatattggaggggacaaaactccggcgacagcgagtgacacaaataaacccctggacccccttgttccctcagctctaagggccgcgatgttgtacctagaagactatctggaaatgattgagcagcttcctatggatctgcgggaccgcttcacggaaatgcgcgagatggacctgcaggtgcagaatgcaatggatcaactagaacaaagagtcagtgaattctttatgaatgcaaagaaaaataaacctgagtggagggaagagcaaatggcatccatcaaaaaagactactataaagctttggaagatgcagatgagaaggttcagttggcaaaccagatatatgacttggtagatcgacacttgagaaagctggatcaggaactggctaagtttaaaatggagctggaagctgataatgctggaattacagaaatattagagaggcgatctttggaattagacactccttcacagccagtgaacaatcaccatgctcattcacatactccagtggaaaaaaggaaatataatccaacttctcaccatacgacaacagatcatattcctgaaaagaaatttaaatctgaagctcttctatccacccttacgtcagatgcctctaaggaaaatacactaggttgtcgaaataataattccacagcctcttctaacaatgcctacaatgtgaattcctcccaacctctgggatcctataacattggctcgttatcttcaggaactggtgcaggggcaattaccatggcagctgctcaagcagttcaggctacagctcagatgaaggagggacgaagaacatcaagtttaaaagccagttatgaagcatttaagaataatgactttcagttgggaaaagaattttcaatggccagggaaacagttggctattcatcatcttcggcacttatgacaacattaacacagaatgccagttcatcagcagccgactcacggagtggtcgaaagagcaaaaacaacaacaagtcttcaagccagcagtcatcatcttcctcctcctcttcttccttatcatcgtgttcttcatcatcaactgttgtacaagaaatctctcaacaaacaactgtagtgccagaatctgattcaaatagtcaggttgattggacttacgacccaaatgaacctcgatactgcatttgtaatcaggtatcttatggtgagatggtgggatgtgataaccaagattgccctatagaatggttccattatggctgcgttggattgacagaggcaccaaaaggcaaatggtactgtccacagtgcactgctgcaatgaagagaagaggcagcagacacaaataaaggtggtccttttgtttgatgaagaaataaacttcagctgaagattttatataggactttaaaaagaagagaagagaaagaagaaacaatgcatttccaggcaaccacttaaaggatttacatagacaatcctataagatcttgaacttgaattttatgggttgtattttaataatgtaagtaaattatttatgcactcctggtgtgctatgaatattattccagttagccttggattatttcagtggccaacatatgcagacatttgtactcctcaaccattttctcaaagtaatgggcattctatgatttagacttcaaggaattccaatgatgaagattttaaggaaagtattttatattcaacaggtatattctgctgcatgtactgtactccagagctgttatgtaacactgtatataaatggttacaaaaaaaaaaaaaaagtcagtgcttctaaaaagaatttaagataatggtttttaaaatgcctttataataagctttgtttctttgtgaaactaattcagcaggctgaaggaaatggttcatgtgataatgtgggctggtatcctctagagtacctgggtacataaacagaaactcctgtaggtaaaaagtaatttgtgccattagtctttctatgtttctgcatccagatagagtgcagttcatgagggagggggcgggggactgaaggggaaagggcgttaaagtgatacatttttataccaaatgtgtttatttttttgtgcaagtaatccttaaaattgcaattgtattaggtgttaaaatcaagtttttaaaaaattacttgtatttatactttacatacn

SEQ ID NO: 23292 - DNA, 646 bp, Homo sapiens
  misc_feature 1, 2, 3, 4, 5, 6, 7, 645, 646: n = A,T,C or G
nnnnnnncggaagtcttctagaattaattaacgcggggggagctaaagtggtcgtgattcatgctgtcgcgggaaccccgaaggtggggccccacgtaacaagaagatgacccgaagttgctccgcagtgggctgcagcacccgtgacaccgtgctcagccgggagcgcggcctctccttccaccaatttccaactgataccatacagcgctcaaaatggatcagggctgttaatcgtgtggaccccagaagcaaaaagatttggattccaggaccaggtgctatactgtgttccaaacattttcaagaaagtgactttgagtcatatggcataagaagaaagctgaaaaaaggagctgtgccttctgtttctctatacaagattcctcaaggtgtacatcttaaaggtaaagcaagacaaaaaatcctaaaacaacctcttccagacaattctcaagaagttgctactgaggaccataactatagtttaaagacacctttgacgataggtgcagagaaactggctgaggtgcaacaaatgttacaagtgtccaaaaaaagacttatctccgtaaagaactacaggatgatcaagaagagaaagggttaacgattaattgatgcacttgtagaagagaaactacnn

SEQ ID NO: 23293 - DNA, 152 bp, Homo sapiens
cgcattcaacttaaatgcttttattgacaatgtcttggaacaataagcaaaccccgcgtacccaactctcagccagagatggtggaggccgtcaagaagcacattttaaacatgctgcacttgaagaagagacccgatgtcacccagccggt

SEQ ID NO: 23294 - DNA, 343 bp, Homo sapiens
  misc_feature 1, 2, 3, 4, 5: n = A,T,C or G
nnnnnaccacctacctccctcaccaaagcccataaaaataaaaaattataacaaaccctgagaaccaaaatgaacgaaaatctgttcgcttcattcattgcccccacaatcctaggcctacccgccgcagtacgctgaggcctgggagtctcttgactccactacttaattccgtttagtgagaaacctttcaattttcttttattagaagggccagcttactgttggtggcaaaattgccaacataagttaatagaaagttggccaatttcaccccattttctgtggtttgggctccacattgcaatgttcaatgccacgtgctgctgacaccgaccggagt

SEQ ID NO: 23295 - DNA, 3470 bp, Homo sapiens; identical to SEQ ID NO: 22163

SEQ ID NO: 23296 - DNA, 739 bp, Homo sapiens
ccgggcaggacgcggggctctttccctcggagcgggcggcggcgttggcggcttgtgcagcaatggccaagatcaaggctcgagatcttcgcgggaagaagaaggaggagctgctgaaacagctggacgacctgaaggtggagctgtcccagctgcgcgtcgccaaagtgacaggcggtgcggcctccaagctctctaagatccgagtcgtccggaaatccattgcccgtgttctcacagttattaaccagactcagaaagaaaacctcaggaaattctacaagggcaagaagtacatagccctggacctgcggcctaagaagacacgtgccatgcgccgccggctcaacaagcacgaggagaacctgaagaccaagaagcagcagcggaaggagcggctgtacgatctacagagaaaacctttatcaaaatgaggacattccttttaaactttgtttctcggcagtttttatcataacgatgtttaatgctgtcaaatgtctccttctgtatctgttgagatgattatacaactttcttcattctgacagtgaattacattggtttcattttcaacttttaaactaactttacatccctgagataaaccccacttggttgtggtgcattgtcctttggaatattgctagagttgatttctaggttttttttttttttaagatttctatattggtgttgatggagatattggacttttgtatccttttcttgtaatgtc

SEQ ID NO: 23297 - DNA, 689 bp, Homo sapiens; identical to SEQ ID NO: 23062
  misc_feature 1, 2, 3, 688, 689: n = A,T,C or G

SEQ ID NO: 23298 - DNA, 616 bp, Homo sapiens; identical to SEQ ID NO: 20971
  misc_feature 1, 605, 606, 607, 608, 609, 610, 611, 612, 613, 614, 615,616: n = A,T,C or G

SEQ ID NO: 23299 - DNA, 337 bp, Homo sapiens
acgcgggcagatgcctccggcccacagttccaccaggcagcgggagaggacctgctggccccaccgcacgacaccagcacggatctcacggaggtcatggagcagattcacagcacgtttccatcttgctgcccaaatgttcccagcaggccacaggcaatgtgaagtattcatccggccaaccaatgtttcctgacgtacgcgggggagagagagagagagagttgtcaggaaagctgcaggttactttgagacagtcgtcccaaatgcattagaggaactgtaaaaatctgccacagaaggaacgatgatccatagtcagaaaagttactgcagc

SEQ ID NO: 23300 - DNA, 452 bp, Homo sapiens; identical to SEQ ID NO: 22027
  misc_feature 1, 441, 442, 443, 444, 445, 446, 447, 448, 449, 450, 451,452: n = A,T,C or G

SEQ ID NO: 23301 - DNA, 420 bp, Homo sapiens; identical to SEQ ID NO: 22040

SEQ ID NO: 23302 - DNA, 3298 bp, Homo sapiens
  misc_feature 3248, 3249, 3250, 3284, 3285, 3286, 3287, 3288, 3289, 3290,3291, 3292, 3293, 3294, 3295, 3296, 3297, 3298: n = A,T,C or G
gcgtccgcgccgcgcgcggggcggatgtccgggccggctgggccgggggcgcggaggagatggcggaaggtggaggctgccgtgagcgaccggatgcggagactcagaagtccgagcttggacccttaatgaggaccacactccaacgcggggcgcagtggtatcttattgacagccggtggttcaagcagtggaagaagtatgtgggctttgacagctgggacatgtacaatgtgggtgaacataacctatttcctggcccaatagacaactctgggctattttcagatcctgagagtcagaccttgaaagaacacttaattgatgaattggactatgtattggtccctaccgaggcgtggaataaactactaaactggtacggctgtgtagaaggccagcaacccatcgtcagaaaagttgtggagcatggcctgtttgtcaagcactgcaaagtcgaggtgtatttgctggaactgaagctctgtgagaacagtgaccccaccaatgtgctgagttgccatttcagcaaggcagacaccattgcaaccatcgagaaagagatgcggaagctattcaacatccctgcggagcgtgaaacacggctctggaacaaatacatgagcaacacctacgagcagttgagcaagctagacaacactgtccaggatgctgggctataccagggtcaggtgctagtaattgagcctcaaaatgaagatggcacatggcccaggcagaccttgcagtcaaaatcaagcactgcgcctagcagaaattttactacctctccaaaatcatcagcaagtccctattcctcagtgtctgcctctctcattgcaaatggtgatagcactagcacctgtgggatgcacagttccggtgtcagcaggggtggatctggcttttctgcttcgtataattgtcaggagccaccatcctctcatatacaacctgggctctgtggacttggaaacctgggaaacacctgcttcatgaactccgctttgcagtgtttgagcaacactgcaccactgactgactactttctcaaagatgagtatgaagccgaaatcaacagagacaaccctctggggatgaaaggggaaattgcagaagcctatgctgaactcattaagcagatgtggtctggaagggacgcccatgtggcacctcgcatgttcaaaactcaagtaggacgttttgctcctcaattttctggctaccagcaacaagattctcaggagctgctggcctttcttctagatggattgcatgaagatctgaaccgggtaaagaaaaagccctacttggagctgaaggatgccaatgggcggccagatgcggtggtggcaaaggaagcctgggagaatcacaggttgaggaatgattctgtgattgtggatactttccatggcctcttcaaatctactttggtttgcccagaatgtgctaaggtttctgtgacctttgacccattttgctatctaacgctgccactgcccttgaagaaagatcgagttatggaggttttcctggttcctgctgaccctcactgcagacctactcagtaccgtgtgactgtgccgctgatgggggctgtgtccgacctgtgcgaggctctctccaggctgtctggcattgctgcagaaaatatggtggtcgcagatgtgtataatcaccgattccacaaaattttccaaatggatgaaggtttaaaccacatcatgcctcgggatgacattttcgtgtacgaggtctgcagcacttccgtggatggctcggaatgtgtcacgcttccagtctacttcagggagaggaagtccaggccatcaagcacttcctccgcatcagcgctatatgggcagccactattgctttctgtccccaagcacaagttaacccttgagtctttgtaccaggctgtttgtgatcgtatcagccgctatgtgaaacagcctttacctgatgagtttggcagctcacccttggagccaggggcctgcaatggctccaggaacagctgtgaaggagaagatgaggaagaaatggagcatcaggaagaaggcaaagagcagctttcagaaacagaaggcagtggggaagatgagccaggaaatgaccccagtgagaccacccaaaagaagatcaaaggccagccctgcccaaaaaggctttttaccttcagtcttgtgaactcctatggaacagctgacataaattcacttgcagctgatggaaaactacttaaactcaactctcgatctacactggccatggattgggacagtgaaactcggagactttactatgatgagcaagaatctgaggcctacgagaagcatgtgagcatgttgcagcctcagaagaagaagaagaccacagtggccctgagagactgcatcgagctcttcaccaccatggagacccttggggagcatgacccctggtactgtcccaactgtaagaagcatcaacaggccacaaaaaagtttgacctatggtccttgcccaagatcctggtggtccacctcaaacgtttctcctacaacagatactggagggataagctcgacacagtcgtagaattcccaatcagagggctgaacatgtccgagtttgtctgtaacctgtcagcaaggccttatgtgtacgacctcattgccgtgtccaatcattatggagccatgggggttggccactacactgcatatgcgaagaacaaactgaatggtaaatggtattactttgatgatagcaacgtgtccctggcctctgaggatcagatagtgactaaagcagcttatgtgctattttaccaacgtcgagatgatgaattttataagacaccttcacttagcagttctggttcctctgatggagggacacgaccaagcagctctcagcagggctttggggatgatgaggcttgcagcatggacaccaactaatgctgactccacgatcctgccaccctgtagcgccagtgtaatcccccaggagaacatctttgacactctgcagactgctagtgttctgtctaaaaaccagacaaggaaatacccttcttttatgagcagaaggaaacaaaaaaaaaaaagaagaccgtttacctagaagaagctatgtcaagaggctgaattatttttatttttaaacaggtggtgagaaatttctgtgaaacctgtgaagctgaaaagggggtgggatgggtgtatcttgtaatttccagctttctccccgcttannnaaaaaaaaaaaaagggggaggggggggggcgccnnnnnnnnnnnnnnn

SEQ ID NO: 23303 - DNA, 4034 bp, Homo sapiens
  misc_feature 1, 2, 3, 4, 5, 6, 7, 8, 9, 10, 11, 12, 13, 14, 15, 16, 17,18, 19, 20: n = A,T,C or G
nnnnnnnnnnnnnnnnnnnnccgcgcaggcgtaccgggtgccccggctctggagcataaacaagagcggggacgggatgaggcggcggttgatcccagggtggcgagtggcggcgaccgaggcggcgagcggggcccggcgccgaccctgagtgcagcctgacccgccctcgcgcgcgcgccctccccggccgggcccactcgccgcgcgcccagccatgaacctggcgagccagagcggggaggccggcgccggccagctgctcttcgccaacttcaaccaggacaacacagaagtgaaaggggcatcaagagcagctggtcttggccgtcgcgctgttgtctggtccctagctgttggtagtaagtccggttataaatttttctccctttcttctgtggataagctggaacagatctatgaatgcaccgatacggaagatgtgtgcattgtagagagattgttctccagcagcctagtggccatcgtgagccttaaagcaccaaggaagctaaaggtttgccactttaagaagggaactgagatctgcaactacagctactccaacacgattctggctgtgaagctcaacaggcagaggctgatagtatgcctggaggagtccctgtacatccacaacattcgggacatgaaggtgctgcatacgatcagggagacgcctccaaaccctgcaggcctgtgtgcgctgtcaatcaacaacgacaactgctacttggcgtacccagggagcgcgaccatcggagaggtgcaggtcttcgataccattaatttgagagctgcaaacatgattccggctcacgacagtcctttagcggcactggcctttgacgcaagtggaactaaacttgccacggcttcggagaaggggaccgtgattagggtattttccattccagaaggacaaaaactctttgagtttcggagaggagtaaagaggtgcgtgagcatctgctccctggccttcagcatggacggcatgttcctctccgcctccagcaacactgagaccgtgcacatcttcaaactcgagactgtgaaagaaaaacccccagaggagcccaccacctggaccgggtacttcgggaaagtgctcatggcctccaccagctacctgccttcccaagtgacagaaatgttcaaccagggcagagccttcgccacggtccgcctgccattctgcggccacaaaaacatctgctcgctagccacaattcagaagatcccgcggttgttggtgggtgccgccgacgggtacctgtacatgtacaacctggacccccaggagggcggcgagtgtgccctgatgaagcagcaccggctggacggcagtctggaaacgaccaatgagatcttggactctgcctctcacgactgccccttagtcactcagacatacggcgcagctgcaggaaaaggtacttacgtgccttcatccccaacgagacttgcctacacagacgacctgggtgctgtgggtggcgcctgcctggaggacgaggccagcgccctgcgcctggatgaggacagcgagcacccgcccatgattcttcggactgactgaacttgacctgtgacctctgacccggggagcagagaacactggcttcacagaggactttgtgcattgctgctatgaactttgacctgagtcgggggagaggatggcagagactttattaaaaaaaaaaaaagattgtagtggtagtctaactccataacgctgaggaaatacatcattttcacttcagtggcttttaaatcctgcttatgaattttagctttttgtttgtttgttttctctttttgccaaaattaactgtttggtgaagcccgcaaaacctcctcgctttgcatgcatgaacgtgccaagccagcataggggagctagaagccactttccagccacctgccgttgggttttttcatatctgtacataatgccgagtgcgtaaggaaaccgtggcgtcgcgcacagtgggtctgcttgtcaaggccagttctgcagtgacaggcccaggggctgcccaccaggtgtgctgggcagacttcagctgggacagaagtccgatctccctagggccccacctggaccattttccctccgttttattttgttaattaaattctttccaaattggatcgctctgggatttcttccatggtggacttttgtttctgatcttgttttccctgtggatattggaggacagcgaggttctttctgatactaaaaacctttctttcaggcagcaaatgaacttgaaaggttgcctggactcgctggagcaaaggaaagcgattttgtttgtataattaaatgatctgttcttctacttcactcttcctgttgaaaaactgtgtgatttttttttttttttaagtaaagtttgtagctcctcccatgcccaggaaagcacagaactcaagtgtggtggccgtctgagctgtcctttcgctggccccgctgtccgcaggggcttcctacctgtgtgagaggtcgtagcgggagacagcaacagagagtaggcggctgggccacgtccttcacagggcgtcatgtgcctttctattttcatcttagaaaatttcctcagcaaaccgatgagagattgtggttgcaagcttcagtatttgcctcgcttcccttttcatatttacagaattaaaacaacctcaagtacctcagactctgcattccaaaccaaggcacccagcagccaaagtgtcgagggcatttaagtggcattaatggcaggagagatggttttagaatctatggagtggtggaagttacggatagaagggaaaaggcaaaaactatttaccctgcctttgcaggctggggtttttgaaccgaggaaggctgggacgcctgtttccagatggttgtcatggtcacgctgggcgaagagctggaggggagttgtcccctcagctgagcggctgcggtgaaatgccccagtgttcctgggttggctttacggcaaactaaatgcaggggacgctggagtccgactcacctacaccggcttcctcccagccgctggtgtgcggcacacacaacatctgcattaggcagaggtgcaagtgggctgattgaacttttccttcaaaacctgcttgtctgtcctggacctttgatgaaatgggatcccggtcacgcaggctgagacagtggggaccgccgaggccagagtgggctatgcttgagcagggatgagaagggccgcggcagcacgcagccttgacccacgcctgcgtcttgtggtgcaaggccagagggctctctctagaacctgaccgtgcactccatctcctgggagccacttttggcaagagtgagtgtggggggaaaaagtgtgcacaagagatacggaaccctgagctagggtttcctgtcaccaaagagtgagctgcatttccagttctgcgttaaagtatcgtttgttctggtgcctgcctgtggtggtgatttggagactcaaatttcctttgccaggtctcttttgtctttctttgggattggtagtatagaagatgctgggaattgtcttcctcgctcagcctcggcttcccgcactgtaagatgaggcagttgcagaggaggcctcggacgtcctgtgaccctcggcccacactcccccttgggtggccctggcagggctggctaggtgcgttccctgcagaccacgggaagccctgtgcttgcctgggtcagggctaagctgtgcgccctaaggagggaggaggactgcagattcttggtcgagaagaatgaagaggatctctgtgtttgctgagcagccattgtggagggttacccgctccactttcccgttgcccattcactggcacagtcctcttctctggtcgaacctatgagtccagcctcactggcggctcagaatgctcaggagtgacggggacagagggaggccgctgagttgcccgttagaactcttactgctgcgccagtgacccaggtggagagggaccctgaaccaaacagaacg

SEQ ID NO: 23304 - DNA, 1185 bp, Homo sapiens; identical to SEQ ID NO: 21532
  misc_feature 1, 2, 3, 4, 5, 6, 7, 8, 9, 10, 11, 12, 13, 14, 15, 16, 17,18, 19, 20, 21, 22: n = A,T,C or G

SEQ ID NO: 23305 - DNA, 2984 bp, Homo sapiens
  misc_feature 1, 2, 71, 2983, 2984: n = A,T,C or G
nncacctctcaccatctgctctgtggctcccagtgctgactctggaagctttatcttgggtaaaagatgtntgatcagacctttctcgttaatgtatttggctcatgtgacaaatgtttcaaacaacgagctctgagaccagttttcaagaagtctcaacaactcagctactgttcaacatgcgcgaagatggcaaccgaggggctgcacgagaacgagacgctggcgtcgctgaagagcgaggccgagagcctcaagggcaagctggaggaggagcgagccaagctgcacgatgtggagctgcaccaggtggcggagcgggtggaggccctggggcagtttgtcatgaagaccagaaggaccctcaaaggccacgggaacaaagtcctgtgcatggactggtgcaaagataagaggaggatcgtgagctcgtcacaggatgggaaggtgatcgtgtgggattccttcaccacaaacaagatcctgacagcgagcggcgatggcacatgtgccctgtgggacgtggagagcgggcagctgctgcagagcttccacggacatggggctgacgtcctctgcttggacctggccccctcagaaactggaaacaccttcgtgtctgggggatgtgacaagaaagccatggtgtgggacatgcgctccggccagtgcgtgcaggcctttgaaacacatgaatctgacatcaacagtgtccggtactaccccagtggagatgcctttgcttcagggtcagatgacgctacgtgtcgcctctatgacctgcgggcagatagggaggttgccatctattccaaagaaagcatcatatttggagcatccagcgtggacttctccctcagtggtcgcctgctgtttgctggatacaatgattacactatcaacgtctgggatgttctcaaagggtcccgggtctccatcctgtttggacatgaaaaccgcgttagcactctacgagtttcccccgatgggactgctttctgctctggatcatgggatcataccctcagagtctgggcctaatcatcttctgacagtgcactcatgtatacctgagaatttgaaatcttcacatgtaaatagatattacttctagaggagcttagagtttattgcagtgtagcttaggggagcaacccatggctcacaggtcactaagcgtctccaatatgactattaaaactgtcacctctggaaatacactagtgtgagccttcagcactgcgagaataccttcaagtacagtatttttcttttggaacactttttaaaatgtatctgtttttaaggttattctaaattatagtagcctcaactcattctgtcaccagtagaattcagcagttaatatattccatattatttctttgaatcaattcattttcagagcactttaaagtctgatatttctcgatgtgcactgtgatgcctggaaccttcctctggaagtgctgattttatggactgaggactggtgactggtctgtgatagaagcaaattccaattccaaatgtaattagacaaaaatcatttttttagaatgtgtttttattgtaaaagtatctttttcagcttcctgttctattgtcttttttcagatacaacatttttgtctatggtgaactgctgtaaatgacgcagagaaatgcctaaaaaggacaggtggtttgactcatggatgatgatgatgtcactgtgccacttggacagggcgttttctctgaattgaagggaaagccaatggtgtttgtaaacaaatgcttctgagagcaaagaaaagtcttctgtgtgggaacacaagatagtaaacttatttaaaaacctattagtagaattagtggaaacacttaggttaaagtgaatcttgtccatataaattatattcatggccgggcgcggtggctcacgcttgtaatcccagcactttgggaggccgaggcgggcggatcacgaggtcaggagttcgagaccacggtgaaaccctgtctctactaaaaaatacaaaaaattagccgggcgtggtggcgggcgcctgtagtcccagctactcggagaggctgaggcaggagaatggcgtgaacccgggaggtggagcttgcagtgagccgaggtcgagccactgcagcctgggtgacaaagcgagactccgtctcaaaaaaaaaaaaaaaaattatattcatatgtattgcattgcaattataattacatatgcagattgattgatagtcatgaataataacgtctgctcctcttacatagaaagaaaaacgatattaaaagaagatcttctctttatttgagactcagaattccttctagaagaaggaagtgctttttgttataggatcccttcttttcctttttttgtttttttgtaagatgtagatgcttattctttgctttagaaaacttctcacttaaaaagatggcatgcacctaggggaataaaaggtcacctcagacaccaggtgtcattcctggtgaggcctgcctcgtcggtggcctggggtctgccggcaggttctggctgcacctgaaggctgcgtgcaccttgtcccctggacaggtctcctttcctggccctgctccagcccagcccttcttctagtggtagctctggctttgcaggcccagctccaggccctgctcctcagagagactcttccagagctggagctgggcacagccataagacaggactggaccagatgctcctgtaaacatccaggggtgtgccaggcccaccctcacaactgcttgttcaggtatcgtgatgggccactcggtccaaaatcagccaggccatcttttccatcatctcacttcaaataaacataataattatatttgatcatttgcagaaaacttcactggccgtcgttttacaactttgtgacttgtccttggcgttacccaacttattcgccttgcagacatcccccttttgccgctggcgtaatagcnn

SEQ ID NO: 23306 - DNA, 789 bp, Homo sapiens
tatagggagtcgacccacgcgtccgcagggccgaggcgtagtgtgggtgactcctccgttccttgggtcccgtcgtctgtgatactgcagtgcagccatggcagaaccgcagcccccgtccggcggcctcacggacgaggccgccctcagttgctgctccgacgcggaccccagtaccaaggattttctattgcagcagaccatgctacgagtgaaggatcctaagaagtcactggatttttatactagagttcttggaatgacgctaatccaaaaatgtgattttcccattatgaagttttcactctacttcttggcttatgaggataaaaatgacatccctaaagaaaaagatgaaaaaatagcctgggcgctctccagaaaagctacacttgagctgacacacaattggggcactgaagatgatgagacccagagttaccacaatggcaattcagaccctcgaggtttcggtcatattggaattgctgttccttttcacctaactgttcagtcattctggttttcaagcagtgctttatctcatgtccttgaatatagttgtgtaactttattttttaggtaataattagaacagttcccttcagaggctgcatttgccttcttctgccacctaaatattacttcccttcaaatctgcctttgaattatcatttttaaaaaaaaattaacatgtttttgttgtagttatcttctggggtttcaattcctcagaaacaacttttttcacaacggaaaggaaagaacactagtgtctttcagtaaagt

SEQ ID NO: 23307 - DNA, 3483 bp, Homo sapiens; identical to SEQ ID NO: 21739

SEQ ID NO: 23308 - DNA, 894 bp, Homo sapiens
acgcggggcccaaactcaccacctggccgtggacacctgtgtcagcatgtgggacctggttctctccatcgccttgtctgtggggtgcactggaatagccaggtctggctgggtcggcacaacctgtttgagcctgaagacacaggccagagggtccctgtcagccacagcttcccacacccgctctacaatatgagccttctgaagcatcaaagccttagaccagatgaagactccagccatgacctcatgctgcttcgcctgtcagagcctgccaagatcacagatgttgtgaaggtcctgggcctgcccacccaggagccagcactggggaccacctgctacgcctcaggctggggcagcatcgaaccaagagggagtgagtctcacgtggttgtgacgcctccatctccttgtccaaatgacatgtgttgctagacgcttactcctgagcaaggtgaccagcagtcattgtttgttgtgctgcgctctgcaccggtggtaccacgacacttgtggggggtgatcctggggggtccccttgtctgtactggtgtgctccaggtatcacatccttggggccttgagcatgtgcctgctggaatagcttgttgtgtccccaaggtggtggcattactggacgtggatcaggaccacatcgaggcaagccctgtagtgcctgtccaccctacctctattaatttacgcccctcacttccggataactggcttctggttggtggcacctgatgtggacacggcgaagtagcctgggcatatggtggtcgggggcagggagaaaggggacaccggtgcatgccaagaatcgcactggcaggtgtaaccctgtggcccacggcctgtggacaggccccgagagaccaaagcaagaga

SEQ ID NO: 23309 - DNA, 3113 bp, Homo sapiens
  misc_feature 1, 3111, 3112, 3113: n = A,T,C or G
ngagtcgacccacgcgtccggggagccggactcgggaaggtggctgcgttcgggttgctaacgtcttcccttggagatgggcgcgcaaaccaaccagtgggtctgggggcgggggtgatgggcgtggagctggcccaatgagggtaggggtgggtggggcagccccgagcagcagtgctaaaggagcccggcggaggcagcggtgggtttgggcctgaggcgctggatctgtggtcgcggctggggacgtgcgcccgcgccaccatcttcggctgaagaggcaattgcttttggatcgttccatttacaatggcgcagagaactggactcgaggatccagagaggtatctctttgtggacagggctgtcatctacaaccctgccactcaagctgattggacagctaaaaagctagtgtggattccatcagaacgccatggttttgaggcagctagtatcaaagaagaacggggagatgaagttatggtggagttggcagagaatggaaagaaagcaatggtcaacaaagatgatattcagaagatgaacccacctaagttttccaaggtggaggatatggcagaattgacatgcttgaatgaagcttccgttttacataatctgaaggatcgctactattcaggactaatctatacttattctggactcttctgtgtagttataaacccttacaagaatcttccaatttactctgagaatattattgaaatgtacagagggaagaagcgtcatgagatgcctccacacatctatgctatatctgaatctgcttacagatgcatgcttcaagatcgtgaggaccagtcaattctttgcacgggtgagtcaggtgctgggaagacagaaaatacaaagaaagttattcagtaccttgcccatgttgcttcttcacataaaggaagaaaggaccataatattcctggggaacttgaacggcagcttttgcaagcaaatccaattctggaatcatttggaaatgcgaagactgtgaaaaatgataactcatctcgttttggcaaatttattcggatcaactttgatgtaactggctatatcgttggggccaacattgaaacataccttctggaaaagtctcgtgctgttcgtcaagcaaaagatgaacgtacttttcatatcttttaccagttgttatctggagcaggagaacacctaaagtctgatttgcttcttgaaggatttaataactacaggtttctctccaatggctatattcctattccgggacagcaagacaaagataatttccaggagaccatggaagcaatgcacataatgggcttctcccatgaagagattctgtcaatgcttaaagtagtatcttcagtgctacagtttggaaatatttctttcaaaaaggagagaaatactgatcaagcttccatgccagaaaatacagttgcgcagaagctctgccatcttcttgggatgaatgtgatggagtttactcgggccatcctgactccccggatcaaggtcggccgagactatgtgcaaaaagcccagaccaaagaacaggcagattttgcagtagaagcattggcaaaagctacctatgagcggctctttcgctggctcgttcatcgcatcaataaagctctggataggaccaaacgtcagggagcatctttcattggaatcctggatattgctggatttgaaatttttgagctgaactcctttgaacaactttgcatcaactacaccaatgagaagctgcagcagctgttcaaccacaccatgtttatcctagaacaagaggaataccagcgcgaaggcatcgagtggaacttcatcgatttcgggctggatctgcagccatgcatcgacctaatagagagacctgcgaaccctcctggtgtactggcccttttggatgaagaatgctggttccctaaagccacagataaaacctttgttgaaaaactggttcaagagcaaggttcccactccaagtttcagaaacctcgacaattaaaagacaaagctgatttttgcattatacattatgcagggaaggtggactataaggcagatgagtggctgatgaagaatatggaccccctgaatgacaacgtggccaccctttataccgctacgtacgagacccccgtggcagatctttggaaagatgtggaccgtatcgtgggtctggatcaagtcactggtatgactgagacagcttttggctccgcatataaaaccaagaagggcatgtttcgtaccgttgggcaactctacaaagaatctctcaccaagctgatggcaactctccgaaacaccaaccctaactttgttcgttgtatcattccaaatcacgagaagagggctggaaaattggatccacacctagtcctagatcagcttcgctgtaatggtgtcctggaagggatccgaatctgtcgccagggcttccctaaccgaatagttttccaggaattcagacagagatatgagatcctaactccaaatgctattcctaaaggttttatggatggtaaacaggcctgtgaacgaatgatccgggctttagaattggacccaaacttgtacagaattggacagagcaagatatttttcagagctggagttctggcacacttagaggaagaaagagatttaaaaatcaccgatatcattatcttcttccaggccgtttgcagaggttacctggccagaaaggcctttgccaagaagcagcagcaactaagtgccttaaaggtcttgcagcggaactgtgccgcgtacctgaaattacggcactggcagtggtggcgagtcttcacaaaggtgaagccgcttctacaagtgactcgccaggaggaagaacttcaggccaaagatgaagagctgttgaaggtgacggaaagcagacaccggtggcaaggagacctggacgacattgagcggaagcacccagcaggcttcacgacgcacacagacatatccttgcacgaagccactaccagacaaaaacggaacccctggatgaacccaaagacgatcacaggcacgcctcgcccgctaacacaccacacctaacaacaatcccacatgaccgcaccctcgagnnn

SEQ ID NO: 23310 - DNA, 729 bp, Homo sapiens
  misc_feature 729: n = A,T,C or G
atcgagaccatcctggctaacatggtgaaaccctgtctctactaaaaatacaaaaaattggccaggcgtggtggcgggtgcctgtactcccagctactcgggaggctgaggcaagagaatggcatgaacccaggaggcggagcttgcagtgagctgagatcgcgccactgcactcctgcctgggtgacagagtgagactccatctcaaaaaaaaaaaacaaaaacaacaacaacaacaacaaaaaacaaccagagaaatagcacttgttaactacaattgtgactctaggtaaacttgggccttaatatggttagacaagaagggttttaggtaacttgcctttttagatcctatttaggcttattagtctatattctacattcttgcacgatggaaattactagagaagtgggataattctttgttgtggggaaaataaaatttgttgtgaaaatatactgtattttaaaatatttagaaagattataaataactggagaaaagataatttcatatactaatatgatggaattagcctagcagatgttaaaaatcctttctgaaaattataatctaaaattatttgggaaattacaatggaactgaataatctgtacgttggtatattaaagccatttttatattgtgaaaataactactttacatgtatccactaagatccaggaaaatgggcattggttctgaattgagaaaatattaaaagagan

SEQ ID NO: 23311 - DNA, 739 bp, Homo sapiens; identical to SEQ ID NO: 23296

SEQ ID NO: 23312 - DNA, 331 bp, Homo sapiens
  misc_feature 331: n = A,T,C or G
acggggattgcagcgggcctcggggctaagagcgcgacgcggcctagagcggcagacggcgcagtgggccgagaaggaggcgcagcagccgccctggcccgtcatggagatggaaaaggagttcgagcagatcgacaagtccgggagctgggcggccatttaccaggatatccgacatgaagccagtgacttcccatgtagagtggccaagcttcctaagaacaaaaaccgaaataggtacgcgggagcaaagagcagatcaactcccagaccccaggcaacctcctccacctcttcttcaccgatgtccggccgccaccgcggtggagcn

SEQ ID NO: 23313 - DNA, 570 bp, Homo sapiens
  misc_feature 1, 2, 3, 531, 534, 570: n = A,T,C or G
nnncaaacatcctgtgaaaagcagagctggattaggcagaggtagaagtcaccctgcaatgccagctgaaggatagccttggctaagcccataaggaggtctggaatagtttctcagaattgtcctacgttagactgagatgtccaggtctctgtaccctcacatcaatcagtcactgaatgtgtggcattctagaaagggacatgaccttgagcaagggggctgtctacagctgaggcaatccttgaaggggctgacagatgaagattgtctgcagagagccttccctgcagctggagcaaaaagtccttcattgaccgtgaatctggacagctcatctggtgcccagcacaaatatattttactttagagtaaaattctgtgggggaagatggacaatatacaagttcaagaaaaaaaaagagatgacaaaattttgactgtaaagaacagcatgttcatgtattttttaaaattgatgatgttgaatagtaaataaatacagtatttaaatcctttggatcaatccanaanaaaaaaaaaaaaaaaaaaaggtacctcggccgctcn

SEQ ID NO: 23314 - DNA, 4231 bp, Homo sapiens
tatagggagtcgacccacgcgtccgttcacactccggcggagctcctgccacagccgtcgccttcgcggcggctctccagccccgcgcctcagcctcggcgccgcatcaccgcgtcccaggcctccttccctccctctgccactccccctccctttcccgctcttcttgcccacccggccggcagagagagcctggatacgaagcaggcgggcttcagagtgggttggaaaaatggaggtgccgcgcctggatcatgccctcaacagccccaccagcccctgtgaggaggtgatcaaaaacctcagcctggaggccattcagctgtgcgaccgggacgggaacaaatcacaagacagtggcatagcagagatggaagaacttcctgtaccacataacatcaaaataagcaatataacgtgtgactcattcaagatttcatgggaaatggattcaaaatcaaaggatcgcattacacactattttattgacctcaacaagaaagagaacaagaactccaataaatttaaacacaaggatgttcccacaaaattggtggcaaaagctgttcccttgcctatgactgtccgtggacactggtttttaagcccaagaactgaatatacagtagcagtgcagactgcctcaaaacaagttgatggtgattatgttgtgtctgaatggagtgaaattatagaattctgcaccgcagactattcaaaagttcatctaacacaattgttggagaaggctgaagtgattgcaggacgcatgcttaagttttctgttttttatcgtaatcagcacaaagaatattttgactatgttcgagaacatcatgggaatgctatgcagccatctgtcaaggataacagtggtagccatggctctcctatcagtggaaaattagaaggcatcttcttcagctgcagcactgaattcaatactggaaagccaccccaggattcaccttatggaagatacaggtttgagattgccgcagaaaaactttttaaccccaatactaacttatactttggggacttctactgtatgtacactgcttatcattatgtgattcttgttattgctcctgtgggatcaccaggagatgaattttgtaagcagcgccttcctcaactaaattctaaggataataaatttttgacctgtacagaagaagatggggtgctggtttaccaccatgcccaggatgtcattttagaagtcatttacactgaccctgtggatctttctctgggcaccgtggcagaaatcactggtcatcagctcatgagtttgtctactgcaaatgcaaagaaagatcccagctgcaaaacctgtaatatcagtgttggacgttaatgcccacttttcttattcttactcagccccttttcctcccttaggagcattggtcctctgttgtccatttttatcaccagatgttttccactgaagcatgcacatgccactgtcaccaaaacaaacaactaccactttccaaatttcattcagaaccattttagtgttttcctattccctacccctcccactactttcaatgatgaaataccctaagttaagttctccttttgacactttattgcctagatgctgcaatgtttttatgtttcctttatgccaaacataacaaaacagttatatagactgctttagcaaagtacacaataatggcttataaatggtgtttaaatatgcattcattttaatctactgaacaaatattgggataactccaaaccgcatgaaagggtgtaattgcagcatgagttaaatcttgaagcctagaattgtcagcacttccaacttcttgtttgacagtgttatttatgttatttatattagctaacaggaaacaactactgtgtttcaacataataaatataatagaaaaatattttatttgtattgttgtataaaatatttacaatcatatagaatatatagagttacattttaatagcaactgtgtacatgtcacgaaaccatttcccttatcaaagatgtaatttgtaaacctcaaatagttgtgtatctgtcctgttagaagtagatgacttcaattaaacaaatttatgaaggacattattctgattcataaaagttataaaatattaggtaaatacagagaaaacaataagcctctgaaataagtctgtttctgaaatagtcaatagtcttcccatccaaactataagagaatgtgaatttcttcaacatcatacttaaacattacagaaaatagaaatacaaacaaggttggtacatagagaaaatgttgaccttttacttccttttacaaaaatgaaaataataaacatgttttcgtataaaataacacaaaatgatatacactgaagttgatgaagcaaataaatattctggcttctttttcaaggtatcagggcaaacaatttccaaacttttcattttgtacagaaggatgaataactacagctcatgggaaatgttttgactttacaaagtatagatgttggaacattaagaaaaatgtatattcccaatgaaaaaatagttatatcatcttatagtaaaccaaaagattagcaataatactatggacacattagattatatactacagacacatatctatccaaaatacctattttaaatttttaatacaatattttattttaatataaacatctgtcagttatagacaaagataataattcacaaagtacatgctatcagaatgaactttggtaaccagaaatgtaaaatttcaaataacggataaaataatgtgttatttttatagagaaagaaaaaaaatagcaacacaatctagtttattttagggtactgagagcctagcagacttaaaggacaaggtagtaaatgttttatcactcaaaaatccattagaagtttcaaataaattgctttcttgctagctgtattccttcctacttgaaaagcgaatttcttttcctcctatgattgattttttaaaatcatgctcttttccatacatcaacataaacagtctttggatactaaataaactttccctaacaagtgtcctagctatgttatttagatttgataaaatattagacatttttaaaaatacttgtattgactatgagttttctgcttggcatggaggacactgaattttttcccaattatatggctacctgttgtattcttccccccgtttaaatcccttctccttgtatataattaaacttgctattccttcttaaaaacagctaatactaccactaaagtgcttccattttcattgtgtcaaaactacttagcaaggatggcagaggaaaataaactttactttatatcatgggtgaaagtgatcataacatttcctgaacctcaaatagttttggccacatcttgcttgctgatgaggacctctaatagtctcagtttggcttttatgtgcttatattcataatactcatctgccattggtatcctatcttccttttgtggacttcttcctgtttgtttaaaaaactgttcttcaaattctcttaaggctttccgcagtctcttcttgtcagccctagtttctcggagatggtcaagaagtacaggcatggtagcctcatgtaaattagacatggagagagctggtggttttacttctttcttttcatctggtaaaagggccctaacaggctcagtctcattagagtaggtgaggtggtcaccaacaggaaggtgagatgctggatctgccaaagaaggttgttggcttccctgtggacggtcttcatcagagtcctcttcctcctgaattgttggaataagggaaggtgttgacaagatttgcttgataattctgtatcggtcataaagcggctttatgaggttcttgtcttgcttagttaccttagaatcctcctggggaggaagttgctctcttctctccttcaggcatgtcaaggcagcatctggagtctcttctccagaggagcttggctccgggcccgcagcttccggtttcccattttctctggggactgtgggttgctcacacaacaggtttctaggtggacctttgggagcactcccttgttcttctgacagctttagctttagttctctgagctgtttacgacctttagccaaatcattcatccatttcaggacttcaggattagaagtcttgtcaccatgtgaaggccggtatttcttttcttgttcactcgtgcc

SEQ ID NO: 23315 - DNA, 2318 bp, Homo sapiens
  misc_feature 1, 2, 3, 4, 5, 2317, 2318: n = A,T,C or G
nnnnnggcctactggcttcgcgccggcccttccgcgggtgatcagctggtctgcgctcccctgacgtgggctggggcacgtcaccgccgaatggcagcctccagaaagccaccgcgagtaagggtgaatcaccaggattttcaactgagaaatttaagaataattgaacctaacgaggtgacacactcaggagacacaggtgtggaaacagacggcagaatgcctccaaaggtgacttcagagctgcttcggcagctgagacaagccatgaggaactctgagtatgtgaccgaaccgatccaggcctacatcatcccatcgggagatgctcatcagagtgagtatattgctccatgtgactgtcggcgggcttttgtctctggattcgatggctctgcgggcacagccatcatcacagaagagcatgcagccatgtggactgacgggcgctactttctccaggctgccaagcaaatggacagcaactggacacttatgaagatgggtctgaaggacacaccaactcaggaagactggctggtgagtgtgcttcctgaaggatccagggttggtgtggaccccttgatcattcctacagattattggaagaaaatggccaaagttctgagaagtgccggccatcacctcattcctgtcaaggagaacctcgttgacaaaatctggacagaccgtcctgagcgcccttgcaagcctctcctcacactgggcctggattacacaggcatctcctggaaggacaaggttgcagaccttcggttgaaaatggctgagaggaacgtcatgtggtttgtggtcactgccttggatgagattgcgtggctatttaatctccgaggatcagatgtggagcacaatccagtatttttctcctacgcaatcataggactagagacgatcatgctcttcattgatggtgaccgcatagacgcccccagtgtgaaggagcacctgcttcttgacttgggtctggaagccgaatacaggatccaggtgcatccctacaagtccatcctgagcgagctcaaggccctgtgtgctgacctctccccaagggagaaggtgtgggtcagtgacaaggccagctatgctgtgagcgagaccatccccaaggaccaccgctgctgtatgccttacacccccatctgcatcgccaaagctgtgaagaattcagctgagtcagaaggcatgaggcgggctcacattaaagatgctgttgctctctgtgaactctttaactggctggagaaagaggttcccaaaggtggtgtgacagagatctcagctgctgacaaagctgaggagtttcgcaggcaacaggcagactttgtggacctgagcttcccaacaatttccagtacgggacccaacggcgccatcattcactacgcgccagtccctgagacgaataggaccttgtccctggatgaggtgtaccttattgactcgggtgctcaatacaaggatggcaccacagatgtgacgcggacaatgcattttgggacccctacagcctacgagaaggaatgcttcacatatgtcctcaagggccacatagctgtgagtgcagccgttttcccgactggaaccaaaggtcaccttcttgactcctttgcccgttcagctttatgggattcaggcctagattacttgcacgggactggacatggtgttgggtcttttttgaatgtccatgagggtccttgcggcatcagttacaaaacattctctgatgagcccttggaggcaggcatgattgtcactgatgagcccgggtactatgaagatggggcttttggaattcgcattgagaatgttgtccttgtggttcctgtgaagaccaagtataattttaataaccggggaagcctgacctttgaacctctaacattggttccaattcagaccaaaatgatagatgtggattctcttacagacaaagagtgcgactggctcaacaattaccacctgacctgcagggatgtgattgggaaggaattgcagaaacagggccgccaggaagctctcgagtggctcatcagagagacgcaacccatctccaaacagcttaataaatcctcccggtttgtttttgtaaaagcctggggaggaagaaacgtggcaatcccgacatctttcccttctttcttcttccaccacccctttttactttagactcactgagacagaatctacctagagattggacacgctaggtgatgggacgaaaatcgagaaggacaagaattatagacctcggagcagtgtaacatacaaactaagcggctttctacgacann

SEQ ID NO: 23316 - DNA, 1105 bp, Homo sapiens
  misc_feature 1, 2, 1053, 1104, 1105: n = A,T,C or G
nnaaacatcagcaaacacacaacatagagaaagcccatgaatgcactgactgtgggaaagctttcctcaagaagtctcagctcactgagcataagagaattcatacaggaaagaaaccccacgtgtgtagcttgtgtgggaaagccttctacaagaagtacaggctcactgaacacgagagagctcacagaggagagaaaccccacgggtgtagcttgtgtgggaaagccttctacaagaggtacaggctcactgaacacgagagagctcacaaaggagagaaaccatacgggtgcagtgaatgtgggaaagccttccccaggaaatctgagcttactgaacatcaaaggattcacacgggaattaagccccatcaatgcagcgaatgtgggagagctttctccagaaaatcactactcgttgtacatcagcgaactcatacaggagagaagcctcatacatgcagtgaatgtggaaaaggcttcattcagaagggcaatctcaacatacatcaacgaactcacactggagagaaaccttatggatgcattgactgtggcaaggccttcagccagaagtcttgccttgtagcacatcagagatatcatacaggaaagactccctttgtatgtcctgaatgtgggcaaccctgttcacagaagtcaggactcattagacatcagaaaattcactcaggagagaaaccctataaatgcagtgactgtgggaaagccttccttacaaagacaatgctcattgtacatcacagaactcacacgggagagagaccctatggctgtgatgagtgtgagaaagcttacttctatatgtcttgccttgttaaacataagagaatacactcaagggagaaacggggggattcagtgaaggtggaaaatccttccacagcaagtcacagcttaagtcctagtgaacatgtgcaggggaaaagccctgttaatatggtaactgtggcaatggtggcagggcagtgtgagtttgcccacatcctgcattcatgataaacagtttgctgtttgatcatatagcctncagcggaatgctgagtttgtcatgtcccatgggccttttgctccctgcacnn

SEQ ID NO: 23317 - DNA, 1722 bp, Homo sapiens
  misc_feature 1, 1706, 1707, 1708, 1709, 1710, 1711, 1712, 1713, 1714,1715, 1716, 1717, 1718, 1719, 1720, 1721, 1722: n = A,T,C or G
ncgtccgaaacgatctcaagagctgcacttaagcatctagaattttctgcgtcacacctcttgagagaagagactggctccaggtctgactcagtccactacaagctagacggtcttcttaaagcaccaacattacttgagtctttggataaaattgagaaaagagtctacaagtattgtggactctacaggaggcaggaggctgacaactggcagtaaagacaaagatgtcaggcctgcggcccggcactcaagtggaccctgagattgagctttttgtaaaggctggaagtgatggagagagtattggaaactgtcccttttgccaacgccttttcatgatcctctggcttaaaggagttaaatttaatgtgacaactgttgacatgaccagaaagcctgaagaactaaaggacttagccccaggtaccaatcctccgttcctggtgtataacaaggagttgaaaacagacttcattaaaattgaggagtttttagaacaaaccctggctcctccaaggtaccctcacctgagtcccaagtacaaggagtcttttgatgtgggctgtaacctctttgccaagttttctgcatacattaagaatacacaaaaggaggcaaataagaattttgaaaaatctctgctcaaagaattcaagcgtctggatgactacttaaacaccccacttctggatgaaattgatccagacagtgctgaggaacccccagtttccagaagactattcttggatggggaccagctaacactggctgattgtagcttgttacccaagctgaacattattaaagttgctgccaagaaatatcgtgactttgacattccagcagaattctcaggagtctggcgttatctccacaatgcctatgcccgtgaagaatttacccacacgtgtcctgaagacaaagaaattgaaaatacttacgcaaatgtggctaaacagaagagttaggagagctcttacaggagaaaaggctatatttgtgatcagattttacttattgacatattagaaaggtttttgcaaataagaatatgaaaaatactgtttcttctatccaactctcttatgaaaaggaactctgtattttctattagccataaataatctgtccactgtattttacaggtcttcatacttttacttaattttctttatctgtatggcaaaccactgcaatcctgaatgacatggaaagcatcacaatcttttgccctttgcttgaattcctggaatgcatacatataagctaaacagatgtctgcagttataaatgtcataagtagaggtacaatctcaccctgctccttagaaacatttccatataaatcgctaaaataatttcacatttttgttagtttaatatatacatgagtttatttctgatataaataataaatacagagagtgagcatatcagagaggcaaattcttaaagaatgatttttaaaatcagctctaggaagagctcaagatcaattggtcatagaacagcatttgacgcctagaactatgaccacctcatggtcagagatgagaatgtagcctttgtgaccagattatattatttttaaatgaagaagcactcattaaataaaacataattttaaaaaacaatataagaaacaaagtcaactgaatcttttattcatagaaatgaaaaggaaaataaaaactgtggtgaannnnnnnnnnnnnnnnn

SEQ ID NO: 23318 - DNA, 1506 bp, Homo sapiens
  misc_feature 1467, 1476, 1497: n = A,T,C or G
tatagggagtcgacccacgcgtccggcggcgcgcggtgcgcggtgcgtagtctggagctatggtggtggtggcagccgcgccgaacccggccgacgggacccctaaagttctgcttctgtcggggcagcccgcctccgccgccggagccccggccggccaggccctgccgctcatggtgccagcccagagaggggccagcccggaggcagcgagcggggggctgccccaggcgcgcaagcgacagcgcctcacgcacctgagccccgaggagaaggcgctgaggaggaaactgaaaaacagagtagcagctcagactgccagagatcgaaagaaggctcgaatgagtgagctggaacagcaagtggtagatttagaagaagagaaccaaaaacttttgctagaaaatcagcttttacgagagaaaactcatggccttgtagttgagaaccaggagttaagacagcgcttggggatggatgccctggttgctgaagaggaggcggaagccaaggggaatgaagtgaggccagtggccgggtctgctgagtccgcagcactcagactacgtgcacctctgcagcaggtgcaggcccagttgtcacccctccagaacatctccccatggattctggcggtattgactcttcagattcagagtctgatatcctgttgggcattctggacaacttggacccagtcatgttcttcaaatgcccttccccagagcctgccagcctggaggagctcccagaggtctacccagaaggacccagttccttaccagcctccctttctctgtcagtggggacgtcatcagccaagctggaagccattaatgaactaattcgttttgaccacatatataccaagcccctagtcttagagataccctctgagacagagagccaagctaatgtggtagtgaaaatcgaggaaccacctctcagcccctcaagagaatgatcaccctggagtagaattcccttcaccatcccagggactcctccaaaatggactatgccctgttggccacttcaaacccagcagcccttccccatccccactcagccctgcacagggggtgccaggaagtcaacaccaggggaagagtgggcatgagcaggctgagccagggaccctcctactaccctggaaacctgggtgagcctggagtcgtggaggggccccagactcctcagaacatggcacttttccgtctctgctgagcgagccagctgctgggattcatgtccatctgcagcatcttcatcacccacttgtcccgacgggcaccttcaacaaactcgttcagagacagctggccatctccattctcatccaccaggaggaagatcctgtccacgacctcctcgggtgtgagcagctggccttgctcagtttgtagctctcgccggcaggctttcttcagttggtaaattccctccacaatgttgagtagctccagncgtcgatgncaatcggatctcaaatgtcgncaagtggaa

SEQ ID NO: 23319 - DNA, 3053 bp, Homo sapiens
agattaggtccaagcgcccgcccagaggcaggcagtccgcgagcccagccgccgctgtcgccgccagtagcagccttcgccagcagcgccgcggcggaaccgggcgcaggggagcgagcccggccccgccagcccagcccagcccagcccagccctactccctccccacgccagggcagcagccgttgctcagagagaaggtggaggaagaaatccagaccctagcacgcgcgcaccatcatggaccattatgattctcagcaaaccaacgattacatgcagccagaagaggactgggaccgggacctgctcctggacccggcctgggagaagcagcagagaaagccatcatgacttacgtgtctagcttctaccacgccttctctggagcccagaaggcggagacagcagccaatcgcatctgcaaggtgttggccgtcaaccaggagaacgagcagcttatggaagactacgagaagctggccagtgatctgttggagtggatccgccgcacaatcccgtggctggagaaccgggtgcccgagaacaccatgcatgccatgcaacagaagctggaggacttccgggactaccggcgcctgcacaagccgcccaaggtgcaggagaagtgccagctggagatcaacttcaacacgctgcagaccaagctgcggctcagcaaccggcctgccttcatgccctctgagggcaggatggtctcggacatcaacaatgcctggggctgcctggagcaggtggagaagggctatgaggagtggttgctgaatgagatccggaggctggagcgactggaccacctggcagagaagttccggcagaaggcctccatccacgaggcctggactgacggcaaagaggccatgctgcgacagaaggactatgagaccgccaccctctcggagatcaaggccctgctcaagaagcatgaggccttcgagagtgacctggctgcccaccaggaccgtgtggagcagattgccgccatcgcacaggagctcaatgagctggactattatgactcacccagtgtcaacgcccgttgccaaaagatctgtgaccagtgggacaatctgggggccctaactcagaagcgaagggaagctctggagcggaccgagaaactgctggagaccattgaccagctgtacttggagtatgccaagcgggctgcacccttcaacaactggatggagggggccatggaggacctgcaggacaccttcattgtgcacaccattgaggagatccagggactgaccacagcccatgagcagttcaaggccaccctccctgatgccgacaaggagcgcctggccatcctgggcatccacaatgaggtgtccaagattgtccagacctaccacgtcaatatggcgggcaccaacccctacacaaccatcacgcctcaggagatcaatggcaaatgggaccacgtgcggcagctggtgcctcggagggaccaagctctgacggaggagcatgcccgacagcagcacaatgagaggctacgcaagcagtttggagcccaggccaatgtcatcgggccctggatccagaccaagatggaggagatcgggaggatctccattgagatgcatgggaccctggaggaccagctcagccacctgcggcagtatgagaaaagcatcgtcaactacaagccaaagattgatcagctggagggcgaccaccagctcatccaggaggcgctcatcttcgacaacaagcacaccaactacaccatggagctcacccgggtggaggctgggagcagctgctcaccaccatcgccaggaccatcaatgaggtagagaaccagatcctgacccgggatgccaagggcatcaggccaggagcagatgaatgagttccgggcctccttcaaccactttgaccggaagaagacaggcatgatggacacggatgatttccgcgcctgcctgatctccatgggttacaacatgggagaagcagaatttgcccgcatcatgagcattgtggaccccaaccgcctgggggtagtgacattccaggccttcattgacttcttgtcccgcgagacagccgacacagatacagcagaccaagtcatggcttccttcaagatcctggctggggacaagaactacattaccatggacgagctgcgccgcgagctgccacccgaccaggctgagtactgcatcgcgcggatggccccctacaccggccccgactccgtgccaggtgctctggactacatgtccttctccacggcgctgtacggcgagagtgacctctaatccaccccgcccggccgccctcgtcttgtgcgccgtgccctgccttgcacctccgccgtcgcccatctcctgcctgggttcggtttcagctcctagcctccacccgggtgagctggggcccacgtggcatcgatcctccctgcccgcgaagtgacagtttacaaaattattttctgcaaaaaagaaaaaaatcttaagttaaaaaccaaaaaactacatattttattatagaaaaagtattttttctccaccagacaaatggaaaaaaagaggaaagattaactatttgcaccgaaatgtcttgttttgttgcgacataggaaaataaccaagcacaaagttatattccatcctttttactgatttttttttcttctatctgttccatctgctgtattcatttctccaatctcatgtccattttggtgtgggagtcggggtagggggtactcttgtcaaaaggcacattggtgcatgtgtgtttgctagctcacttgtccatgaaaatattttatgatattaaagaaaatcttttgaaatggctgttttttaaggaagagaatttatgtggcttctcatttttaaatcccctcagaggtgtgactagtctctttatcagcacacacttaaaaaatttttaatattgtctattaaaaataggacaaacttggagagtatggacaactttgatattgcttggcacagatggtattaaaaaaaccacactcctatgacaaaaaaaaaaaaaaa

SEQ ID NO: 23320 - DNA, 2473 bp, Homo sapiens
  misc_feature 1, 2, 3, 2472, 2473: n = A,T,C or G
nnngacccacgcgtccgggggccgtcccgtggggcggcgtgggctgctgccttggaaacgcggagcgcgcgctcccagcgaaagcagcagggcagggatctgcgttggaggaagggactgctctggtgctagaatgctgtgcgtcggaaggctgggcggcttgggagccagagcagcagctctgccgccccgccgggcgggccggggaagcctcgaagccgggatccgggcccgaagggtcagcaccagctggtctcccgtgggcgccgccttcaatgtcaagccccagggcagccgcttggacctgttcggcgagcgccggggtctttttggagttcctgagctgagtgccccagaaggatttcatattgcacaagaaaaagccttgagaaagacagaattgcttgtggaccgtgcatgttccaccccacctgggccccagaccgtgctgatcttcgatgagctctcggattccttatgcagagtggccgacttggctgattttgtgaaaatcgctcaccctgagccagcattcagagaagctgcggaagaagcttgtagaagtattggcaccatggtagagaagttgaacacaaatgtggatttatatcaaagtttgcaaaaattactagctgataaaaaacttgtggattcccttgatccagaaacaaggcgagtggctgaactgtttatgtttgattttgaaattagtggaatccatctagacaaagaaaagcgtaaaagagcagtggacctcaatgttaaaatcttggatttgagtagtacatttcttatgggaaccaattttcccaacaagattgagaagcatctcttaccagaacacattcgtcgtaactttacatctgctggggatcatatcataattgatggtctccacgcagaatcaccagatgacttggtgcgagaagctgcttataaaatttttctttatcccaatgctggtcaattgaaatgtttagaagaattgctcagcagcagagatcttctggcaaagttggtggggtattccacgttttctcacagggctctccaaggaacgatagctaaaaatccagagactgtcatgcagttccttgaaaaactatctgacaaactttctgaaagaactctgaaagattttgagatgatacgagggatgaaaatgaaactgaatcctcaaaattccgaagtaatgccctgggaccccccttactacagtggtgtgattcgtgcagaaaggtataatattgagcccagcctatattgcccgtttttctctcttggagcatgcatggaaggcctgaatattttgcttaacagactgttggggatttcattatatgcagagcagcctgcaaaaggagaggtgtggagcgaagatgtccgaaaactggctgttgttcatgaatctgaaggattgttggggtacatttactgtgatttttttcagcgagcagacaaaccacatcaggattgccatttcactatccgtggaggcagactaaaggaagatggagactatcaactcccagttgtagttcttatgctgaatcttccccgttcctcaaggagttctccaactttgctaactcctggcatgatggaaaatcttttccatgaaatgggacatgccatgcattcaatgctaggacgtactcgttaccaacacgtcactgggaccaggtgccctactgattttgctgaggttccttctattctgatggagtactttgcaaatgattatcgagtagttaaccaatttgccagacattatcagactggacagccactgccaaaaaatatggtgtctcgtctttgtgaatctaaaaaggtttgtgctgcagctgatatgcaacttcaggtcttttatgccactctggatcaaatctaccatgggaagcatcccctgaggaattcaaccacagacattctcaaggaaacacaagagaaattctatggcctaccatatgttccaaatactgcctggcagctgcgattcagccacctcgtggggtatggtgctagatattactcttacctcatgtccagagcggtcgcctccatggtttggaaggagtgttttctacaggatcctttcaacagggctgccggggagcgctatcgcagggagatgctggcccacggtggaggcagggagcccatgctcatggttgaaggtatgcttcagaagtgtccttctgttgatgacttcgtaagtgccctcgtttccgacttggatctggacttcgaaactttcctcatggattctgaataaaagaaacactctacacctcttaaatcaaggtcatgtagataatgactttgttataaatgctacagctgtgagagcttgtttctgatttcattgttcgcttctgtaattctgaaaaactttaaactggtagaacttggaataaataatttgttttaattaaaaaaaaaaaaaaaagggcggccgctagactagtctann

SEQ ID NO: 23321 - DNA, 2051 bp, Homo sapiens; identical to SEQ ID NO: 22585
  misc_feature 2049, 2050, 2051: n = A,T,C or G

SEQ ID NO: 23322 - DNA, 331 bp, Homo sapiens
cgttctacagtctcaatcgtgtatagactaatgagaaaaaatgaaaatgagtttcattagacagaccacttttgttggactcagtcttgagctgatcaaatgaggcagctgaactgagactgaatcttccctgtgattagctcaactcttgaagtagccaggcacaaattagctggatgtagtggtgcgagcctgtagtgccagctacccaggaggctgagaggcaggaggattgcttccgctgaggagttcggggctgcagtccccgcgtaccacaaaccatagtaacttacacagggggaaaagttactgaaataaaaatgttttatat

SEQ ID NO: 23323 - DNA, 1309 bp, Homo sapiens
  misc_feature 1, 1308, 1309: n = A,T,C or G
nctcctccgaatatcctggtctggttctccagttcagtgtttcagattaaatcccctgacacagtaaaactcatgtgcactgacttctcctccgaatatcctgctttggtttctccagttcagtatttcaaattaaatcccctgacacagtgaaactcatgtgcaccgacttctcctctgccccagatggtgtaacctgggctggccagacaggcacctccccagtgggcgtgtcttcagacaaaggtggctttgctttgttgaagttactgatataaagatcagcgcctgaaacagattctccgggatattaccggagacggagtgttttattattagcctttcttaggtggacatttccatttgaattacaagtcctttaggctgggcgtggtgcatggctgtaatctcagcaccttgggaggctgaggcaggaagatcacttgaggccaggcgttggagagcagcctgggcaaggtggcaagaaccttgtctctacaaaaaaaaaagcgtctgccatcatggatgttctcgcagaagcaaatggcacctttgccttaaaccttttgaaaacgctgggtaaagacaactcgaagaatgtgtttttctcacccatgagcatgtcctgtgccctggccatggtctacatgggggcaaagggaaacaccgctgcacagatggcccagatactttctttcaataaaagtggcggtggtggagacatccaccagggcttccagtctcttctcaccgaagtgaacaagactggcacgcagtactggcttacgggtggccaacaggctcttgggggaaaagtctggtgattcctctcatctttagagattcgtgcaaaaatctaccaagcagagatggaggagcttggactttatcagcgccgtacacaatcccagaaaacacttaaacacctgggtagctcgacaagaccgaaggtcacactggccgagtagactcaaccgggaccagaggatccatgcacaggctggtcggtgaagcggcacttccaagcgcaccgggggctgtaccgatggcaagtgcaaaacgcaggaaaacggtcacgtcagaacgaagacgggaaaacactgggccagacagttaacccacctacctagaagcgccacatgtgggaacataccacccctcggggccaccaatggagaagcacgcagcaccccacgtgcacacaacccacgatagaaggcgcgccaaacccccaagcgacccaccgaccgccgcaccacaacaagcgaccacagtaaaccaatcaccgcgcctgacgcgcgacgacann

SEQ ID NO: 23324 - DNA, 369 bp, Homo sapiens; identical to SEQ ID NO: 21651
  misc_feature 1, 2, 3, 4, 5, 6, 7, 8: n = A,T,C or G

SEQ ID NO: 23325 - DNA, 2540 bp, Homo sapiens
  misc_feature 1, 2, 2540: n = A,T,C or G
nngatccctgcgcgcgtctcctgctcgggtcagtgcgccgcgctgcgctgggcgccatggcgctccccggagcccgggctcgcggctgggcggcagcagccagagcggcccagaggcgccgccgcgtggagaacgcaggagggtccccgagtcctgagcctgcgggccggcgcgcggcgctttacgtacactggccttactgcgagaagcgctgcagttactgcaacttcaacaagtacatccctcgccgcctggaggaggctgccatgcagaagtgtctggtgaccgaagctcagacgctgctgcggctcagcggggtgcaacgggtggagtctgtgttctttggtggggggacccccagtctagccagtccccacacggtggctgctgtcctggaggctgtggcacagacagcccacctgcctgcagactcggaagtcacattggaggctaatcctacttcagctccgggctccagactggcagagttcggggcagcaggggttaacaggttgtctataggcctccagtccctagatgacactgagctccggctgttgggacggacgcactcggcctgcgatgctctgcggacgctggcagaggcccggcgcctctttcccgggcgcgtgtctgtagacttgatgctggggctgccggcacagcaggtggggccgtggcttgggcagctgcaggaactgctgcaccactgtgatgaccacctctccctctaccagctgtccctggagcggggcaccgcactcttcgcccaggtgcagcggggtgcccttccagcccctgacccggagctcgcagctgagatgtaccagaggggccgggctgtccttcgggaggctggcttccaccagtatgaggtctccaactttgcccggaatggggcgctcagtacccacaattggacttactggcagtgtggtcagtaccttggcgttgggcctggggcccatggacgatttatgccccagggggctggaggccacacccgggaggctcggatccagacactggagcctgacaactggatgaaggaggtgatgctgtttggccatggcacccggaagcgtgtccccctgggcaggctggagctgctggaggaagttttggccctggggctacgcaccgatgtggggatcactcaccagcactggcagcagtttgagccccagctgaccctgtgggatgtgtttggagcgaacaaggaggtgcaggagctgctggagcggggcctactgcagctggatcacaggggtcttcggtgttcctgggagggtctggctgtgctggactctctcttgctgaccctcctgcctcagctccaagaagcctggcagcagagaaccccctcccctgtgccaggaggatgacaaaaatgttcctgtgttccagggtaatgccaggtgggttttgagagctgggtcggtactgcagacatctcttctccgttgtcgggtgccgtctctgctccttgtggttattgctcagccctggcatccccaggggaatggcagcagtgaggtagatgggaggacatttctggtcagggaactggcatcccattcagcatctcaggactcacaggccaacatgtgttccatggctgggaattgcctaccacccacatcagcttctgtttacctttttggcatcaaataatgaacagtgtttggaaatctttctacaggcaattacctccccaagagaagccttccttattttggagtaaggtcctaagatagctggatgaatcaggaaaaccatgtcccctctaggtattattaatataagcaggaagggatctactataggaatgaagtatttataaaccactgaaagggatagagaagtgaacattggagaaagccagtagcaactgtgagaaatcagcaacttgcaggaggcacagaaaactcctgctgatggtctcagcttccagcagcacaaaagcagatgatgtactggaaaatgctcagaagatgctacaaaacctcatgcctactgtctgccactgctggagaaggaatcatggtttctagaagtgcctctcattagtggactttaaagcaaatcctggctggcaggaaattctgaggaatatagctcttaggcttccagcctctaccatgcaggagagaacacagaaggactgatgtatgttggtggatccatgtatgtgtccagcacagcggcctgctggactctgagaactgggaaagatcagagcaagccttgcctcttatcttcgggaaaccagaatatgtttggggtggtaggagccacacagactcttctgagccccctcactcacttccttccccctgtgcctttcctttgagagtgaaggtgggtggagttgaccagagaaaggggagagaattcgggaaagacccaaagtgtttgtaattcttctttgtccttttacctacagaaatggtcacatggttctatttaaatagcctaataaacacatctggagcctgaaaaaaaaaaaaaaaaaaaaaaaaaaaaagtcgtatcgatgn

SEQ ID NO: 23326 - DNA, 1311 bp, Homo sapiens
ttgtattctcctgtgctctctttgcgcctttggtctgtctgtttccgctctttggcccgcccgtgttgtacctgcgcctggccgatgccactctggtttacctcctctttcctttccccgtcctttccccctttccctttgtttccccaacccctgggtgataatgtattccctcttggccattgaagatcttcgtatcatgcatgtttaggaccctatccgactctcgagtctcttcaaatccttcaaattggcaccgatctgccggctgtcatgatctccagcatactgccagctcgtggatggagaatgctagattcgtcgactttccctgcattgtctgagccagagtctcatacgtctctctcaggcagtccattctgtcttccgagtgtcaaggccacaccagggaggctatatgcacagtgcttagcatttcagtgtcaaccgtctgtgcacgagaagggtcagtcatagataaatactgatctaacacgcctgaggtacaacatcttgtactgtagttctcctttcctcatcagggctaaaactgctattgttgctcaagtctgaatcgctgtgaatatagtgaagagtggagtccatattcctcacactccagagtccagataatgtcactggccctccgcaacatggcctcaagtcccgatcttctgctcagaatactgtgttgcttgctgcagtgaaatggtccgatcagaaacaaagcacctctcaacagcatcgctgattaaaggcacagaatcttcttgatttattttacaatttggtagctcatttatatccagttcatcttgcaaatcacttctcttttctatactgatggtctcttcatgtgcatccagcgctggaagcacgtagtgcacgcggacagcacttccacttgtgctttaacatctggatcatcaatgtggggctctagattttctatcatttcttccagttcctttctggtggccatggtgatgtttggagaactgggcacagggccctcagattcttcctctggtccctctgggctgggttttcccccagagttctgttcaagctctacgtctagatctatttcaggaagaggagtcctccagaaatggaaggagttatacaattcctgatctaagagagctgaatcttgtgaagtggtgccaacctctggtcgtaacatagatttgtagttaccaggttttttatcattctcattactagctgcttcctggtgagattctgaggacaaagtacaaagtaaagagctgcccacgcgtccgcggacgcgtgggtcgactccctata

SEQ ID NO: 23327 - DNA, 2781 bp, Homo sapiens
  misc_feature 1, 2, 3, 4, 2779, 2780, 2781: n = A,T,C or G
nnnncacttgcggccccgggttcctcccggggctacgcgcggccctggcccagcgttggctgccgaggctcggccggagcgtggagcccgcgccgctgccccaggaccgcgcccgcgcctttgtccgccgccgcccaccgcccgtcgcccgccgcccatggagcgcgccgcgccgtcgcgccgggtcccgcttccgctgctgctgctcggcggccttgcgctgctggcggccggagtggacgcggatgtcctcctggaggcctgctgtgcggacggacaccggatggccactcatcagaaggactgctcgctgccatatgctacggaatccaaagaatgcaggatggtgcaggagcagtgctgccacagccagctggaggagctgcactgtgccacgggcatcagcctggccaacgagcaggaccgctgtgccacgccccacggtgacaacgccagcctggaggccacatttgtgaagaggtgctgccattgctgtctgctggggagggcggcccaggcccagggccagagctgcgagtacagcctcatggttggctaccagtgtggacaggtcttccgggcatgctgtgtcaagagccaggagaccggagatttggatgtcgggggcctccaagaaacggataagatcattgaggttgaggaggaacaagaggacccatatctgaatgaccgctgccgaggaggcgggccctgcaagcagcagtgccgagacacgggtgacgaggtggtctgctcctgcttcgtgggctaccagctgctgtctgatggtgtctcctgtgaagatgtcaatgaatgcatcacgggcagccacagctgccggcttggagaatcctgcatcaacacagtgggctctttccgctgccagcgggacagcagctgcgggactggctatgagctcacagaggacaatagctgcaaagatattgacgagtgtgagagtggtattcataactgcctccccgattttatctgtcagaatactctgggatccttccgctgccgacccaagctacagtgcaagagtggctttatacaagatgctctaggcaactgtattgatatcaatgagtgtttgagtatcagtgccccgtgccctatcgggcatacatgcatcaacacagagggctcctacacgtgccagaagaacgtgcccaactgtggccgtggctaccatctcaacgaggagggaacgcgctgtgttgatgtggacgagtgcgcgccacctgctgagccctgtgggaagggacatcgctgcgtgaactctcccggcagtttccgctgcgaatgcaagacgggttactattttgacggcatcagcaggatgtgtgtcgatgtcaacgagtgccagcgctaccccgggcgcctgtgtggccacaagtgcgagaacacgctgggctcctacctctgcagctgttccgtgggcttccggctctctgtggatggcaggtcatgtgaagacatcaatgagtgcagcagcagcccctgtagccaggagtgtgccaacgtctacggctcctaccagtgttactgccggcgaggctaccagctcagcgatgtggatggagtcacctgtgaagacatcgacgagtgcgccctgcccaccgggggccacatctgctcctaccgctgcatcaacatccctggaagcttccagtgcagctgcccctcgtctggctacaggctggcccccaatggccgcaactgccaagacattgatgagtgtgtgactggcatccacaactgctccatcaacgagacctgcttcaacatccagggcggcttccgctgcctggccttcgagtgccctgagaactaccgccgctccgcagccacgctccagcaggagaagacagacacggtccgctgcatcaagtcctgccgccccaacgatgtcacatgcgtgttcgaccccgtgcacaccatctcccacaccgtcatctcgctgcctaccttccgcgagttcacccgccctgaagagatcatcttcctccgggccatcacgccaccgcatcctgccagccaggctaacatcatcttcgacatcacggaagggaacctgcgggactcttttgacatcatcaagcgttacatggacggcatgaccgtgggtgtcgtgcgccaggtgcggcccatcgtgggcccatttcatgccgtcctgaagctggagatgaactatgtggtcgggggcgtggtctcccaccgaaatgttgtcaacgtccacatcttcgtctctgagtactggttctgagggctggtctgccgcacagccgcaggtgcacctccaggccaaatcattgctgccagtgactgtggtctgtacttgtttataccctcagacttttttaatgttaggtatttgtagcattaggccaacatgtattaagctgagccagatgaataagtccatctgatgtattttcggtgtttaaaaaatgagcccagttgctcaactgtttggttgaaaaccttgctcattttttaatgcgaaggctaagtgtcaccccctttctctgcctctggctgggccttgctaagggccaaggaaagaaagacattttttagggggcagccagtccaaatgccaaaagaagaccagttcttgccctgattgtatgaaatttgacattttggtgggcacaaatttttgtgaagagggggggaaaggagggggacatcccaaaatgtgaaagcgggaggagagcgttgtaaacacgtgaattgaggggttaggaggagggcgctggaatgggaaaactgnnn

SEQ ID NO: 23328 - DNA, 2054 bp, Homo sapiens
  misc_feature 1, 2049, 2050, 2051, 2052, 2053, 2054: n = A,T,C or G
ncagatgatgaaagtaagtcttctgtcttcttagtagaggtatctgcacttgcgcagccctccaaggcgccctctggggggggggacttctctttcggtaaccagctcccttgcggatagtctatgttctccatataaacccagcacttcccttaattgagatacgtgggacttcactccgtccccagcccggaaccacaagtgagggcactgcgtttcctgattgacctctttggcgattacttccgcccaggggcctggaatactggaggcccttcgacggagaacaacaagaaaggcacttccggtgtctgttgccaggcgcgggcccagtgggccgtaggggcgacattgttgccgtcgtctttccccccccagtcccggggatggagatgtcgggactcagcttttcagagatggagggctgccgtaacctacttggcctactggacaacgacgagatcatggccctatgcgacaccgtcaccaaccgcctggtgcagcctcaggaccgccaagatgctgttcatgcaatattagcatacagtcaaagtgcagaagaacttctgaggcgtagaaaagtccaccgagaagttatatttaagtacttggcaacacaggggattgttatacctccagctactgaaaaacacaatcttattcagcatgcaaaagattactggcaaaagcaaccacaactgaaattgaaggaaacgccagagccagttacaaagacagaggacatccacctatttcaacagcaggtgaaagaagataaaaaagctgaaaaagttgattttcgtcgcctaggagaagaattctgtcattggttctttggacttcttaattctcagaatccttttctaggaccacctcaagatgaatggggaccacagcacttctggcatgatgtgaagcttaggttttattacaacacatcagaacaaaatgttatggactaccatggagcagaaatcgtgagccttcgtttgctgtcactagtaaaagaagaatttctttttctcagccccaacctagattcacatggactgaaatgtgcatcttctcctcatgggctggttatggttggagttgctgggactgtccatcgaggaaacacttgtttgggcatttttgaacaaatttttggactcatccgctgcccttttgtggagaatacttggaaaatcaaatttatcaacctgaaaattatgggagagagttcccttgctcctggaacattaccgaaaccatctgttaaatttgaacaaagtgatctagaggccttttataatgtaatcactgtatgtggtaccaatgaagtacgacataatgtaaagcaggcttcggatagtggaactggggaccaagtttgaggtagtggaaatgagacattgctgaacaaaagagaactgggtttacctgaccctctaaagcgctaagtactgtcagcctgaaaaaaatcttctatacagaaactcttccaaatactatatcagtaatgtctgaatgatttcagatgtgaaaattgacatattttagttgaaatacctttctggactacagacttacatatcatgtgaatacttacctatttctacccgagttgcagcaagtattctgaaagcttaatgcaaataaatcccactttagatcttacagctaactgtgtgccttagaaaccaggtaatattttccttttacttagtgaatattctgctaatatctgcacttttcatgtgggaaaggattaataatggtccaggcttcccctctttaagtttcatgtttacttttgtctaactctggataattgtattttacaaatgcatctcactgtagtatatttttaaaactattaaatattttagagatgtatcggaacccaaggtcctttgaaattcacaactctctttgggcaagcccaatttacgcggaaaactacctatattgaacattagatcagggcaccaattttggggcgaccccgcggggaaggccgtacaaattctggcgatcgcagcataaaaaagttggccttcttcggannnnnn

SEQ ID NO: 23329 - DNA, 4345 bp, Homo sapiens
agggagtcgacccacgcgtccgatctttgtcagtgcacaaaatggcgccctacagcctactggtgactcggctgcagaaagctctgggtgtgcggcagtaccatgtggcctcagtcctgtgccaacgggccaaggtggcgatgagccactttgagcccaacgagtacatccattatgacctgctagagaagaacattaacattgttcgcaaacgactgaaccggccgctgacactctcggagaagattgtgtatggacacctggatgaccccgccagccaggaaattgagcgaggcaagtcgtacctgcggctgcggccggaccgtgtggccatgcaggatgcgacggcccagatggccatgctccagttcatcagcagcgggctgtccaaggtggctgtgccatccaccatccactgtgaccatctgattgaagcccaggttgggggcgagaaagacctgcgccgggccaaggacatcaaccaggaagtttataatttcctggcaactgcaggtgccaaatatggcgtgggcttctggaagcctggatctggaatcattcaccagattattctggaaaactatgcgtaccctggtgttcttctgattggcactgactcccacacccccaatggtggcggccttgggggcatctgcattggagttgggggtgccgatgctgtggatgtcatggctgggatcccctgggagctgaagtgccccaaggtgattggcgtgaagctgacgggctctctctccggttggtcctcacccaaagatgtgatcctgaaggtggcaggcatcctcacggtgaaaggtggcacaggtgcaatcgtggaataccacgggcctggtgtagactccatctcctgcactggcatggcgacaatctgcaacatgggtgcagaaattggggccaccacttccgtgttcccttacaaccacaggatgaagaagtacctgagcaagaccggccgggaagacattgccaatctagctgatgaattcaaggatcacttggtgcctgaccctggctgccattatgaccaactaattgaaattaacctcagtgagctgaagccacacatcaatgggcccttcacccctgacctggctcaccctgtggcagaagtgggcaaggtggcagagaaggaaggatggcctctggacatccgagtgggtctaattggtagctgcaccaattcaagctatgaagatatggggcgctcagcagctgtggccaagcaggcactggcccatggcctcaagtgcaagtcccagttcaccatcactccaggttccgagcagatccgcgccaccattgagcgggacggctatgcacagatcttgagggatctgggtggcattgtcctggccaatgcttgtggcccctgcattggccagtgggacaggaaggacatcaagaagggggagaagaacacaatcgtcacctcctacaacaggaacttcacgggccgcaacgacgcaaaccccgagacccatgcctttgtcacgtccccagagattgtcacagccctggccattgcgggaaccctcaagttcaacccagagaccgactacctgacgggcacggatggcaagaagttcaggctggaggctccggatgcagatgagcttcccaaaggggagtttgacccagggcaggacacctaccagcacccacccaaggacagcagcgggcagcatgtggacgtgagccccaccagccagcgcctgcagctcctggagccttttgacaagtgggatggcaaggacctggaggacctgcagatcctcatcaaggtcaaagggaagtgtaccactgaccacatctcagctgctggcccctggctcaagttccgtgggcacttggataacatctccaacaacctgctcattggtgccatcaacattgaaaacggcaaggccaactccgtgcgcaatgccgtcactcaggagtttggccccgtccctgacactgcccgctactacaagaaacatggcatcaggtgggtggtgatcggagacgagaactacggcgagggctcgagccgggagcatgcagctctggagcctcgccaccttgggggccgggccatcatcaccaagagctttgccaggatccacgagaccaacctgaagaaacagggcctgctgcctctgaccttcgctgacccggctgactacaacaagattcaccctgtggacaagctgaccattcagggcctgaaggacttcacccctggcaagcccctgaagtgcatcatcaagcaccccaacgggacccaggagaccatcctcctgaaccacaccttcaacgagacgcagattgagtggttccgcgctggcagtgccctcaacagaatgaaggaactgcaacagtgagggcagtgcctccccgccccgccgctggcgtcaagttcagctccacgtgtgccatcagtggatccgatccgtccagccatggcttcctattccaagatggtgtgaccagacatgcttcctgctccccgcttagcccacggagtgactgtggttgtggtgggggggttcttaaaataactttttagcccccgtcttcctattttgagtttggttcagatcttaagcagctccatgcaactgtatttatttttgatgacaagactcccatctaaagtttttctcctgcctgatcatttcattggtggctgaaggattctagagaaccttttgttcttgcaaggaaaacaagaatccaaaaccagtgactgttctgtgagtgattggtgtctgtgccgtttgttgtcaagtccagggtccaggaagggtcttttcagtcaaggtcagtggaggcccaacagccacagccacagatggatccatcactgcagtgaaggaggagcagggcctagatggtggaggagcggggcaagctggtgggcactcctggccttgcctcactgtccagctcgagacactatctccttagcatcggcctcagctgctgttgtcttcacagccggccataccaccttcccgcaggctggtagggtccactgtccagccccagggctagttgctggtccaccaggagagaaggcccaggcctggctcactgatggatcccacaagcgtgtacggagcctccttctttggcagctcctcactggaagtggtggcatctgctgagctgggccctgtgggggacgtgtcaacaaagctctcgtccaccacccggaagcggatctcctcgccggtgtccatgtagaggtcgtgtgctccttcctccgtctcgtactcccacacccacacctgctccgcttcgtcgaacttggctggctgctgcagtgactctggggggatgagaatgtcatcgaagaagcctagagagacgtgcactccttctgggctgcagcctttgatcttcccaatgagaatctcatctaggaatggatgaaacaccacgcagcgaaaatggactttggtgtgtgatgcgccatccccagggaatacataggcatcctccagtttggtgatatcaaacagacaaatgcagagtcccacgttgtacacgaccttgttggccaacttcttgttcagctcctcggcaatggagtcgttgagcttcctctcaaactgccaaggggggatccggacggtgtccaccatttccaccaggacgaacatcccggcctgcgctgggggctcaataagaagcctctgtccacccccaccccgccgaggcggggcggggctgcctgtgtgctcgcgcacagcgtggggcagagagagggcgaggagagggcggggcctcctcctttcacaggagcagagcggttcccccgcccccgacagcgctttctgttgctaggcgacctccgtgcaatcccgcctgattatccctcgcctggcctgtgctttacccgcattgctgtcctctgctcggcagccagagtgatccaaggcaggagaaagagagtcactcaggatgactaggagcatagcatttccatgccacagcacacgagttgagcacctgcagggatgcccatgaccctctcagtgccccacggcctctctgtaaaagggaagcagcaatagatcccatctcaaatgactgtccatcagcagagtgctggcaggaacgtggcgctgtctcaggttcttcctcccctgcattcctcagcagctgccctcactgggcagggcaaattataccgtggcccgaccataaaagccactttccaaaaaaagaagctttaaggcccccgagagacgcagctgagcctctcacctggcagtgcctgactcaggaggtgatgtctgggccatgagccacagagcctggtgtccccggacgcgtg

SEQ ID NO: 23330 - DNA, 382 bp, Homo sapiens
acctgcctgctggacccctccacctggaggccagcccatgtctcaggcccagccctagcctcttctcctcaaattctaagtgttttctctttaggtttccctggctttgtgaatggatcatgtgtctctaggtataaacctgacatcatctttccacccggcttacctccaccagatctccccagttctgtctccatcttctacctgcagctgctctgttctcatggtcactgctgcatcactgagtctggacccttgttatcattttcaaactggcctccacgccctgctccctcctccacctccccatcctcttgtctcccctcccctctgaatccagcccagcggggcttctcctgcctccatcacatcacagaagtcc

SEQ ID NO: 23331 - DNA, 1916 bp, Homo sapiens
  misc_feature 1914, 1915, 1916: n = A,T,C or G
actcctccatggcgctggcgtctggccgcgcagtcaggccacgcccccagcgtagacgcacaccggcgtcggagctttccgcctattaccgggcagcgattgggtcgctataccgcatgtcacgccaaggacgcactctcattggccaatcgagtttctgccatttgttcattgcctcctgagcgtattccagttactttcaggctcgacgcgtgaaggcctcgttgagagaaggtctcattcggtgttttgggaagagagtcgtgtgggcccaggtatcgtagcggcgacacgagagagacgggcggtgtgacagccttccactacctgcacgagtgtattggtaacgttggggtgggtgcactcttttggagctggaggaagtgctgccctctgctcccccatcccagcgctttggtttctcccacccggcagtcatggggacgctggatgagcccatttctgaagtgcggaggggccgggcttcttaggctgtgggcggagcctgggcctgggagaggaacagggccctggagcacctggtttcggggacagtagggttggtgggagttgcgatgatattgccacctacctcttacatcttttagtgcgtatgttctgtccacccagctactggttcatttgagtagatcggagtcagatgagtacatgtttacgggaggcgcttggttacgggatccagataggaatctttatctgagctgcttgtcagtttgttcgtctgtccctaggtctgtctgctatcagctatgccgctgcccgttgcgctgcagacccgcttggccaagagaggcatcctcaaacatctggagcctgaaccagaggaagagatcattgccgaggactatgacgatgatcctgtggactacgaggccaccaggttggagggcctaccaccaagctggtacaaggtgttcgacccttcctgcgggctcccttactactggaatgcagacacagaccttgtatcctggctctccccacatgaccccaactccgtggttaccaaatcggccaagaagctcagaagcagtaatgcagatgctgaagaaaagttggaccggagccatgacaagtcggacaggggccatgacaagtcggaccgcagccatgagaaactagacaggggccacgacaagtcagaccggggccacgacaagtctgacagggatcgagagcgtggctatgacaaggtagacagagagagagagcgagacagggaacgggatcgggaccgcgggtatgacaaggcagaccgggaagagggcaaagaacggcgccaccatcgccgggaggagctggctccctatcccaagagcaagaaggcagtaagccgaaaggatgaagagttagaccccatggaccctagctcatactcagacgccccccggggcacgtggtcaacaggactccccaagcggaatgaggccaagactggcgctgacaccacagcagctgggcccctcttccagcagcggccgtatccatccccaggggctgtgctccgggccaatgcagaggcctcccgaaccaagcagcaggattgaagcttcggcctccctggccctgggttaaaataaaagctttctggtgatcctgcccaccaaaaaaaaaagcttcctttgaggctgcccaaccaagtcggcaagatacacaacacatcatattgcaaaaactcagctaagaagataggtgtggacgctggcaaggggctcgccggcgctgaccttgaggttggccccatgcagagaagcttaagtccatggtaggcccatggcatgggagcagggggtgagaggggcacatgggagtcccagaggacaacatcattataaccattataagggatcacaggtcgggcccaggtgggccaagcgcaagacacacaacgannn

SEQ ID NO: 23332 - DNA, 3221 bp, Homo sapiens
cgtccgcccacgcgtccgggaggcagcgttttctgggcttctgtctggttctctctctccagaaggttctgccggttcccccagctctgggtacccggctctgcatcgcgtcgccatgatgggccatcgtccagtgctcgtgctcagtgagttctggggatgccaggaaatggacccttttcgccctcttctgtccatacttttcagtgttgccccagctccgtcccccactgaccgggccactgagccttccaatcatcgtcttcattttggaagcccagtgtcccgctttcctctcttctcttaacctgttcgcttctctgcacaaactcaaactggccttattctcgccgagcctctttccttgacgtgtgctcgtcttggggaagctctttcccactccgcgttctgtccctcagcccccacgcttcccccgcccctgcgccctttctagcctgattgtcgctatgtagctgcacgaataacgttttttttgtttttttttcagttaggtctagctttatattcttggcccatcccttagtagcggtaatttaaatgtttcaatctgtattacggagttaacagtatttcctagtagaattgtgagaattaaatgaggccagaacacaaagcgtgaatccggaagaaaagttcaatctggaaacatcaatgctgccaagactattgcagatatcatccgaacatgtttgggacccaagtccatgatgaagatgcttttggacccaatgggaggcattgtgatgaccaatgatggcaatgccattcttcgagagattcaagtccagcatccagcggccaagctccatgatcgaaattagccggacccaggatgaagaagttggagatgggaccacatcagtaattattcttgcaggggaaatgctgtctgtagctgagcacttcctggagcagcagatgcacccaacagtggtgatcagtgcttaccgcaaggcattggatgatatgatcagcaccctaaagaaaataagtatcccagtcgacatcagtgacagtgatatgatgctgaacatcatcaacagctctattactaccaaagccatcagtcggtggtcatctttggcttgcaacattgccctggatgctgtcaagatggtacagtttgaggagaatggtcggaaagagattgacataaaaaaatatgcaagagtggaaaagatacctggaggcatcattgaagactcctgtgtcttgcgtggagtcatgattaacaaggatgtgacccatccacgtatgcggcgctatatcaagaaccctcgcattgtgctgctggattcttctctggaatacaagaaaggagaaagccagactgacattgagattacacgagaggaggacttcacccgaattctccagatggaggaagagtacatccagcagctctgtgaggacattatccaactgaagcccgatgtggtcatcactgaaaagggcatctcagatttagctcagcactaccttatgcgggccaatatcacagccatccgcagagtccggaagacagacaataatcgcattgctagagcctgtggggcccggatagtcagccgaccagaggaactgagagaagatgatgttggaacaggagcaggcctgttggaaatcaagaaaattggagatgaatactttactttcatcactgactgcaaagaccccaaggcctgcaccattctcctccggggggctagcaaagagattctctcggaagtagaacgcaacctccaggatgccatgcaagtgtgtcgcaatgttctcctggaccctcagctggtgccagggggtggggcctccgagatggctgtggcccatgccttgacagaaaaatccaaggccatgactggtgtggaacaatggccatacagggctgttgcccaggccctagaggtcattcctcgtaccctgatccagaactgtggggccagcaccatccgtctacttacctcccttcgggccaagcacacccaggagaactgtgagacctggggtgtaaatggtgagacgggtactttggtggacatgaaggaactgggcatatgggagccattggctgtgaagctgcagacttataagacagcagtggagacggcagttctgctactgcgaattgatgacatcgtttcaggccacaaaaagaaaggcgatgaccagagccggcaaggcggggctcctgatgctggccaggagtgagtgctaggcaaggctacttcaatgcacagaaccagcagagtctccccttttcctgagccagagtgccaggaacactgtggacgtctttgttcagaagggatcaggttggggggcagcccccagtccctttctgtcccagctcagttttccaaaagacactgacatgtaattcttctctattgtaaggtttccatttagtttgcttccgatgattaaatctaagtcatttgaaaaaaaaaaaaaaaaaaaaaaaaaaaaaaaaaaaaaaaaaaaaaaaaaaaaaacaaaaaaaaaaaaaaaaaaaaaaaaaagagagaggggggcgggcccaaaaatcactcccacggggggggcccaccaagaacgcccccccgccaaccggacacggaggggcggcccccacaagacagcgccataatacaccaacgcagcggcgcgcgcgctaacaacactaaaagacgaacacagccacagtgggcaaagacaccagacccatcgacacacggagaactcatcttccaaaagccgaagacacccactacagctgggggacgagcgacacaacatagtggacgcacccacccaacccacgcaccagacatacagatacagcccccggcgagcgcacacacacacaccacatggcgggcagcatcaagcagggagcacaacacacacagaaccagacagaagcccagaagcgcgcaaaaaagaagaccagctaaccgttcgagacgcggcattattagaaccaaaaacaaaaatcattacataacaccgagcgcagccaccgcactaataatacaacacgaacagccacgcgcaagacgaagcacgacgcaacacccgccaaccacaccacaagcaccgccagcatccagccatcgacgcaccgccagcaaacagagcatacatgagccaaacacgcagcagcgcaccgacaaccaggcaaaagcacaagcacaccaaagaccaatgaccacaagcaacaa

SEQ ID NO: 23333 - DNA, 1020 bp, Homo sapiens
  misc_feature 1017, 1018, 1019, 1020: n = A,T,C or G
agggagtcgacccacgcgtccgggcgcctgtcggacccgcagagctctcggactttcggaagctctcggtgtgggtgcgacccgagagaaggagcggggctggtggggctgctgcagccgtcacaggaaataagtaatcatggtgctcaacagtttggataagatgattcaactccagaaaaacactgccaacatcaggaatatttgtgttttggctcatgttgaccatggaaaaactactctggctgactgtcttatatctagcaatggaatcatctccagccgcctagcaggcaagttaaggtacatggacagcagagaagatgaacagatccgagggatcactatgaaatccagtgccatttccctacattatgcaacaggtaatgaggagtacctgatcaatctgatagactctccaggacacgtggacttttcctcagaagtatcaaccgctgttcgcatttgtgatggatgcatcattgtggtagatgctgtggaaggagtctgtccacagacacaggcagttctgcgacaagcttggcttgaaaacatccgtccggttttagtgattaataagattgatcgcttgatagtggaactgaaattcaccccacaagaggcctattctcacctcaagaatattttagaacagattaatgcgctcacagggactctttttacttctaaagtcctagaagaaagagcagagagggagactgaattcccaagtgaatccaaattctgtgaccacgagcgcacgtttattgactgggccctggttgcggggccagattgttcttcccccttgagttctccccgaaacgggcaacctgggtgtccccggcgaacatggggtgtggttgcaaagagactcgagacaccgcgcaatcgcgcacgaggctctacactgcgtcgcttcgcttcacttcacggcacgttgcgccggcaactttcgctcgcgtactcggtggctgtctagacctttttcttttgttctgcgtcactatacttcannnn

SEQ ID NO: 23334 - DNA, 1463 bp, Homo sapiens
  misc_feature 1, 2, 3, 4, 5, 6, 7, 8, 9, 1401, 1455, 1456, 1457, 1458,1459, 1460, 1461, 1462, 1463: n = A,T,C or G
nnnnnnnnngtcttaaattcagcctcttcctaaaagcaaaaaagaaaaaaaaaacctcacagaattgtgttgagatccaccgctcacacgccgtacaccacccagtggcttcattctggcttagccgcagaggcaagaaagggaccccacttgctcccatgcccacctcaagaaaaaacataaaacaattttttttaaaaaagaaaagaaatctacctcagttgacaggattccacctttagggtttcttcaacttttaagtcttacctgttgagtgtaacttttgtagcatcttgcttttccaagcaagctagtgaggcatgacagagcagaagtctgtaaatgtccctgtgatggacctctttctagcatgttgcagttttatttttaataaattggtaagtgaaatgaacgtaaaggtaattgtgtacgttttagacatgacaatgaaaatttaaaatgtagcttccatacttgtgcataattccaaagtattttattttttatcaatcagtgttaaatagctttttgtacaggcttcaatccatttttcgaagtgtgctgttttttaatgaaagtaactataatcttttcacatcccatggaactgccgtttacacattgcaactttttaaacttaaccatatttttcaaaattaacgtttttggagggagaaaaatccccgcttgctaaatgatactaaaccgttgtttgggctcttataattaggtcctgagattttataaaaatttagtctgtagctttttaggttcttcactagagttggttgtacataaaaataataaagaatataaagtatcccaaaattcttttaaagtctggatttttccgctaatatgtactttagagaatattttgttcatgcatacttccacgttaaattgaaaatgtcttcagcttctcttggtaaatgtgaaccatttgttttttattgtgcttgggggagagggtattttaatataatttttgcctaaatcaagaagtcccctctgaatgttaatttttaaatgtcaaaatatgatgaacgatatatcttgaaagtgagattgcaatatgcttaaacttaagtggtatttcaaaaacgagaaaattctggaatttgtcatttgaagctccataagagaaattgataggacttcgtttttgatcagtctgaatagataccaatgtcattgtgtgggaattttttttaacttgtttatgtattattttgatccatttttctgtggcatttggtgcaataaaacttttgaatttatcttgaaaaaaaaaaaaagaaaaaaaaaaaaaaaaaaaaaaaaaaaaaaaaaaaaaaaaaaaaaaaaaaaaaaaaaaaaaaaaaaaaaaaaaaaaaaaaaaaaaaattaaaaaaaaaaaanggggggcccccccccgggggggcccccaaactcccccaaaggggggtttataannnnnnnnn

SEQ ID NO: 23335 - DNA, 1388 bp, Homo sapiens
  misc_feature 1, 2, 3, 4, 5, 6, 7, 8, 9, 10, 11, 12, 13, 14, 15, 16, 17,18, 19, 20, 21, 22, 1388: n = A,T,C or G
nnnnnnnnnnnnnnnnnnnnnntggtttctcacaatgcaggcgctccagctctgacacgtgcacttctttattggaaaagaataaagcagtcactgatgtggcaggggcaggacacgagcagctgccgtcctcctcccagcgtgcctggcatggtcgcaggggagcgggtgcctggagtcccggtgacaccacggggcacactgagggagctgaggagccggggccgcgcagcctcctggatgctcagcggatcgtgtacttgtcccacttcttttcagggtcgtagggttcccagcggctggcgggaaagatgtgcttgttcttctcgtaccagctcctcagcaccaccttgcctgcatgggactcatccttctccacagtggcgtcactgagcaaccgcacatcgtcatgaacatcaaagttgaagagtggtccactcttcccccgtgccttggtgacgatgaagtcgtagaagctgtgatggtgagggatgatcaagtcctccttgatgtacatgagctgctccacccctgcggacctcagctcactgaagtctttccgaaggatctcgagcgccttctgcaggaactgctgcatggtgttgccctttctcatcttgactgtccgccggtgcccagagccatcccagtagctgaaggtgatctcgatctcctcactcttgatcttctcctgcttggcttcccactcctgccgcagctcttcccgaagccgattctcctcctcctcacggtctcgatcaggcaagaagcttgtgtcaacgtctgggttcttccccagttttctcttcttcgtggtgatctcttccctttccatctcctcctcatacatggccgcctcctcttcctcctcgcctccctcttcttcctcctccagggtgaaggacaggctggagatcttccgcttggcttccttcttacgctccttctctcgaagcttctccagcttcatctgcagctccttggactgctccttcttggccagctgcttctcccgctccttcaccagagcctcctgcttggccttcatgtcattcagggtcacgagacccacggtgctggacttgagctctgcctccaccgcgtcgtagtgcgcagagaacttcttgtcaatgttggatttcatgatgttctcctccgcgatgcgctgcttcatctgctccatctgctcgcgctgcttctcccgcttcttcatcaggtgcatggcgcggccggcctcgctcgcggcgcccttgtattgagccatggcagcggcggcggcggcggcggcggcggcgggcggcggcggcggcgacagcgacagcggcagcggcagcggcggtggcggccgaacagtcagctgacgggggggcggggggctcgacccgggn

SEQ ID NO: 23336 - DNA, 1801 bp, Homo sapiens; identical to SEQ ID NO: 21112
  misc_feature 978, 979, 980, 981, 982, 983, 984, 985, 986, 987, 988, 989,990, 991, 992, 993, 994, 995, 996, 997, 998, 999, 1000,1001, 1002, 1003, 1004, 1005, 1006: n = A,T,C or G

SEQ ID NO: 23337 - DNA, 2487 bp, Homo sapiens
  misc_feature 1: n = A,T,C or G
ncaggggtaggagcgggagccgagaggaggcggaggagatggcgtcccagccgccacctccccccaaaccctgggagacccgccgaattccgggagccggaccgggaccaggaccgggccccactttccaatctgctgatttgggtcctactttaatgacaagacctggacaaccagcacttaccagagtgcccccacctattcttccaaggccatcacagcagacaggaagtagcagtgtgaacacttttagacctgcttacagttcattttcttctggatatggtgcctatggaaattcattttatggaggctatagtccttatagttatggatataatgggctgggctacaaccgcctccgtgtagatgatcttccacccagtagatttgttcagcaagctgaagaaagcagcaggggtgcatttcagtccattgaaagtattgtgcatgcatttgcctctgtcagtatgatgatggatgctaccttttcagctgtctataacagtttcagggctgtattggatgtagcaaatcacttttcccgattgaaaatacactttacaaaagtgttttcagcttttgcattggttaggactatacggtatctttacagacggctacagcggatgttaggtttaagaagaggctctgagaatgaagacctctgggcagagagtgaaggaactgtggcatgccttggtgctgaggaccgagcagctacctcagcaaaatcttggccaatattcttgttctttgctgttatccttggtggtccttacctcatttggaaactattgtctactcacagtgatgaagtaacagacagcatcaactgggcaagtggtgaggatgaccatgtagttgccagagcagaatatgattttgctgccgtatctgaagaagaaatttctttccgggctggtgatatgctgaacttagctctcaaagaacaacaacccaaagtgcgtggttggcttctggctagccttgatggccaaacaacaggacttatacctgcgaattatgtcaaaattcttggcaaaagaaaaggtaggaaaacggtggaatcaagtaaagtttccaagcagcaacaatcttttaccaacccaacactaactaaaggagccacggttgctgattctttggatgaacaggaagctgcctttgaatctgtttttgttgaaactaataaggttccagttgcacctgattccattgggaaagatggagaaaagcaagatctttgatatctttcatgtttgcctgcagttgaacaatactttagagtactttttaaaattatttctcacaaagaaatgaatgtacaatccaatgaaaacatttgttattggctatttcaggtgttttgctgctagaaattattaaagttacacactagtatgttggtctggtgacctggttacattttattatacacattattggaccataaggacatttgtttcacctagattttaagattatggagactgctgtcatttttatcttatttaaatctctaggtttattggaagagtaagattgatgaactatagcatgcacagtttggtacagtagagatcattaatacttttaaaagttctacattaattgacttggaatccttagaaatggagtggtgacatgtcagtatgagaacaggcaaaaggtaaattttttttttttttacaaccttaagtaatctcaataataaaattttctgatctgtattatactctccaattcagaataggatagaacctcccataatgtaacaaaatctttatataaaatattaattcagtctccttttaacaactctaatgaatggaaatatttattctatataaatttatatatttttcattttttaatcttacttaaaaaagagctatcccccaaaaccagagctgcagaacacacctgcaaaggaaacggcatgcacgtctagtctgagcacagacagcacagcagagtgcagactggagaacgttaagaataacaaaaccagtttcagtctatcagtaggccagtagctactcttcagtttccacaatagtatctattatggggatctaactttttaaatatctctaactgacatcagagggaatcaatgaaaaatgtctatttccttcatcgaaattattaggatagactttttttttttttttttttgagacggagtcttgttcagctgcccaggctggagtgcagtggctcgatcttcgctcactgcaaccaccgtctcctgggttcaagcgattctcctgtctcagcctcccaagtagctgggattacaggccaccaccatcatgcccggctaatttttgtatattggtagagacggagtttcactatgttgggcaggctggtcttgaactcctcacctcaggtgatccgcccgtcttggcctcccaaagtgctaggattacaggcgtaagccaccatgcctggccagatgatgtatttaaatatcacgga

SEQ ID NO: 23338 - DNA, 2241 bp, Homo sapiens
  misc_feature 1, 2240, 2241: n = A,T,C or G
ncgccccccgcgctgcaggccggcttctctgtccaatgcccacccggagctgggaggaggagtctgcgtaatgtgcgtgtgaagagactgggggagctggccggggctcacggtgtttgacccgtcggtcgtgcgtgagaggaaagggaaggaggaggtcccgaatagcggtcgccgaaatgttccggtgtggaggcctggcggcgggtgctttgaagcagaagctggtgcccttggtgcggaccgtgtgcgtccgaagcccgaggcagaggaaccggctcccaggcaacttgttccagcgatggcatgttcctctagaactccagatgacaagacaaatggctagctctggtgcatcagggggcaaaatcgataattctgtgttagtccttattgtgggcttatcaacagtaggagctggtgcctatgcctacaagactatgaaagaggatgaaaaaagatacaatgaaagaatttcagggttagggctgacaccagaacagaaacagaaaaaggccgcgttatctgcttcagaaggagaggaagttcctcaagacaaggcgccaagtcatgttcctttcctgctaattggtggaggcacagctgcttttgctgcagccagatccatccgggctcgggatcctggggccagggtactgattgtatctgaagatcctgagctgccgtacatgcgacctcctctttcaaaagaactgtggttttcagatgacccaaatgtcacaaagacactgcgattcaaacagtggaatggaaaagagagaagcatatatttccagccaccttctttctatgtctctgctcaggacctgcctcatattgagaatggtggtgtggctgtcctcactgggaagaaggtagtacagctggatgtgagagacaacatggtgaaacttaatgatggctctcaaataacctatgaaaagtgcttgattgcaacaggaggtactccaagaagtctgtctgccattgatagggctggagcagaggtgaagagtagaacaacgcttttcagaaagattggagactttagaagcttggagaagatttcacgggaagtcaaatcaattacgattatcggtgggggcttccttggtagcgaactggcctgtgctcttggcagaaaggctcgagccttgggcacagaagtgattcaactcttccccgagaaaggaaatatgggaaagatcctccccgaatacctcagcaactggaccatggaaaaagtcagacgagagggggttaaggtgatgcccaatgctattgtgcaatccgttggagtcagcagtggcaagttacttatcaagctgaaagacggcaggaaggtagaaactgaccacatagtggcagctgtgggcctggagcccaatgttgagttggccaagactggtggcctggaaatagactcagattttggtggcttccgggtaaatgcagagctacaagcacgctctaacatctgggtggcaggagatgctgcatgcttctacgatataaagttgggaaggaggcgggtagagcaccatgatcacgctgttgtgagtggaagattggctggagaaaatatgactggagctgctaagccgtactggcatcagtcaatgttctggagtgatttgggccccgatgttggctatgaagctattggtcttgtggacagtagtttgcccacagttggtgtttttgcaaaagcaactgcacaagacaaccccaaatctgccacagagcagtcaggaactggtatccgatcagagagtgagacagagtccgaggcctcagaaattactattcctcccagcaccccggcagttccacaggctcccgtccagggggaggactacggcaaaggtgtcatcttctacctcagggacaaagtggtcgtggggattgtgctatggaacatctttaaccgaatgccaatagcaaggaagatcattaaggacggtgagcagcatgaagatctcaatgaagtagccaaactattcaacattcatgaagactgaagccccacagtggaattggcaaacccactgcagcccctgagaggaggtcgaatgggtaaaggagcatttttttattcagcagactttctctgtgtatgagtgtgaatgatcaagtcctttgtgaatattttcaactatgtaggtaaattcttaatgttcacatagtgaaataaattctgattcttctaaaaaaaaaaaaaaaaaaaagaaccggagcgnn

SEQ ID NO: 23339 - DNA, 1384 bp, Homo sapiens; identical to SEQ ID NO: 21939

SEQ ID NO: 23340 - DNA, 1499 bp, Homo sapiens
acccacgcgtccgtgtcaagcatcccagaaggtataaaaacgcccttgggaccaggcagcctcaaaccccagctgttggggccaggacacccagtgagcccatacttgctctttttgtcttcttcagactgcgccatggggctcagcgacggggaatggcagttggtgctgaacgtctgggggaaggtggaggctgacatcccaggccatgggcaggaagtcctcatcaggctctttaagggtcacccagagactctggagaagtttgacaagttcaagcacctgaagtcagaggacgagatgaaggcatctgaggacttaaagaagcatggtgccactgtgctcaccgccctgggtggcatccttaagaagaaggggcatcatgaggcagagattaagcccctggcacagtcgcatgccaccaagcacaagatccccgtgaagtacctggagttcatctcggaatgcatcatccaggttctgcagagcaagcatcccggggactttggtgctgatgcccagggggccatgaacaaggccctggagctgttccggaaggacatggcctccaactacaaggagctgggcttccagggctaggcccctgccgctcccacccccacccatctgggccccgggttcaagagagagcggggtctgatctcgtgtagccatatagagtttgcttctgagtgtctgctttgtttagtagaggtgggcaggaggagctgaggggctggggctggggtgttgaagttggctttgcatgcccagcgatgcgcctccctgtgggatgtcatcaccctgggaaccgggagtggcccttggctcactgtgttctgcatggtttggatctgaattaattgtcctttcttctaaatcccaaccgaacttcttccaacctccaaactggctgtaaccccaaatccaagccattaactacacctgacagtagcaattgtctgattaatcactggccccttgaagacagcagaatgtccctttgcaatgaggaggagatctgggctgggcgggccagctggggaagcatttgactatctggaacttgtgtgtgcctcctcaggtatggcagtgactcacctggttttaataaaacaaccaagcaacccctaggggttgcttggttgagtagagctgcctctcagaggcagcatgagctgagagggtgataggaaggcggcgctagacagcatggaggactttctgctctccaatgggtaccagctgggcaagaccattggggaagggacctactcaaaagtcaaagaagcattttccaaaaaacaccaaagaaaagtggcaattaaagttatagacaagatgggagggccagaaggtgagccggggcccctttggagggaaggagggaggactggctgaggtgggtgggtgcttcctcctgtttgttagaacgatcattcgatcattctgctcccgctggcctgaaccaacaaccctggtccacgagttcgattcac

SEQ ID NO: 23341 - DNA, 1189 bp, Homo sapiens; identical to SEQ ID NO: 22380
  misc_feature 1, 2, 1183, 1184, 1185, 1186, 1187, 1188, 1189: n = A,T,C or G

SEQ ID NO: 23342 - DNA, 1002 bp, Homo sapiens; identical to SEQ ID NO: 22660
  misc_feature 1, 2, 983, 984, 985, 986, 987, 988, 989, 990, 991, 992, 993,994, 995, 996, 997, 998, 999, 1000, 1001, 1002: n = A,T,C or G

SEQ ID NO: 23343 - DNA, 1195 bp, Homo sapiens
  misc_feature 1187, 1188, 1189, 1190, 1191, 1192, 1193, 1194, 1195: n = A,T,C or G
agggagtcgacccacgcgtccgctgatgaagaggaagaagtcaagccgatcttgcagaaattgcaggaactcgtggatcagctctactcatttcgagactgctatttcgagacacatagtgttgaggatgctgggaggaagcaacaggatgtgcggaaggagatggagaaaaccctacagcagatggaagaagtagtgggttctgtccagggcaaggcacaagttctaatgctaactgggaaagcactaaatgtgactcctgactatagccctaaggctgaggagcttctgtcaaaggctgtgaagctggagcccgagctggtggaagcctggaaccagctgggtgaggtgtactggaaaaaaggggatgttgcagctgcccacacctgcttctcaggagccctcacccattgcaggaacaaagtctccttgcaaaacctgtcaatggtgcttcgtcagctgcggactgacactgaagatgaacattctcaccatgtcatggacagtgtccgacaggctaagttggctgttcagatggatgtccatgatggccgctcctggtatattcttgggaattcatatctttccctttacttctctactggccagaaccctaagatctcccagcaagccctcagtgcctatgcccaagcagagaaagttgacagaaaagcttctagcaatcctgaccttcatctgaacagggcgacgttgcataaatatgaagagagttatggggaggccctggagggcttctctcgggctgcagccctggaccctgcctggccagagccccggcaacgagagcaacaacttctggaattcctggatagattaaccagcctccttgagagtaagggaaaggtgaagaccaaaaagctgcagagcatgctgggaaagctttgggccagcccaatctagccttgcaaggatgggcactatcagtcaagctctgtgcgaagttgacctggagctcaagccatgagtacgctcacgccggggtgaaacggggtgccgctccggaagggggattactcacaaaaagaaaatccttattggcggaatcaaatgactgttaccggaggtggccatatgcgaagggcgagcgcgtctggatctgctctggccgggggcgcgaggagagagatgtctctgtaggccctaggtgagtcacagtgttcataagnnnnnnnnn

SEQ ID NO: 23344 - DNA, 1621 bp, Homo sapiens; identical to SEQ ID NO: 22561

SEQ ID NO: 23345 - DNA, 2961 bp, Homo sapiens
  misc_feature 1, 2, 2960, 2961: n = A,T,C or G
nnggcgaagaggcctggcgctgccgctcccgcgcatgctccctgacttcaccaaggtcacgctgcagcccgcaggaatgaaaatccacttctccgcattttcgaggtgacctggaagcggttcaactgctctggcttctcagaagaggaggggaccgggcggtaacgaggagccaaggggaggagactgctcgcaaaaccccggaaaagctttcccgatccactctgccagcctccgtgcgcctccagacatgcgcagtagcctcccccgcggtggcggcggcggcggcggtggctgccgtggcggctgagagtccagagccggacgttccggccgcttcgggctggcggctggagagcgctcgggtcatgtctgcccagggggactgcgagttcctggtgcagcgagcccgggagttggtgccgcaagacctgtgggcagccaaggcgtggctgatcacggcccgcagcctctacccggcagactttaacatccagtatgagatgtacaccatcgagcggaatgcagagcggaccgccaccgccgggaggctgctgtacgacatgtttgtgaatttcccagaccagccggtggtgtggagagaaatcagcattattacatcagcattaaggaacgattcacaggacaaacaaacccaatttttaagaagtttatttgaaactcttcctggtcgagtccagtgtgaaatgttactaaaggtcacggaacaatgcttcaacacgttagaacgatcagaaatgttgcttctacttttgaggcgcttccctgaaacggtggtgcagcatggggttggccttggggaggcactattagaggctgaaactattgaagaacaagaatctccagtgaactgctttagaaaattatttgtttgtgatgtccttcctctaataattaacaaccatgatgttcgattacctgccaatttattgtataagtacttgaacaaagcagctgaattttatatcaattatgtcactaggtctactcaaatagaaaatcagcatcaaggcgcccaggatacatctgatttaatgtcacctagcaaacgtagctctcagaagtacataatagaagggctgacggaaaaatcatcccagatcgtggacccttgggagaggttgtttaagattttgaatgttgttggaatgagatgtgaatggcagatggataaaggaagacgaagctatggagatattttgcatagaatgaaggatctctgcagatacatgaacaactttgatagtgaagcacatgcaaaatataaaaaccaagtggtgtattccaccatgctggtcttctttaagaatgcattccagtatgtcaacagcatacagccatctctcttccaaggtcctaatgccccgagccaagttccactggttcttcttgaagatgtatcgaatgtgtatggtgatgtagaaattgatcgtaataaacacatccataaaaagaggaaactagctgaaggaagagaaaaaaccatgagttcagacgatgaagactgttcggcgaaaggaagaaatcgtcacattgtagtcaataaagccgaacttgctaactccactgaagtgttagaaagctttaaattggccagggagagctgggagttgctctattccctagaattccttgacaaagaatttacaaggatttgcttggcctggaagacggatacttggctttggttaagaatcttcctcactgatatgatcatctatcagggtcaatataaaaaggcgatagccagcctgcatcacttagcagctctccagggatccatttctcagccacagatcacagggcaggggaccctggagcatcagagggcgctcatccagctggcgacgtgccactttgcgctaggggagtacagaatgacatgtgaaaaagtccttgatttgatgtgctacatggtactccccattcaagatggaggcaaatcccaggaggaaccctcgaaagtaaagcccaaatttagaaaaggttcggatctgaagctcctgccttgtaccagcaaggctatcatgccatactgcctccatttaatgttagcctgttttaagcttagagctttcacagacaacagagacgacatggcattggggcatgtgattgtgttgcttcagcaagagtggccacggggcgagaatcttttcctgaaagctgtcaataaaatttgccaacaaggaaatttccaatatgagaattttttcaattacgttacaaatattgatatgctggaggaatttgcctacttgagaactcaggaaggtgggaaaattcatctggaattactacccaatcaaggaatgctgatcaagcaccacactgtaactcgaggcatcaccaaaggcgtgaaggaggactttcgcctggccatggagcgccaggtctcccgctgtggagagaatctgatggtggttctgcacaggttctgcattaatgagaagatcttgctccttcagactctgacctgagtggagacctttccaccagacacagctcgggcctgtgtaattgtaggagaagacactcagcagtgattgccatggcacagagccgtggtcattgttgctgttacaaagaagaaaaccatctgagttctaactccttggttgcttaaaagtagttcccaagagtctgagaagctatttctatttttaagagtcattttttgtaatttttgtaaaacaaaagtaccaatctgttttgtaaataaaaatcatcctaaaatttgaagacaaaagaaaccaaaaaacaaaaaaacatgtcggccgcctcggcccagtcgactctagactcgagcaagcttatgcatgcggccgcaattcgagctcacttggccaattcgccctatagtgagtcgtattacaattcactgggccgcgttttacaacgtcgtgactgggctggcgtatagcgaagaggcccgaccnn

SEQ ID NO: 23346 - DNA, 2597 bp, Homo sapiens
  misc_feature 1, 2597: n = A,T,C or G
nacgctagcgccgcccaggctggcacaaaggaggaggcctagtcccgcccctgcgtgcggcgcttctcccaggccccaccttccatccagtgccctggaccctcggctgggtagcgccaccagagcgaccaaacgtcccgcgccttccaggccgcactccagagccaaaagagctccatggcggcggcggccaagcccaacaacctttccctggtggtgcacggaccgggggacttgcgcctggagaactatcctatccctgaaccaggcccaaatgaggtcttgctgaggatgcattctgttggaatctgtggctcagatgtccactactgggagtatggtcgaattgggaattttattgtgaaaaagcccatggtgctgggacatgaagcttcgggaacagtcgaaaaagtgggatcatcggtaaagcacctaaaaccaggtgatcgtgttgccatcgagcctggtgctccccgagaaaatgatgaattctgcaagatgggccgatacaatctgtcaccttccatcttcttctgtgccacgccccccgatgacgggaacctctgccggttctataagcacaatgcagccttttgttacaagcttcctgacaatgtcacctttgaggaaggcgccctgatcgagccactttctgtggggatccatgcctgcaggagaggcggagttaccctgggacacaaggtccttgtgtgtggagctgggccaatcgggatggtcactttgctcgtggccaaagcaatgggagcagctcaagtagtggtgactgatctgtctgctacccgattgtccaaagccaaggagattggggctgatttagtcctccagatctccaaggagagccctcaggaaatcgccaggaaagtagaaggtcagctggggtgcaagccggaagtcaccatcgagtgcacgggggcagaggcctccatccaggcgggcatctacgccactcgctctggtgggaccctcgtgcttgtggggctgggctctgagatgaccaccgtacccctactgcatgcagccatccgggaggtggatatcaagggcgtgtttcgatactgcaacacgtggccagtggcgatttcgatgcttgcgtccaagtctgtgaatgtaaaacccctcgtcacccataggtttcctctggagaaagctctggaggcctttgaaacatttaaaaagggattggggttgaaaatcatgctcaagtgtgaccccagtgaccagaatccctgatgttaatgggctctgccctcatccccacagtcttgggatctcagggcacaatggctggacatgggtgggctctgatgcagaactttctcttttgaatgttaagaataactaatacaattcattgtgaacagaagtccttaagcagaggaattggtgtgccttaaagatacaatctgggatagtttgggggaacttgtagccagaatgccctgttcatgctgagcaaagttcagcaagtagagcagagtttggcaggcaggtgccaggaactccccttcttcctggagtgccttcattgaggaaggaaatctggcccttgggtttcctggttccactgctactgacccagaggggaatgagggctgagttatgaaaagataacttcatgaagacttaactggcccagaagctgattttcatgaaaatctgccactcagggtctgggatgaaggcttgtcagcacttccagtttagaacgcaatgtttctagagacatattggctgtttgttttgatgataaaaggagaataagaaaaggcatcactttcctggatccaggataatttttaaaccaatcaaatgaaaaaaacaaacaaacaaaaaaggaaatgtcatgtgaggttaaaccagtttgcattcccctaatgtggaaaaagtaagaggactactcagcactgtttgaagattgcctcttctacagcttctgagaattgtgttatttcacttgccaagtgaaggaccccctccccaacatgccccaccccacccctaagtacggtcccttgtcaccaggcaaccaggaaactgctacttgtggacctcaccagagaccaggagggtttggttagctcacaggacttcccccaccccagaagattagcatcccatactagactcatactcaactcaactaggctcatactcaattgatggttattagacaattccatttctttctggttattataaacagaaaatctttcctcttctcattaccagtaaaggctcttggtatctttctgttggaatgatttctatgaacttgtcttattttaatggtgggttttttttctggtaagatttggacctaaatcgcatcatgccaacttgtgactttgagactattcatcagatgagtatgtgcatcatcgtggctaccttatcttattgcatgtgaagtagttagagctgttctgactggacgttccttggcggggttgttggggggggatgtgtgtgaaaaatattcggccgttgggggttccggccgctgcatggcatcctacgcctcgtgggggcccctttgagcgcgcggtggcccgtcttctcggtccaaggccgcgccn

SEQ ID NO: 23347 - DNA, 1603 bp, Homo sapiens
agtcgacccacgcgtccggaagaaaatctcatttgaaaagcccagaactattctgttacacagaagaccaggaaagagaagtttaaaaccaagtctaagaaaagtccccagggtcacacagttcataagcgacagagccaggattccagcacctggtctgaatgacccagaagccaggacttttcccccgcacctctacatcaggcgtgctggagcaggaagcggggagcagtggtgtgtgagagccaggcgtccctctgcctgcccactcagtggcaacacccgggagctgttttgtcctttgtggagcctcagcagttccctctttcagaactcactaccaagagccctgaacaggagccaccatgcagtgcttcagcttcattaagaccatgatgatcctcttcaatttgctcatctttctgtgtggtgcagccctgttggcagtgggcatctgggtgtcaatcgatggggcatcctttctgaagatcttcgggccactgtcgtccagtgccatgcagtttgtcaacgtgggctacttcctcatcgcagccggcgttgtggtctttgctcttggtttcctgggctgctatggtgctaagactgagagcaagtgtgccctcgtgacgttcttcttcatcctcctcctcatcttcattgctgaggttgcagctgctgtggtcgccttggtgtacaccacaatggctgagcacttcctgacgttgctggtagtgcctgccatcaagaaagattatggttcccaggaagacttcactcaagtgtggaacaccaccatgaaagggctcaagtgctgtggcttcaccaactatacggattttgaggactcaccctacttcaaagagaacagtgcctttcccccattctgttgcaatgacaacgtcaccaacacagccaatgaaacctgcaccaagcaaaaggctcacgaccaaaaagtagagggttgcttcaatcagcttttgtatgacatccgaactaatgcagtcaccgtgggtggtgtggcagctggaattgggggcctcgagctggctgccatgattgtgtccatgtatctgtactgcaatctacaataagtccacttctgcctctgccactactgctgccacatgggaactgtgaagaggcaccctggcaagcagcagtgattgggggaggggacaggatctaacaatgtcacttgggccagaatggacctgccctttctgctccagacttggggctagatagggaccactccttttaggcgatgcctgactttccttccattggtgggtggatgggtggggggcattccagagcctctaaggtagccagttctgttgcccattcccccagtctattaaacccttgatatgccccctaggcctagtggtgatcccagtgctctactgggggatgagagaaaggcattttatagcctgggcataagtgaaatcagcagagcctctgggtggatgtgtagaaggcacttcaaaatgcataaacctgttacaatgttaaaaaaaaaaaaaaaaaaaaaaaaaaaaaaaaaaaaaaaaaaaaaaaaaaaaaaaaaaaaaaaaaaaaagaaaagaaaaaaaaaaaa

SEQ ID NO: 23348 - DNA, 3918 bp, Homo sapiens; identical to SEQ ID NO: 22949
  misc_feature 3915, 3916, 3917, 3918: n = A,T,C or G

SEQ ID NO: 23349 - DNA, 526 bp, Homo sapiens
  misc_feature 1, 2, 3, 4, 525, 526: n = A,T,C or G
nnnnagcccacctgctatgagtacatggttcgaagccactatgtaacagaaacactctctgaagaagaggctgggttccctttagcttacacagtgaccatccacaaagacttcggcacttttgagaggcccttcagggcgatttatgtgccccaaaatgtctactgtgtgcacctggatcagaaggcgacggatgcctttaaaggtgcagtgaaacagttactcagctgcttcccaaatgcttttctggcttccaagaaggagtcggttgtctatggggggatctccaagctccaggctgacctgaactgcctggaagaccttgtggcctctgaagttccctggaagtatgtcatcaacacctgcgggcaagactttcccctgaaaaccaacagggaaatagttcagtatctgaagggatttaaagggaaaaatatcacccccggagtgctgcctcctgaccacgctgttggacggactaaatacgtccaccaagaactgttaaccacataattcctacgtgann

SEQ ID NO: 23350 - DNA, 871 bp, Homo sapiens
ctgtttcctgtgtgttatacaacggccagtaacactgggccatcgctgttccttgtgatgaaaaaaaccacaattcgcccttctagcggccgtccgggcaggtacagtcatggatgggcacactgtgggggtgtcctggtgcacccccagtgggtgctcacagctgcccattgcctaaagaagaatagccaggtctggctgggtcggcacaacctgtttgagcctgaagacacaggccagagggtccctgtcagccacagcttcccacacccgctctacaatatgagccttctgaagcatcaaagccttagactagatgaagactccagccatgacctcatgctgctccgcctgtcagagcctgccaagatcacagatgttgtgaaggtcctgggcctgcccacccaggagccagcactggggaccacctgctacgccccaggctggggcagcatcgaaccagaggagtgagtcttcagtgtgtgagcctccatctcctgtccaatgacatgtgtgctagagcttactctgagaaggtgacagagttcatgttgtgtgctgggctctggacaggtggtaaagacacttgtggggtgagtcatccctactcccaacatctggaggggaaagcataattcacccattcctgtgttgagcacatgcttactgggcacctgctacgtgaccagcattgccgtagaccctgggaagcagcagtgaacagtcaggagctgtggatggtgctggacagaaaaatgacagggcctggctcagggtgattctgggggtccacttgtctgtaatggtgtgcttcaaggtatcacatcatggggccctgagccatgtgccctgccttgaaaagcctgctgtg

SEQ ID NO: 23351 - DNA, 370 bp, Homo sapiens
  misc_feature 1, 370: n = A,T,C or G
ngtagagatgctggcactctgaacccttgcattgctgaggatccaagaagacggtcacatttgctgaggacaaaggtcttttaggggttaagggatgccataatatgctgttgtaggtagaatgccaggtgtttcacaaaatctttgggtagaaacttttcccagtttatactttatatcaatttaggttgatatgcaactgtattcttgtttagcaaatagaagaagcttgaatttctagatttgttcgatccatatgtgcattctcagtccttggaaatcagcatggagccaggaggaccactacactctgaacatcagatcaatagcacagtggattagcctccaggaattctagtctcccccgcgn

SEQ ID NO: 23352 - DNA, 2071 bp, Homo sapiens; identical to SEQ ID NO: 21824

SEQ ID NO: 23353 - DNA, 1318 bp, Homo sapiens
  misc_feature 1314, 1315, 1316, 1317, 1318: n = A,T,C or G
gggctcgggctggcgggtcgcgggttccttatcctccgccttggcgcctctccgcccaccgcccaccgcccctccctggcattggttggccccggggagccgaggctccatcctttctgcgcaggttcccgccgcactcgcgcaggactcgcgcagacctagcgcgtccaggtgggaggttagtgtggcccgggcgtccgctcctcagcggatgtggcagccccgagccatggctctcgccgtccgagtcgtttattgtggcgcttgaggctacaagtccaagtatcttcagctcaagaagaagttagaagatgagttccccggccgcctggacatctgcggcgagggaactccccaggccaccgggttctttgaagtgatggtagccgggaagttgattcactctaagaagaaaggcgatggctacgtggacacagaaagcaagtttctgaagttggtggccgccatcaaagccgccttggctcagggctaatgcgccctgaaggcagagtccagggaccttgacccagcccctctcagcagacgcttcatgataggaaggactgaaaagtcttgtggacacctggtctttccctgatgttctcgtggctgctgttgggggcagagattgacgcccccggtctttgcctctgagcgggagagtctgtgtgtatgtgtcttccccggaatccacaccacccaaccagtgactcccgggtgcccgatggcacaccatcaatacatgtcctggtgggatataccccaaatgtaatacccaacaagctaggaaccacacatggaagatctgcagcagcgcaaatcaccgggcatacaggatcccaacaaccacgaaggacagccaagcgaaaccgcccatcacagcctagcgcgcgacgctacgccctgactatgagggcaacgcatgcgcaacccgctatccgccccgccacctacacgatagcgctgcgaattagcccagacgcagtacagcacccgccaccacaccggcggccgcgaactcatcagagccccgcacaagggcccaccgatcgcgagcagaacagacaggcacacaagcgcgccgcctcaaggtgccgcctcttcaactcgacccatcgtaggtgacttctgaaccttaaccgcgaccccgccacgcggcctccgcgcgcgcgccgtatctggggcgtgcgcaaaagcgcccacgcagcggcatcagccttaggcgtcagcgtctcggcgacgcgcacccggacccgacgcagtcgcgcgattaagaatcacggccgagcgtccgtcagacggcgcggcccagcnnnnn

SEQ ID NO: 23354 - DNA, 834 bp, Homo sapiens
  misc_feature 1, 2, 3, 757, 762, 772, 787, 801, 809, 815, 824, 833, 834: n = A,T,C or G
nnncggcaccaggggcaggacctggccgcgtttcccgcagaaaaggaaagcgaatggaaaggctcattctacttcatcctgggcgcagaccacgagtttgggctgatcaaggcctggtccactggggactgtgacaatggcggtgacgaatgggaacaggagatccgtctaactgagcaagccgtccagccatcaacaagctgaaccccaaacccaaattcttcgttctgtgcggcgacctcatccacgccatgccaggtgtcagagtcgtgttctcaggccactaccacaggaatgccgggggtacctaccagaacctcgacatggtggtgtcatctgccattggatgccagctgggcagagacccccacgggctccgagtcgtggtggtcaccgccgagaaaattgttcacatccacattctggctgtgtagccactccacagatgggtggtctcttgggatcagaatgcccctccactcatgagactcttcattttgtccactttgacaggaaaagtgggaatgtatgcagagctctcaaaagaaacaaaaaaggccaaaacggtgccttcagccacatcctctgaattggccctgacttgggactaaatgcactaatgcaaaatcccttgacaaaagcgcatagggtatttcaaaccagcattgttttttatgtaacctggtttaccgcatcttctcaggcagcttctgaccacttgctcaatttttcttccttttacagccatgttcttggnggggncaaattaccncgggggacttccaantcgggggggggggnaaattttncaggcnttttttggnaacaggcann

SEQ ID NO: 23355 - DNA, 1160 bp, Homo sapiens; identical to SEQ ID NO: 22252
  misc_feature 1, 2, 1154, 1155, 1156, 1157, 1158, 1159, 1160: n = A,T,C or G

SEQ ID NO: 23356 - DNA, 1101 bp, Homo sapiens
gggattagagccactacatagaatagtctcttacagattttcataaatactagtcacaataagggtatttttcttgggggtggagtaagggggagactgatgctagtccttgttgtattttgttgggctgtccttgtgtattttcaccccagcctgtagtcctcctcacttcaaccccagggatttgtggggagcaagggtagccaatggcagagggggttggggctgggactctggaggctcctccccttctttctcttccttctgcctcccccgtgcccccagctgctcttgtcactgtctctgatgggtatttgcctggctttgttgcttctctatctgtatttagctgcagtgatcctttagctggttggctcagaaaaaaaaaaaatgtgctttaggtgccctgtaatcctgggcatcaagggaatccatccttcccctttttgatatgttctccccgtacttccagatttattgttatggctcccagtgggtattggcgattcttgtgatgcagggcctcagtcagtgtccagccatgcataagggagaggatagtgtgtacctgccctgccctctgctatgaaggtctctgccttgtggatcatgggactccccttggaggatctgtgcaaaggggggctgggcacaaaggagaatgtcctatttgggagggcaggaagcaaaggaactggacagggattggtgggcttggggaacggaagtttatcttggatacccttgaagaggctgggtctcttcacatgaagatcgaaaagggaccctgcttccaatttccctcttccattcctcgagctactccagggcttagaagaatgctcttggtctgtgggtccagtgttgtctgtcatccatttaagtgttcccactttcaagtgacaatcctctccttggccctgccatagggcagagcatgtctggcatagcagcctgacttttatgccctaatcttgagttgaggaaatatatgcacaggagtcaaagagatgtctttatatctgactgtatataaatgaagtttttttgttttttttgttttcctttttggtgcaataaagtttgttttgacaaaaaaaa

SEQ ID NO: 23357 - DNA, 781 bp, Homo sapiens; identical to SEQ ID NO: 22348
  misc_feature 1, 2, 779, 780, 781: n = A,T,C or G

SEQ ID NO: 23358 - DNA, 3983 bp, Homo sapiens; identical to SEQ ID NO: 21101

SEQ ID NO: 23359 - DNA, 663 bp, Homo sapiens
  misc_feature 1, 2, 3, 4, 7, 13, 55: n = A,T,C or G
nnnncgngcacgngggcgagggcacctgtaatcccagctactagggaggctgagncagaattgcttgaacccaggaggcagaggatgcagtgagccgagatcgcactattgcactccagcctgggcaacaagagcaagactccatctcaaacaacaacaaaaacccaaaaggggacagcagtagtgggagaggccagcatctgtacaccccatcagggtccccgctgtgtgtgcccctcaggcggccaccagccctaccaggtcctcccctcccggcacgtcttcgccttgatcgtgttctcctgcatctatggtgagggctacagcaatgcccacgagtctaagcagatgtactgcgtgttcaaccgcaacgaggatgcctgccgctatggcagtgccatcggggtgctggccttcctggcctcggccttcttcttggtggtcgacgcgtatttcccccagatcagcaacgccactgaccgcaagtactgagttgacgccccaggagctgagcaccaggctttgcatccttgggaactcagcaaacgtttgctcagccaattgcaggtagcatggcccagggcttgattgaggtggagcgaaagttccttccagggcctggcacagaggagcggctgcaggagttggggggcaccctggagt

SEQ ID NO: 23360 - DNA, 1073 bp, Homo sapiens
  misc_feature 1, 2, 1051, 1052, 1053, 1054, 1055, 1056, 1057, 1058, 1059,1060, 1061, 1062, 1063, 1064, 1065, 1066, 1067, 1068, 1069,1070, 1071, 1072, 1073: n = A,T,C or G
nngcaggtcacgcgtccgccagagtcgggccgcaggaggtgtcggtgccgagcggggttttttttttctgcgggttgccttttgtttttcctttggaaccgcggttgttcaaaagcttgacggaacttggaaggggactcccactctcctccctctttccgccgagtttgtgactccgagatggacaaagtgtgtgctgtttttggaggctcccgaggcattggcagagctgtggcccagttaatggcccggaaaggctaccgactggcggtcattgccagaaacctggaaggggccaaagccgccgccggtgacctcggcggagatcatttggcatttagctgtgatgttgctaaagaacatgatgttcaaaatacatttgaagagatggagaaacatttaggtcgagtaaatttcttggtaaatgcagctggtattaacagggatggtcttttagtaagaacaaaaactgaagatatggtatctcagcttcatactaacctcttgggttccatgctgacctgtaaagctgccatgaggactatgattcaacaacagggagggtctattgttaatgtaggaagcattgttggcttaaaaggcaactctggccagtccgtttacagtgccagtaaaggaggattagttggattttcacgtgctcttgctaaagaggtagcaagaaagaaaattagagtgaatgtagttgcaccaggatttgtacacacagatatgacgaaagacttgaaagaagaacatttaaagaaaaatattcctcttgggaggtttggagaaactattgaggtggcacatgcggttgtgtttcttttagaatcaccgtatattacagggcatgttctggtagtggatgggggattacaactcattttgtaatttgcagattattcagttataggggtgattagcatcaagggcacactttggctactgattagacaattatacctacatgggtaacatgtgctaatcaaacctgctgatgctacaaatgttaatttctgtctttataaaaatatgtctcaaaagaaannnnnnnnnnnnnnnnnnnnnnn

SEQ ID NO: 23361 - DNA, 657 bp, Homo sapiens
  misc_feature 657: n = A,T,C or G
agcagcaggaagaagacggaccccgcgatgagggcggcggcaaggagcaccttcatgttgcgttcggagaggcgcagcatccacaggccccccgtacttcggccgcttttcctctccgtgaggacagggcagtcttggtgtgcagcccctctcctctctgtcccctgacactccacagtgtgcctgcaacccaagtgggccttatccgtgcagtggtggcagttcagaaataaagggcccatttgtcaaaaaaaaaaaaaaaaaaaaaaaaaaaaatttgtgtgggggggcgcgggcccccggagagaaagacttttttagagaaccttgtgtgttgggggggggggccccccaacaggttgctaggtggaaacgctgggcacaacaggcgaggtgtcccccggagtggaaacccggggggccagagcaccaagcgggcgcggggcaatctctcacacccaatataaaacaagacgcgccgcgggggggacaaaaccagcaagggcgcttcgctgaaaaacaatatccccaaggagggagacatcgcggaaaggaccaaaaaagagggggactctctactccaacagagggaggagcctcaccaggcagcagagcacccgaatactcccaaatataacgcccccacgaggtgggaan

SEQ ID NO: 23362 - DNA, 461 bp, Homo sapiens; identical to SEQ ID NO: 22262

SEQ ID NO: 23363 - DNA, 1103 bp, Homo sapiens
  misc_feature 955, 992, 1001, 1054, 1063, 1071, 1098, 1100, 1101, 1102,1103: n = A,T,C or G
acacttttcaccccacttcctctgccatcttggtcctgctgtcctgaggagctacctgtgcaccctgcctccggctctcctgagcagagagatcctgatggctgactcagaagcactcccctcccttgctggggacccagtggctgtggaagccttgctccgggccgtgtttggggttgttggggatgaggccattcagaaaggaaccagtgtctcccagaaggtctgtgagtggaaggagcctgaggagctgaagcagctgctggatttggagctgcggagccagggcgagtcacagaagcagatcctggagcggtgtcgggctgtgattcgctacagtgtcaagactggtcaccctcggttcttcaaccagctcttctctgggttggatccccatgctctggccgggcgcattatcactgagagcctcaacaccagccagtacacatatgaaatcgcccccgtgtttgtgctcatggaagaggaggtgctgaggaaactgcgggccctggtgggctggagctctggggacggaatcttctgccctggtggctccatctccaacatgtatgctgtaaatctggcccgctatcagcgctacccggattgcaagcagaggggcctccgcacactgccgccctggccctattcacatcgaaggagtgtcactactccatccagaagggagctgcgcttctgggacttggcaccgacagtgtccgagtggtcaaggctgatgagagagggtggtccccgaggatctggagaggcagattggtatggccgaggctgagggtgctgtgccgttcctggccagtgccacctctggcaccactgtgctaggggcctttgaccccctggaggcaattgctgatgtgtgccagccgtcatgggctatggctgcatgtggatggctgactctgtggcctggaatcccacaagcttctagcagcangcctgcaatgctctgcacttcttcttcaggatacctngaactgctnaagccttgccatgggtccaagccagctaccttttcaagcaggacaagtctacnatgtggctntggacacnggagacaaggtggtctgtggcccgccngnnnn

SEQ ID NO: 23364 - DNA, 443 bp, Homo sapiens
caagcgccatggccgctgccgcccgagcccgggtcgcgtacttgctgaggcaactgcaacgcgcagcatggctgtttcaaatattagatatggagcagcagttacaaaggaagtaggaatggacctaaaaaacatgggtgctaaaaatgtgtgcttgatgacagacaagaacctctccaagctccctcctgtgcaagtagctatggattccctagtgaagaatggcatcccctttacggtttatgataatgtgagagtggaaccaacggattcaagcttcatggaagctattgagtttgcccaaaagggagcttttgatgcctatgttgctgtcggtggtggctctaccatggacacctgtaaggctgctaatctgtatgcatccagccctcattctgatttcctagattatgtcagtgcccccattggcaagggaaagcctg

SEQ ID NO: 23365 - DNA, 944 bp, Homo sapiens
  misc_feature 940, 941, 942, 943, 944: n = A,T,C or G
acgcggggggagtccttgcagggtggcctgggtgactgctcaccagcccggccctccccagggttctgggccagagcctccctggccgttggagcgggagctgtgggtggaacacttctgaatgggagatgcctcggacctccagacgccgaacatctcagcacatcccgctctgggctttaaacgtgacccctcgcctcgactcggccctgccctgtgaaaatgttggtgcttcttgctttcatcatcgccttccacatcacctctgcagccttgctgttcattgccaccgtcgacaatgcctggtgggtaggagatgagttttttgcagatgtctggagaatatgtaccaacaacacgaatggcacagtcatcaatgacagctttcaagagtactccacgctgcaggcggtccaggccaccatgatcctctccaccattctctgctgcatcgccttcttcatcttcgtgctccagctcttccgcctgaagcagggagagaggttgtcctaacctccatcatccagctaatgtcatgtctgtgtgtcatgattgcggctccatttatacagacaggcgtgaagacattcacgacaaaaacgcgaattctatccgtgacagagaaggcagtaggctactcctacatccgggtgggtggcttcgctggccccttcatcagggagagtacccgatatggggagggcaatagagtccggagcgggtgatcgcgaggacgaatcacatcagataccatgggattaaacataatgggggcgtcagcaagtatgtcttaagcaacaaagacaacgaaagagggaggaaaaccgggaaaaaaaaaaaagtgcgcgccacaattaaaacggggggccaggagaggcagcaacgcgggtggcacaaacggcagtaaggggtgaacggaacccaccacgacgacaccacnnnnn

SEQ ID NO: 23366 - DNA, 343 bp, Homo sapiens
acgaagattttattattcataaaaacactagtttatgctttgggaagagcagagcagaggttcagataacaacaaatgctctttaaggatgtaaaatgtgaactttgttcacagacctcagtgatgtgagcactgttgcttaggagtaacaagttgctaaaatgcagaagggatgggtagtgtttcttgcttctcatgatgaatgtttctgtatgttagtgacttgctgggtaactagtaaggtacgaaccatcctgaagctccgggtgtcccgggttgtaaccaagctttcctattccctccggcgcgcggctccaagctctccaaggaactgcccccgcgt

SEQ ID NO: 23367 - DNA, 4204 bp, Homo sapiens
  misc_feature 1, 4042, 4197, 4198, 4199, 4200, 4201, 4202, 4203, 4204: n = A,T,C or G
ncgtccggcggctgcggcgacagggaccccgtcgggggcagcaggagccctggtgcatcccaggccccggggggaaggccgggccgtcggaggagcggaggagcccgggggggctcccgggaagccgcgggcggacgggggaggagcccgggcggagctgcgggcgggcggcccgctaggggtgaatcgggtggagtagtggtcgggtccggttacttccctttaaaaagacgggaaaggaggagtccagtgctggaggggcagggacggcggcggcgcagctcggaacccgccagggtccagggtccaggttccagcgcccggcggcccagcaggcaccccccgagcccagctccacacaccgttcctggatctcctctccccaggcggagcgtgcccctgcccagtccagtgaccttcgcctgttggagccctggttaatttttgcccagtctgcctgttgtggggctcctcccctttggggatataagcccggcctggggctgctccgttctctgcctggcctgaggctccctgagccgcctccccaccatcaccatggccaagggcttctatatttccaagtccctgggcatcctggggatcctcctgggcgtggcagccgtgtgcacaatcatcgcactgtcagtggtgtactcccaggagaagaacaagaacgccaacagctcccccgtggcctccaccaccccgtccgcctcagccaccaccaaccccgcctcggccaccaccttggaccaaagtaaagcgtggaatcgttaccgcctccccaacacgctgaaacccgattcctaccaggtgacgctgagaccgtacctcacccccaatgacaggggcctgtacgtttttaagggctccagcaccgtccgtttcacctgcaaggaggccactgacgtcatcatcatccacagcaagaagctcaactacaccctcagccaggggcacagggtggtcctgcgtggtgtgggaggctcccagccccccgacattgacaagactgagctggtggagcccaccgagtacctggtggtgcacctcaagggctccctggtgaaggacagccagtatgagatggacagcgagttcgagggggagttggcagatgacctggcgggcttctaccgcagcgagtacatggagggcaatgtcagaaaggtggtggccactacacagatgcaggctgcagatgcccggaagtccttcccatgcttcgatgagccggccatgaaggccgagttcaacatcacgcttatccaccccaaggacctgacagccctgtccaacatgcttcccaaaggtcccagcaccccacttccagaagaccccaactggaatgtcactgagttccacaccacgcccaagatgtccacgtacttgctggccttcattgtcagtgagttcgactacgtggagaagcaggcatccaatggtgtcttgatccggatctgggcccggcccagtgccattgcggcgggccacggcgattatgccctgaacgtgacgggccccatccttaacttctttgctggtcattatgacacaccctacccactcccaaaatcagaccagattggcctgccagacttcaacgccggcgccatggagaactggggactggtgacctaccgggagaactccctgctgttcgaccccctgtcctcctccagcagcaacaaggagcgggtggtcactgtgattgctcatgagctggcccaccagtggttcgggaacctggtgaccatagagtggtggaatgacctgtggctgaacgagggcttcgcctcctacgtggagtacctgggtgctgactatgcggagcccacctggaacttgaaagacctcatggtgctgaatgatgtgtaccgcgtgatggcagtggatgcactggcctcctcccacccgctgtccacacccgcctcggagatcaacacgccggcccagatcagtgagctgtttgacgccatctcctacagcaagggcgcctcagtcctcaggatgctctccagcttcctgtccgaggacgtattcaagcagggcctggcgtcctacctccacacctttgcctaccagaacaccatctacctgaacctgtgggaccacctgcaggaggctgtgaacaaccggtccatccaactccccaccaccgtgcgggacatcatgaaccgctggaccctgcagatgggcttcccggtcatcacggtggataccagcacggggaccctttcccaggagcacttcctccttgaccccgattccaatgttacccgcccctcagaattcaactacgtgtggattgtgcccatcacatccatcagagatggcagacagcagcaggactactggctgatagatgtaagagcccagaacgatctcttcagcacatcaggcaatgagtgggtcctgctgaacctcaatgtgacgggctattaccgggtgaactacgacgaagagaactggaggaagattcagactcagctgcagagagaccactcggccatccctgtcatcaatcgggcacagatcattaatgacgccttcaacctggccagtgcccataaggtccctgtcactctggcgctgaacaacaccctcttcctgattgaagagagacagtacatgccctgggaggccgccctgagcagcctgagctacttcaagctcatgtttgaccgctccgaggtctatggccccatgaagaactacctgaagaagcaggtcacacccctcttcattcacttcagaaataataccaacaactggagggagatcccagaaaacctgatggaccagtacagcgaggttaatgccatcagcaccgcctgctccaacggagttccagagtgtgaggagatggtctctggccttttcaagcagtggatggagaaccccaataataacccgatccaccccaacctgcggtccaccgtctactgcaacgctatcgcccagggcggggaggaggagtgggacttcgcctgggagcagttccgaaatgccacactggtcaatgaggctgacaagctccgggcagccctggcctgcagcaaagagttgtggatcctgaacaggtacctgagctacaccctgaacccggacttaatccggaagcaggacgccacctctaccatcatcagcattaccaacaacgtcattgggcaaggtctggtctgggactttgtccagagcaactggaagaagctttttaacgattatggtggtggctcgttctccttctccaacctcatccaggcagtgacacgacgattctccaccgagtatgagctgcagcagctggagcagttcaagaaggacaacgaggaaacaggcttcggctcaggcacccgggccctggagcaagccctggagaagacgaaagccaacatcaagtgggtgaaggagaacaaggaggtggtgctccagtggttcacagaaaacagcaaatagtccccagcccttgaagtcacccggccccgatgcaaggtgcccacatgtgtccatcccagcggctggtgcagggcctccattcctggagcccgaggcaccagtgtcctcccctcaaggacaaagtctccagcccacgttctctctgcctgtgagccagtctagttcctgatgacccaggctgcctgagcacctcccagcccctgcccctcatgccaaccccgccctaggcctggcatggcacctgtcgcccagtgccctggggctgatctcagggaagcccagctccagggccagatgagcagaagctctcgatggacaatgaacggccttgctgggggccgccctgtaccctctttcacctttccctaaagaccctaaatctgaggaatcaacagggcagcagatctgtatatttttttctaagagaaaatgtaaataaaggatttctagatgaaaaaaacacaaccagcaggcgccgttctcctcgcatttctcaggcgaggaacctgagacaatgaggttaaggaagttgttcattacaagtggaagaaccctgacttacttgaattcaactttgaanggggggcccctttatttttttaaaaaaaaaacccccccccccccccccggggcgcgaaaaaaaaaaaaagggccccggggggggaaaaacctttttttgcccccttatgggggcccaaaaaaaaaggaaccccccaaaatttacaaaaaaaaacnnnnnnnn

SEQ ID NO: 23368 - DNA, 1607 bp, Homo sapiens
  misc_feature 1: n = A,T,C or G
ntagcagagagtatttcctgtctttactttctgagttaaccccttcaacccacaccattagcaggaataaagagacattttatagcccagttggaaaatataaagcagtcccacttctccagtagaattttagttgaattaaatcataagagaaacaatgattattgcacatattatacttgtcacactacatctgttgagtggaatttccattccaagtgttgttttcatcttcaccatcatcttgagtccttaatctataaattttcccctcctttttaaagtcgtctccacgtttttccagcactctttttctcactggttcccttttttctgatttgctagatgatgcagggtttgggggttctgacgatgttactctcactgaagtctgtgtgggaggcggattactaaacaagaaattgctaattaatctccagatggcaaggaatggataaagcactgttcccaacaaggtccaaatgtctccgctggaagagtgtacaatggatgcagttggtcttcctgctggcaacagtaccaccgaagcgcttggggcaagttccaaatccagtaacttctttttataatcttctttggtaaattccctcctgggaaacatggttgctaacgaaaaattaccgtaagtgttgccaacagtctgtgcagcaaactgccttgcctcttctagaggagcatcagaagggaactgatttgtaaaggaagaaccatcaggaagacggaattgaattcttgcaacagtgcttctttctcttgcataagattccctcttgacttccatttctgcctgttttgctagcaaggcagcagctttggcagcctctacttcttcctttgtctttgcaaaacgagcagctctctctgcacggtccaatgcaatctgctgttttatacgttctcgagctgccctatcttctgctttctctctgtttctttcctccagcattctttttgttaattcttcttcttgttttcttttataatccaacatttcttttccagtttttctcctctcaatttccttcttaatttctctctgttcttcctcttttcttttctcttctctcctttcttcaagtttttttgttagtctttccactcggatgttgaggtcctctgcaggtctctgatctgagcatccactaggctcctgagaggaagaacagagagaaattaagaaggaaattagagaggagtaaaaaaagacaccacaatgctttgacgatgccataattttgaggtccattccttcaagattacaaggatttccagagaaaaatactgcaaggtaatgagcggctgtctccacaggacaatattctgcctttcttcccgctccctcctcttcttttcattcactgaagaggggtctgtgaaatttccattatgatgttccttgttcattgctacacgtctctggtcacaattttttccattctctgccatttcatagatcagtaactcttgaggagccgctccgaccccggctgctccggatctcaggatcctggaagctgctccttacggactctcacacccgccgctgggctccagacaaccggaacccccccgcgcgcccgcccgcc

SEQ ID NO: 23369 - DNA, 3418 bp, Homo sapiens
  misc_feature 1, 2, 3, 4, 5, 6, 7: n = A,T,C or G
nnnnnnnacgcgtgggcggacgccgtggaaggcggacgcgtacgaggcctggacgcgtgggcgcggaatctcagttagcggtggagaggcagtatgtccggttcaatggcgactgcggaagctagcggcagcgatgggaaagggcaggaagtcgagacctcagtcacctattaccggttggaggaggtggcaaagcgcaactccttgaaggaactgtggcttgtgatccatgggcgagtctacgatgtcacccgcttcctcaacgagcaccctggaggagaagaggttctgctggaacaagctggtgtagatgcaagtgaaagctttgaagatgtaggacactcttctgatgccagagaaatgctaaagcagtactacatggtgatatccatccgagtgaccttaaacctgaaagtggtagcaaggacccttcaaaaaatgatacatgcaaaagttgctgggcatattggattttacccatcataggcgctgttctcttaggtttcctgtaccgctactacacatcggaaagcaaatcctcctgaggaggccttgctgaagttagaaagtgcatccactttggggcgaaaactagagacttgcttgggggctgcagaagtgccctctcctcgaatcctgccagttgcattcttcccccttggagccaagacgattggcagacatcacctcagatctgagaccagcgtcttccatctctcagagccttactcccaaagtacctgctcactgttccgtgttgaacaattgccggtgtttcctctcttcactggtttccatgagtacccttatatttcacaactttctgttcataagttatagtgacattgctctttggtaaaaatgcctgctttccaatactttgattgcatattagacattcttaacagggcggcagtctagtgttgaaagttttatttttccatttttcttttaagtaaattttttttaaaaaattctgatttagggctaggtgtggtggctcaggcctgtaatcctggcactttgggaggccaaggtgggaagatcgcttgaggccaagagttcaagaccagcctgggcaacatagcgagacccctatctgtattaaaaaaaaatctgatttaattcttttatttatcataaggggtttaattcctgaagtaaaggtttgcacctattaaacttaaaactgccaaatgatttttgttcttttatgtgcgtgataaaaatacaaagaatggtgtggccacctcctccctttcaagctagggcagcaggtagctcttcccagcccctgagcccagccccttcccaagtggtgccggacaaaaaactacatggccctttcgtgtcttgggggtggaaagggagggatgaattggggtgatagaaccctggtgaattcagagtaatctttctttagaaaactggtgttttctaaagaaacaggataggagtttagagaaggcaccaaagctttcactttggtttggcaccagtttctaaccatctgttttttctaccctagctatcttttattggtaaaatataaatgtataattatgtttgtagagctttaccaaggagtttccctccttttttgtttgttgattagcaaatttttgattctccattttccaaaagtaagagactccagcatggccttctgtttgccccgcagtaaagtaacttccatataaaatggtatttgaaagtgagagttcatgacaacagaccgttttccatttcatctgtattttatctccgtgactccaacttgtgggtttgttctgtttttccatgagaataaaatactggcggtttttttctcagatgtgtgttcattgagaagtaggttactagaattatgttactgtgtcttattggttcaatgatgatttctctggcatattagacttttattttttcccccatggaagcacttgaggaaataaatagtacactggctgttttctgccagcaactgtggtgatttttctccctgtcctttgagaattgctagtctgcttctgagccattgtcatatccagcagggagcagcttggttcaagaaggaccatagaggctgctcagcatctcctccctccctcccagcttgccagggatttgatgagacaggaaactgcccagcaaaccagggactgcccatgtaaactatttaagaaaaagttcaacccaggtcttgtatcctgtgatttagcagttgaatgaatacagaattcatcaaaataatattaaccttgtacttgcacacttggatatatttgggagtaattttaggagatttctggctgacttttattatcagggatatgggtttagtaaagcttttatctttagaaaaatgtttgtatgcattataagatgctacttttaagacaatattgaaaaaaactttggttattatttaacaaaagtggtatgacttgatgcttctctatttaaaggcaaggaaggattggtatatgattgcctgtaataaataaattgcgtgattattggagtacattggggtaaaagtaaagaacagaggagtattgaggagcttgaaagggaacattcaaactaaagccaagcctgaagataacttgaatcagttgtaaaagtgtgttggcaatgtccgaaattgaatgaaaaacatctggcttataagaaatgttaaagaactaccatcttaagtaaaattggtgtttttgttatttttaaggtaaatgccaatgcaaaaggtatgtttttctacttcacattggttttcttttcctgtttacatctgcacttgttttttgctgagagccagaggaaaagataattagactttgtctcttccacccatgaaatcccccagtacccagggcttcttctgaactactgccgatgtgatgtcactttgtatctggaaaatcactttggggtccatttactgttattttgttgcctacaaaaacagccaggtgaaagctaaatcttgtgtgagagtttgcagaggtttttctatacaataaagtagtatagcacactagccaaatccatccaaaaggaccttttttttaggaagtagacttgaattcacaaaacagtcttgacatgggtagctggtgaaaaaccctctggagagcaagtggagccagtccccattggctgacagtgccacctggagctggtctctggggtgttcggttgtttattcctgaggaagactagctgctgctgctgctgctgctgcaaactgtactgtacacatcatggctgctggacacgaaggaggaggtgagagaagtttcatgctaccgaaatagagggtgttggtaccactgcccctggcctgagagccagggtttaaacctgcctcagtagagtctagtttgaaatgacaccaaaattcctcagcccctactca

SEQ ID NO: 23370 - DNA, 2560 bp, Homo sapiens
  misc_feature 1, 2, 3, 4, 5, 6, 7, 2539, 2540, 2541, 2542, 2543, 2544,2545, 2546, 2547, 2548, 2549, 2550, 2551, 2552, 2553, 2554,2555, 2556, 2557, 2558, 2559, 2560: n = A,T,C or G
nnnnnnnacaagaaaacttatttggactaagtagcgaggcccgtggggtgtgttatacgtggtccggcgtggttcaggcgggtgtcttcggccgggcttgggaacataaaagtttgtttcaccacgtaagccggacctcgcactccggtcccggtctcgtcgccaagatggtgaagcccaagtacaaaggacggagcaccatcaacccgtccaaggccagcacaaacccagatcgagtgcagggagcaggaggccaaaacatgagggaccgggccaccatccggcgcctgaatatgtataggcaaaaggagcgcaggaacagtcgtggtaaaataattaaacccctgcaatatcaatcaacggtggcttctggcacagtggcaagagtagagccaaatattaaatggtttggaaacacacgtgtgattaagcagtcatcattacaaaaatttcaagaggaaatggatacagttatgaaggatccatacaaagttgtcatgaagcaaagcaagttaccaatgtctcttctccatgatcgaatccggcctcataacttgaaggtgcacattcttgatactgaaagttttgaaactacatttggccctaagtcacagaggaaacgaccaaacttatttgcaagtgatatgcagtctcttatcgaaaatgctgaaatgtccactgagagctatgaccagggcaaggatcgtgatttggtaactgaagacactggtgtgagaaatgaagctcaagaagagatctataaaaagggacagtccaaaagaatatggggtgagctctacaaggtgatagattcatcagatgttgtagttcaagttcttgatgctagagatccaatgggtactcgttcccctcacattgaaacttacctgaagaaggaaaaaccttggaaacacctcatttttgtacttaacaaatgtgaccttgttccaacctgggcaacaaaacggtgggttgctgtcctctcccaggattatccaacacttgctttccatgcaagccttactaacccgtttggcaagggagcattcattcagcttctgcggcagtttggaaagttgcacactgacaagaaacagatcagtgttgggttcattggctatccaaatgttggcaagagctctgtgataaatacattgcgttctaagaaagtttgcaacgtggctcccattgcaggtgaaacaaaggtctggcagtatattactttgatgcgtcggatattcctgattgactgtccaggtgtggtttacccctctgaggactccgagacagacattgtgctaaaaggagttgttcaagtagaaaaaattaagagtcctgaagaccacattggtgctgtacttgaacgagcaaagccagaatatatcagcaaaacatacaagattgattcttgggagaatgctgaggactttcttgagaagctcgctttccggactgggaagttactaaagggtggagagcccgacttgcagactgtgggtaagatggtcctcaatgactggcagaggggccggattcctttctttgtcaagccacccaatgcagagccacttgtggccccccagcttctaccctcctcatctttggaagttgtcccagaagcagcccagaacaatccaggggaggaagtcacagaaactgcaggtgaagggtcagaatccatcattaaggaagaaacagaagagaacagtcactgtgatgctaacacagagatgcagcagattctcacacgagttcggcagaactttggtaaaatcaacgtggtgcctcagttttctggggatgacctggttcctgtggaggtgtcagatcttgaggaagagcttgagagcttttctgatgaagaggaggaggaacaggagcaacaaagagatgatgcggaagagtcttcctcggagcctgaggaggaaaatgtgggaaacgacaccaaagccgttattaaagcactggatgagaagattgccaaatatcagaagtttctagacaaagccaaagccaaaaagttttcagcagtcagaatatccaagggactgagtgaaaagatatttgcaaaacctgaagaacaaagaaaaacactggaagaagatgtagatgacagagcaccttccaaaaagggaaagaagcggaaggcacaaagggaagaggaacaggaacattcaaataaagctcccagggcgcttacatcaaaagaacggaggcgagcagtacgacagcaacggccgaaaaaagttggtgtgcgctactatgaaacacacaacgtgaaaaataggaacaggaacaaaaagaagaccaatgactcagagggacagaaacacaaacgcaaaaaattcagacaaaagcagtaatgtttaaaaggtttttattaaattatacaaaaacaggcaaaaaaaaaaaaaaaaaaaaaaaaagaaaaaaaaaaaaaaaaaaaccggggggtttttgtgggggggggagaaaagggtaaaggggggggatggtgtcggacacccttttggggaaagggggaaaggggggcccaaannnnnnnnnnnnnnnnnnnnnn

SEQ ID NO: 23371 - DNA, 2196 bp, Homo sapiens
  misc_feature 1259: n = A,T,C or G
cgacccacgcgtccgggccgagctggttggtggcggcggtcgtgcgggttcgcgccgggccgagagcgggttgggggctgcgggaggctgcaggggcctgggcggcagaagaggcggccctgagctggctcatgcgggccagtctcggcagggtggctgggcagggctcgcgaggccacggctcggagcccagaccggggcccaggaggcgagcgccgttttggagaggagccctgcctgctctgcctgccagcgtgaccccacgaggcctcgggcgggaagaggtcctcggggcagatccgagttaatgagagaggggtattgagcgtgtagcgttaactctgccagtcactgcgtcagtcgctttggaaatactaaatttctcgagctgagtcttcatacctggctccattactacgtctgtaaggaggagctggtggtagtgtctgctttttagacttttctttagactatttgtattttttttcagatggagtcttgctctgtcgcctaagctggagttcagtggtgcggtctcggctcactgcaatctccacctcccgggctcgagcgattcttctgcctcagcctcccgagtagctgggattataggcgcctgccaccacgcccagttgatttttgtagttttagtagagacggagtttcaccatgttagccaggctcatcttgaactcttgacctcaaatgatccgtctgcctcggccttccaaagtgctgggattacagacgcaaacatgcagatctttgtgaagaccctcactggcaaaaccatcacccttgaggtcgagcccagtgacaccattgagaatgtcaaagccaaaattcaagacaaggagggtatcccacctgaccagcagcgtctgatatttgccggcaaacagctggaggatggccgcactctctcagactacaacatccagaaagagtccaccctgcacctggtgttgcgcctgcgaggtggcattattgagccttctctccgccagcttgcccagaaatacaactgcgacaagatgatctgccgcaagtgctatgctcgccttcaccctcgtgctgtcaactgccgcaagaagaagtgtggtcacaccaacaacctgcgtcccaagaagaaggtcaaataaggtggttctttccttgaaggggcagccttcctgcccaggccccgtggccctggagcctcaataaagtgtccctttcattgactggagcagcaaaaaaaaaaaaaaaaaaagaaagtncctgcccgggcggccgctcgacgatgccaaagaaagcaaagcctacagggagtgggaaggaagaggggccggctccctgtaagcagatgaagttagaagcagctggggggccttcagctttaaactttgacagtcccagtagtctctttgaaagtttaatctcgcccatcaagacagagactttttttcaaggaattctgggagcagaagccccttctcattcagagagatgaccctgcactggccacatactatgggtccctgttcaagctaacagatctgaagagtctgtgcagccgggggatgtactatggaagagatgtgaatgtctgccggtgtgtcaatgggaagaagaaggttttaaataaagatggcaaagcacactttcttcagctgagaaaagattttgatcagaaaagggcaacgattcagtttcaccaacctcagagatttaaggatgagctttggaggatccaggagaagctggaatgttactttggctccttggttggctcgaatgtgtacataactcccgcaggatctcagcctgttgccccattatgatgatgtcgaggttttcatcctgcagctggagggagagaaacactggcgcctctaccaccccacttgcccctggcacgagagtacagcgtggaggccgaggaaaggatcggcaggccggtgcatgagtttatgctgaagccgggtgatttgttgtactttcccagaggaaccattcatcaacgtacacactctcgggctggcccactcgactcacgtgaccatcagcacctaccagaacaattcatggggagatttccttttggataccatctcggggcttgtatttgatactgcaaaggaagacgtggagttacggaccggcataccccggcagctgctcctgcaggtggaaccggctggcattccgcacaaa

SEQ ID NO: 23372 - DNA, 507 bp, Homo sapiens
acgcgggggatcacctgaggttgggagtttgagaccagcctgaccaacgtggagaaaccatgtctctgctaaaaatacaaaattacctgggtgtggtggctcatgcctgtggtcccagctacttgggaggctgaggcaggagaatcacttgaacccgggaggcggaggttgcggtgagctgagatcgtgccattgcactccagcctgggcaacaagaacgaaactccatcacataaaaaaaaaaaaaaaaaaaggtccgcgggggaggcgaacaatggcggagctgggcgaagccgatgaagcggagttgcagcgcctggtggccgccgagcagcagaaggcgcagtttactgcacaggtgcatcactccatggagttatgttgggataaatgtgtggagaagccagggaatcgcctagactctcgcactgaaaattgtctctccagctgtgtagaccgcttcattgacaccactcttgccatcaccagtcggtttgcccagattgt

SEQ ID NO: 23373 - DNA, 426 bp, Homo sapiens
  misc_feature 1, 2, 3, 4, 5, 425, 426: n = A,T,C or G
nnnnnccgggcaggtactcgctgtggcagctgcaacgcgcagcatggctgtttcaaatattatatatggagcagcacttacaaaggaagttggaacggacctaaactacatgcttgctaaagaagggggcttgagctctatagataggctggggagcacttaattttttccaatttaaaaaggggattgtttcctggggctttaacccccctgacctttgataaggatgggacaaagccatctgggcagtcaggggcaaggactgttggaggagagttagcccaagtataggctctgcccagatgccatcacatccctgattctgcggatgcttcgaagcaccttccctgagaagggaagaggggaatctttggactaggttcttggctccagacctggaatccacaaaagccaaaccagctcann

SEQ ID NO: 23374 - DNA, 6304 bp, Homo sapiens
  misc_feature 1, 6302, 6303, 6304: n = A,T,C or G
nacgaggccagtgtctgcctctctgcccccacgggggtttatttgatctcacattaaccaaggaggagaatgtgagaaaagggggaaaatgcccaggaggaagcaggagcagcccaagcgccttccctcaccctcagaagaggaaagtggaaagcctttccagtgtccaatatgtggtttggttattaaaaggaagagttactggaagcggcacatggtgattcacacaggtttaaaaagtcatcagtgtccgctctgtccattccggtgtgctcgcaaggacaatctcaaatcccacatgaaggttcatcagcaccaggatcggggagagaccctttcagtgggccagctggtgcccttttacttcctcacgccacttcagcctgaaactccacatgcgttgccatcagcacttcctgaggacagaagccaaggtgaaggaggagatcccagacccagatgtcaagggatctccccacctcagtgacagtgcctgcctggggcagcaaagggaaggaggagggacagagctagtggggaccatgatgacgtctaacactccagagaggactagccagggaggggctggcgtctcgcctttgctggtgaaggaggaacccaaggaagataacggcctgcccacctcctttactttgaatgctgccgacaggcccgccaaccacacaaagctgaaagacccctccgagtatgtggccaacagtgcgtcagcattgttcagccaggacatctctgttaagatggcgtctgattttctcatgaagctgtcagctgcaaatcagaaggagcccatgaatcttaattttaaagtgaaagaggagcctaaggaaggggagtccctaagcacgactttgcctcggtccagctatgtgttcagcccggaatctgaagtgtcagccccaggcgtctctgaggacgccctaaagccccaggaagggaagggaagtgtgctaaggcgggatgtgtcagtcaaagcagcctctgaacttctcatgaaactctcagcggaaagctacaaggaaacacagatggtgaagattaaagaggaacccatggaggttgacatccaggactcccatgtctcgatatcacccagccggaatgttggctacagcactttaatcgggcgagagaaaaccgaacccttacagaagatgccagagggcagagtacccccagagagaaacctcttcagtcaggatatctctgtgaaaatggcttccgagctcctctttcaactgtcagaaaaagtgagcaaagagcacaatcatacaaaagaaaacaccatccggaccacgaccagccctttcttttcagaagacacatttagacaatcaccattcacctccaattcaaaagaactgctgcccagtgactccgtgctgcacggaagaatatcagctccagaaacagaaaagatagtcctagaggcaggaaatggattaccatcctggaaattcaatgaccagctttttccctgtgacgtgtgtgggaaagtgtttggccgacagcagacattgtcccgacacctctcgctgcacacagaggaaagaaaatacaaatgccacttgtgcccctatgctgctaagtgccgtgcaaatctgaaccagcacttgaccgtccattccgtgaagctggtgagtacagacaccgaggacattgtcagcgccgtcacctctgaaggcagtgatgggaagaaacatccttattattacagttgtcacgtgtgtggatttgagaccgagctcaatgtccagtttgtcagccacatgtcactccacgtggacaaggagcagtggatgttttcgatctgctgcactgcctgcgacttcgtcaccatggaggaagcagagataaagactcacattggcaccaagcacacaggggaagacaggaagacccccagcgaatcaaatagcccctcttcatcctccctctcagctctgagtgattcagccaacagcaaagatgattcagatggctcccagaaaaacaagggcgggaacaatctgctggtcatctctgtcatgcctgggagccagccctcactgaacagtgaggaaaagccagagaaagggttcgaatgtgttttttgcaactttgtctgcaagacgaagaacatgtttgagcgtcatctgcagatacacctcatcacccggatgtttgagtgtgatgtgtgccacaagttcatgaagacccccgaacagctgctggagcataagaaatgccacactgtccccaccggtgggctcaacctcaggacagtggtgagtttcagactcctctaggtgcccattctgcatttattccaccaaccgccccgctgccatggagtgccacctcaagacccactacaagatggagtacaagtgccggatctgccagacggtgaaggccaaccagctggagctggagacgcacacccgggagcaccgcctgggcaaccactacaagtgcgaccagtgcggctacctgtccaagaccgccaacaagctcatcgagcacgtgcgcgtccacaccggggagcggcccttccactgtgaccagtgcagctacagctgcaagcgcaaggacaatctcaacctgcacaagaagctgaagcacgccccacgccagaccttcagctgcgaagagtgcctgttcaagaccacacaccctttcgtcttcagccgccacgtcaagaagcaccagagtggggactgccccgaggaggacaagaagggcctgtgtccagcccccaaggaaccggccggcccgggggccccgctcctggtggtcgggagctcccggaatctcctgtctcccctgtcagttatgtctgcctcccaggctctgcagaccgtggccctgtcggcagcccacggcagcagctcagagcccaacctggcactcaaggctttggccttcaacggctcccctttgcgctttgacaagtaccggaactcagattttgcccatctcattcccttgacaatgttataccccaagaaccacttggatctcacattccaccctccccgacctcagactgcgcctcccagcatcccctcacccaaacactccttcctggcctatctcggactgagagaaagagcagagactgtctgagggcagccatgttctgtaccaaaaacagagagacaaaagacaaaaaaaaaaaaaaaaaccacaaaacttaaacacaaccccagcaggtgtatgttgctgcaaaacctacagaccccgatgggtctggaacatgtgtactgtatatctttagtaaggaatagaaaattggctctgtgtgtatacctattgcattgacctgaaagctgctttatccaatcttcagagaggtgacctactgcatacttctaccttcagaggcatgcctccccagccacccactcccactctcagcccttctccgtacttttctctgaaaggaatcttgtcttgttaaaccctaaagagagtgtccttaatagcaatcagcacttgtaagcttatatactggtgcatttggttttctgttgggtgaatgcggtgtgtgggcgtttgtggattctgaaagagaaagccgtgtgtcgtgtgccatgacatttctattgcacattctttgtactggcttctttaacagcgatgaacgttcttttccctcctgggttgttcatccacgacagtctctccctgtgctccttcatcacctttccctctctctttgatggctacagagtggtagggcctggtgcttagtcgatgaaggaatggtagccatctacagtgctgctggagatttccgccagagcgctggagaccttgcgctcagatcttctctggtgatgaagaggcgaggaatcaagtgactgacggctgcgagaagacgacagaagggactgcagctaacatcacagaacttaagtgtgttttgtgtgtgtgcccacacgtagacaaatgtgtacggtgcacacacacagtgcatcattttttaagggcagattatatatatatgagatgtattaattcagtggttaccatttgtttgcaggaaaaagaaatgtatgggtgaaaaaatttatggttgataaatccagccaaggagattaaaaggggtttggataaattctgggtataaatgctcagactaaaaaaaagaaatggcagttttgcacagtgctatggtctgcactagtttttgtttctcatcagaaaaaaaaaaaaaaaaaaaggaagaaaatgtaccttttttatggaatgagtagactgtatgtttgaagatttagccacaacctctttgacatataatgacgcaacaaaaaggtgctgtttagtcctatggttcagtttatgcccctgacaagtttccattgtgttttgccgatcttctggctaatcgtggtatcctccatgttattagtaattctgtattccattttgttaacgcctggtagatgtaacctgctaggaggctaactttatacttatttaaaagctcttattttgtggtcattaaaatggcaatttatgtgcagcactttattgcagcaggaagcaggtgtgggttggttgtaaagctctttgctaatcttaaaaagtaatgggtgatttaaaaagaaaaaaggaaaaaaatctttggctgaatatgttcattgcttgtatttttaaaacaacagaatttccagtatgaaacaggctgaaagagcaggaagaaatgttctttgtataataatgggaagtttggaatataaaagtttatatattatttatctattggagaactggtgtacaggaggaacattttcttactgtgttgctgttttccatcatgtgttatcctaagagttggggttttttaaaatctgtttcaccaggggaaaataaaagcatccctaatgttcttcctctagtcagtttgctttgctgaaagctccctggaaattagtacagttctacaggaagccagaagactgtactgtctgtccacaccatggtctcctcagtcccctccacgccagcccctcttccccacacctagtaggtgtgctacacctccctttgccagtcatcccgccatggatggggagcctacttggtgccctggcaaacctgtttacactaaggagatgcccacagggagcgggaagctcccaaaccctcagtcattctccagcagagacctttgctcttggccaggtttgaaacgatgttcaacctcgccacgtcaatgtctcagtaaaagacactatagatagttatggacaatacactccaagaatactgggcttatgggtgggttggttttttgttttgttttgttttgttttcaagtcatgtctttatccccatataatggagaatgtgccacttggctaataatgtgttttcaaaactacaagttcagtgatgacaggaaagagggctaaagtagtcccacagaggctggtagaaaaggcgaatcacacttaagcaccagcaggttaaaaacctgaaagggtggccctgacaattcagactataggttttacagcatgccacttgtgcaataggaggtctagggttgaaactttcaagaacgagaggaggtgaaggaaggagacgtttactgctcaaatgccatgcatttcactgcttgccactgaacttgtatttgaatgacttagtaatgcttaatataattgggcaacttttttagcactttggaaagagtcatcaatctttctggtaaattataaaagttttctgagtgagaaaaggtgtgtttggagtttgtttgactttttatattattattgttattaataaagaaaaaaatctacagcatttttcagactccaccctagaaaatatgtacccctgaatttggtttgcagtttgatactcagggaaggatgtattccatagatatcctttccgtataaaacactaacatctttgagaaattcacctaccaactaacttcaattgttgtcactatgcattcttcaatgaaaactagcttatttttccatatagtaatgcagttagggttctcagcactttctttcttctatcctttttttaactcttcatattatgttcagatgatcatactgtcaaggtttgtgtacattactgaaaatttgtattgtataaagctttttgcattacgaggctgtacagggtcattttgacagtaactggtatattcctttgcatcttatgttgcattgccaatttctagtgtatccagtttgaaagtataatatactctaattaaaaaaaaaaaaaggttggctagcacaaaacaaaccaaagaaacaaaaacnnn

SEQ ID NO: 23375 - DNA, 1883 bp, Homo sapiens
agtcgacccacgcgtccgccaaaccgataggaaacgaggctgcctcgcggtggcaccgccaccccccaaccgggttccgagcaccggagctggctgctgctccctctttggagcaaagttttatgcaaagagggtgttttttgaaactttcggtgcacgaaaaataactaaacatgggcaaaggagatcctaagaagccgagaggcaaaatgtcatcatatgcattttttgtgcaaacttgtcgggaggagcataagaagaagcacccagatgcttcagtcaacttctcagagttttctaagaagtgctcagagaggtggaagaccatgtctgctaaagagaaaggaaaatttgaagatatggcaaaagcggacaaggcccgttatgaaagagaaatgaaaacctatatccctcccaaaggggagacaaaaaagaagttcaaggatcccaatgcacccaagaggcctccttcggccttcttcctcttctgctctgagtatcgcccaaaaatcaaaggagaacatcctggcctgtccattggtgatgttgcgaagaaactgggagagatgtggaataacactgctgcagatgacaagcagccttatgaaaagaaggctgcgaagctgaaggaaaaatacgaaaaggatattgctgcatatcgagctaaaggaaagcctgatgcagcaaaaaagggagttgtcaaggctgaaaaaagcaagaaaaagaaggaagaggaggaagatgatgaggaagatgaagaggatgaggaggaggaggaagatgaagaagatgaagatgaagaagaagatgatgatgatgaataagttggttctagcgcagttttttttttttcttgtctataaagcatttaacccccctgtacacaactcactccttttaaagaaaaaaattgaaatgtaaggctgtgtaagatttgtttttaaactgtacagtgtctttttttgtatagttaacacactaccgaatgtgtctttagatagccctgtcctggtggtattttcaatagccactaaccttgcctggtacagtatgggggttgtaaattggcatggaaatttaaagcaggttcttgttggtgcacagcacaaattagttatatatggggatggtagttttttcatcttcagttgtctctgatgcagcttatacgaaataattgttgttctgttaactgaataccactctgtaattgcaaaaaaaaaaaaaagttgcagctgttttgttgacattctgaatgcttctaagtaaatacaattttttttattagtattgttgtccttttcataggtctgaaatttttcttcttgaggggaagctagtcttttgcttttgcccattttgaatcacatgaattattacagtgtttatcctttcatatagttagctaataaaaagcttttgtctacacaccctgcatatcataatgggggtaaagttaagtggagatagttttcatccataactgaacatccaaaatcttgatcagttcaacgaaaatttcacatagcccatttactttacaaactggaagagtaatcaattctactcaaagcatggcactttcagaactcacacttttggaacgtctgtccttgaggactattcgaacagtttgtcttaacctttactgaggcacttattctgtaagatccaattacatataaggcgtcatattggcgtccccatctagcagaccgtgatgttctcccaaaggtagttagaacacacgtgcataactttgtgacatgctcggagctgacacgggatacatccccatataagtagcgggaagcaccaagatgtataaggagccaacacagctgtttttggtcctgcaattattactaagatgtgttgtttgc

SEQ ID NO: 23376 - DNA, 884 bp, Homo sapiens
  misc_feature 1, 2, 3, 4, 5, 6, 7, 8, 9: n = A,T,C or G
nnnnnnnnnacgcacaatttcagctaaaacgtttatttctcactcaaaacttatttcccctcaaccctatacccaaagaagaaataaaatcacagatacataacagaagtatttgaggtaccctctcatatatgcaaacaaatgcagactaggcctcaggcagagactaaaggacatctcttggggtgtcctgaagtgatttggacccctgagggcagacacctaagtaggaatcccagtgggaagcaaagccataaggaagcccaggattccttgtgatcaggaagtgggccaggaaggtctgttccagctcacatctcatctgcatgcagcacggaccggatgcgcccactgggtcttggcttccctcccatcttctcaagcagtgtccttgttgagccatttgcatccttggctccaggtggctccctcagtctggactctaccacttgggtctccagattttctgttacgtccttgtgggtcaggatatttctggaagtcactccgtgaggctggtaatcctcagacccagcttctggtcgactctggaatggactgaagctgggcaggatgatgagagccagggaaaaaagaagaatcaaaacacaagtgctggtctgggcagctttgttggaagtttgagcaattagcgtctgcagctggcggagctgagctaccaaggagatgttgtgcctctccagctcctggacttttttctgtaattcttggttctgtgcagaacaggctgccaccctgctctccagcccatcaatgtactccttcttcccccgccttaattaagagctccgttctttttttcatcacaaggaagaccgtggacccaggcttctggcccttctttttcacacaggaaacagcta

SEQ ID NO: 23377 - DNA, 1160 bp, Homo sapiens; identical to SEQ ID NO: 22252
  misc_feature 1, 2, 1154, 1155, 1156, 1157, 1158, 1159, 1160: n = A,T,C or G

SEQ ID NO: 23378 - DNA, 1154 bp, Homo sapiens
  misc_feature 1148, 1152, 1153, 1154: n = A,T,C or G
cgtccgcccacggcgcttgcgcgggttgagggcggtggctcaggctcctggaaaggaccgtccacccctccgcgctggcggtgtggacgcggaactcagcggagaaacgcgattgagagcagtgtgtggattacactatcactggaaaaatacgaattgagaagaaggaaaagactggaagatgcagaccttggttcctgttagtggaaacactgtaaggtcccagaaatggaaaagaaaatgaaataaatcagcagttatgaggcagagcctaagagaactatggcaacatcaggtgactgtcccagaagtgaatcgcagggagaagagcctgctgagtgcagtgaggcgggtctcctgcaggagggagtacagccagaggagtttgtggccatcgcggactacgctgccaccgatgagacccagctcagttttttgagaggagaaaaaattcttatcctgagacaaaccactgcagattggtggtggggtgagcgtgcgggctgctgtgggtacattccggcaaaccatgtggggaagcacgtggatgagtacgaccccgaggacacgtggcaggatgaagagtacttcggcagctatggaactctgaaactccacttggagatgttggcagaccagccacgaacaactaaataccacagtgtcatcctgcagaataaagaatccctgacggataaagtcatcctggacgtgggctgtgggactgggatcatcagtctcttctgtgcacactatgcgcggcctagagcggtgtacgcggtggaggccagtgagatggcacagcacacggggcagctggtcctgcagaacggctttgctgacatcatcaccgtgtaccagcagaaggtggaggatgtggtgctgcccgagaaggtggacgtgctggtgtctgagtggatggggacctgcctgctggtgagggcgggcgtgcgggcagctgggggccggagctggggggcttctgagcacgggctcggctgggccaacctcaggatctcaagggtcgtgcgtgattcattttgatgttttccctaatgtgaggtctaattaatttcttgtgtggaaaaaaaaaaaaaaaaaaaaaaaaaaaagatgcggccgcaagcttattccctttagtgagggtntaannn

SEQ ID NO: 23379 - DNA, 615 bp, Homo sapiens
  misc_feature 602, 611, 612, 613, 614, 615: n = A,T,C or G
caaagaatgggggaaaggttatattgatgaaatattacattcagctattttaaaaacccagttacccgcgaaccttttttttttttttattcatcattttttgtttttccaaattttagacattctttttctcctttcacctaaaaagcagcctttctatctgctggttgactcagggattgattttgtatttctggccgttggtgaacagatccctgcatttctgtcatgatgtggttgctcctgcccagcagtcagcaaactggtccatacgctgaatatgggcgagaattttgtgggtcacacttgccacacttcacgtgtccacacttttcagagtatgtgctgttctgttttccagatgagcagaactacattctccgagatgctgaggcagaagtacttttctctttcagcttggaagaatccttaaaacgggcacacgtttctccactctttaaggtacactcttggcttccttcttggacattgccactggaggtcttcctcctgtgaaccacagcacatctctagagaacttttctttactggaatctgcccaagtctttccactatgaaggcaatcgtagagtgtgcaggangaaaggtgnnnnn

SEQ ID NO: 23380 - DNA, 3259 bp, Homo sapiens
  misc_feature 1, 3257, 3258, 3259: n = A,T,C or G
ncgaaccggatccttgggcgggcagtcatcacacctggggatgtcatgcaggcaagatggcggaaggggaggacgtgggatggtggcggagctggctgcagcagagctaccaagcagtcaaagagaagtcctctgaagccttggagtttatgaagcgggacctgacggagtttacccaggtggtgcagcatgacacggcctgtaccatcgcagccacggccagcgtggtcaaggagaagctggctacggaaggctcctcaggagcaacagagaagatgaagaaagggttatctgacttcctaggggtgatctcagacacctttgccccttcgccagacaaaaccatcgactgcgatgtcatcaccctgatgggcacaccgtctggcacagctgagccctatgatggcaccaaggctcgcctctatagcctgcagtcggacccagcaacctactgtaatgaaccagatgggcccccggaattgtttgacgcctggctttcccagttctgcttggaggagaagaagggggagatctcagagctccttgtaggcagcccctccatccgggccctctacaccaagatggttccagcagctgtttcccattcagaattctggcatcggtatttctataaagtccatcagttagagcaggagcaggcccggagggacgccctgaagcagcgggcggaacagagcatctctgaagagcccggctgggaggaggaggaagaggagctcatgggcatttcacccatatctccaaaagaggcaaaggttcctgtggccaaaatttctacattccctgaaggagaacctggcccccagagcccctgtgaagagaatctggtgacttcagttgagcccccagcagaggtgactccatcagagagcagtgagagcatctccctcgtgacacagatcgccaacccggccactgcacctgaggcacgagtgctacccaaggacctgtcccaaaagctgctagaggcatccttggaggaacagggcctggctgtggatgtgggtgagactggaccctcaccccctattcactccaagcccctaacgcctgctggccacaccggcggcccagagcccaggcctccagccagagtagagactctgagggaggaggcgcccacagacttacgggtgtttgagctgaactcggatagtgggaagtctacaccctccaacaatggaaagaaaggctcaagcacggacatcagtgaggactgggagaaagactttgacttggacatgactgaagaggaggtgcagatggcactttccaaagtggatgcctccggggagctggaagatgtagagtgggaggactgggagtgagggagccagagggagcagctcccccacccatggcatctctcgcctccctcgctcgtctcagcccagccctggaagactgagaatgttcccccaaatctcctctgccaaccagagctctgggcacagattctggtggctccctgctggccctcttgggcctctgctcacacctgggaaggggctctctaaatcccggccagaaactctgacttgtgccaacaataggatgacccaagggagaggaaacctatcctcctcaccagaagagcctgtgtttttctgctgaacacccactgttcctgaggactcctgctgggaagtcccaagggatagttctagcccttctgcctgtgtagacagaagctaaaccaccagtctctctcggaggaagctgagacaacatactctgtccatacataagcaggcagggagggccatgccacctacccttggctaaacagggacagtgaacacattttggttcctatcccagtgggtaagaggcacttatctctgggaaatttgcctctcttgggactctccccctcccaggcattttccattcctggaaaggctcctttggggttcagaatccagagaccaaaccctgacccacctccttcctttcctccagcccacgctggtctgtccccatgccttcccagggcttcttcatgtcagatgcacccaagtccttagcccagctgtgccacctgcaggagttcgctcttgcgtttcttcccctccccaagaagggagggggctacttcaggcccttctgtgtgttgcctggcaggataccttgtccaaccagctacccacctcaactcccctgtagtttaggacacaaaacagctaccagcggtacagagcggtgatcaaagccgagtacttacaactctggtaagcctagcttctccgcctcagcccttctgcttctggaagggctatcctgggggtgaacttgaaactctcatcaggcttctgcaaaagctcttcttcctgaagacagacccagcctttgtgctctcaccctccactctggtaaagctgcacctctgggggaatgaggggctgcaggaatctctggagagcctggtgcttcacgatgctgctctggtgattcttgtacctaatctggtgtgctcaccaatgagtgaaagggatcgtgggtcagggacaccgagagagtgaggtcacttccacttcaaaccttcagtgagggggtgggatggagagaatgctgaatcttttttttgacgggatggggtttttctctttgtaattatttctttagtttaattaaccttttggttgtttgtgcaatattatatattttaaattataatgcatctccccagagtattttgtagctgggaaaagaaaaaaggaaaaaaagaaaaaaagattctaacagctgttagttttataattaaaaaagaaagaaaaaagaactttgtcctgaaccttttacagacttgccgttaacagcattaaagtgattcacccgaagctgaaaaaagaaaactgcagaaacaacaacaacaaggacaaaaaaacaacaaaccacatacgggagcgtagcacatcactctccgcgggggcccgaaagtcaaaacaccgtcgcaccggaagcgaagaacagacgtgccggaacatgtatgcacaaggaggcacccgccgcggcgagaggaacacaacaggcggccccgcgggcacacaaacaagtcggcgctacgcgaacgacgcagcgaggcagagcaggagaaagaccacatcatgtgaggagcgaaagagaaccaagacacaaaagaggaagcagaaaataaacataaaggcgagcgcggcgacaccgaggtgacggcaacagacacagaagcacaacaacagcggcgcgcgagcacgcannn

SEQ ID NO: 23381 - DNA, 1138 bp, Homo sapiens
  misc_feature 1, 2, 3, 4, 5, 6: n = A,T,C or G
nnnnnnggagtttttttaaatagagatagggtttcaccaggttggccaggctggtgtcacaactcttgacctcaagtgatctaccacccttggcctcccaaagtgctgggattataggcgtgagccactggtgcccggccaacattaatattttttattagctactacagcttagagtagctgctatgggagtgtggcctttttgattaaatactagctgatcaaccctagaatataaattcttgttttataacatttagatttaaataacaataagaatgtaagctccatgaaggcaagaatgcctttttgttttgttcactgctgtgtctaaaataatgcctggctcgatcaaatattgttgattgagtgaatatatctgctagaaggaaatagctgggaagaatttaatgatcagggaaattcattatttctatatgtggaaactttttgcttcgaatattgtatctttttaaatctaaatgttcatatttttcctgaagaaaccactgtgtaaaaatcaaattttaattttgaatggaataatttcaaagaactatgaagatgatttgaagccctaatttatatagtcacctataaaatgttctttatatgtgttcataagtaaattttatattgattaagttaaacttttgaattgatttgaggagcagtaaaatgaaagctatatctattctaaacttatttagacatttggtaccagttacccaggtgaaacatatggagtaactttgtttgtatggtaaggtttaggaatggtggctgaagggtatctctatataaattaagtgctcaacatgtgcaacgattgtcactttcgtacgattttacaggcatttcatgaatgctttacattcaactagttatcttattacaaacacctttcttgtattcatatacttcaggtgttgtgtaacattgactatgtacttatttagcaaatgtacccccatactgtttccttacatggtggttttgtctaaccccaatggtactactggtcaatgcatatctggagtggactgggaaatatatggggtcaaaaccaacaagtcggtgtggaggaatctctagagatagaagggtcgcagagaaatagtcgcgacaaacaagggac

SEQ ID NO: 23382 - DNA, 2042 bp, Homo sapiens
  misc_feature 2032, 2033, 2034, 2035, 2036, 2037, 2038, 2039, 2040, 2041,2042: n = A,T,C or G
cgcggtggcggccgggtacgcggggacccaaattttccagccgatcactggagctgacttccgcaatcccgatggaataaatctagcacccctgatggtgtgcccacactttgctgccgaaacgaagccagacaacagatttccatcagcaggatgtgggggctcaaggttctgctgctacctgtggtgagctttgctctgtaccctgaggagatactggacacccactgggagctatggaagaagacccacaggaagcaatataacaacaaggtggatgaaatctctcggcgtttaatttgggaaaaaaacctgaagtatatttccatccataaccttgaggcttctcttggtgtccatacatatgaactggctatgaaccacctgggggacatgaccagtgaagaggtggttcagaagatgactggactcaaagtacccctgtctcattcccgcagtaatgacaccctttatatcccagaatgggaaggtagagccccagactctgtcgactatcgaaagaaaggatatgttactcctgtcaaaaatcagggtcagtgtggttcctgttgggcttttagctctgtgggtgccctggagggccaactcaagaagaaaactggcaaactcttaaatctgagtccccagaacctagtggattgtgtgtctgagaatgatggctgtggagggggctacatgaccaatgccttccaatatgtgcagaagaaccggggtattgactctgaagatgcctacccatatgtgggacaggaagagagttgtatgtacaacccaacaggcaaggcagctaaatgcagagggtacagagagatccccgaggggaatgagaaagccctgaagagggcagtggcccgagtgggacctgtctctgtggccattgatgcaagcctgacctccttccagttttacagcaaaggtgtgtattatgatgaaagctgcaatagcgataatctgaaccatgcggttttggcagtgggatatggaatccagaagggaaacaagcactggataattaaaaacagctggggagaaaactggggaaacaaaggatatatcctcatggctcgaaataagaacaacgcctgtggcattgccaacctggccagcttccccaagatgtgactccagccagccaaatccatcctgctcttccatttcttccacgatggtgcagtgtaacgatgcactttggaagggagttggtgtgctatttttgaagcagatgtggtgatactgagattgtctgttcagtttccccatttgtttgtgcttcaaatgatccttcctactttgcttctctccacccatgacctttttcactgtggccatcaggactttccctgacagctgtgtactcttaggctaagagatgtgactacagcctgcccctgactgtgttgtcccagggctgatgctgtacaggtacaggctggagattttcacataggttagattctcattcacgggactagttagctttaagcaccctagaggactagggtaatctgacttctcacttcctaagttcccttctatatcctcaaggtagaaatgtctatgttttctactccaattcataaatctattcataagtctttggtacaagtttacatgataaaaagaaatgtgatttgtcttcccttctttgcacttttgaaataaagtatttatctcctgtctacagtttaataaatagcatctagtacacattcaaaaaaaacagaaaagggcggccgggcgggggcccttaaaatttttaaaaaaaaaaacccccaaaccccccccgaaaacgaaaaaaaaaaaaaaagccccgggggggggaaaaccttttttggggccctaaaaagggggaaaaaaaaaaccaatccccccaaaatttcaaaaaaaaaaccttttttccccgggcctccaggggggggggggccaaaacccaaaggggtttttaattgtgggggccccccgggccccccaaaaaaaaaaaatttttttccccccccaaaaaaaaaaaaannnnnnnnnnn

SEQ ID NO: 23383 - DNA, 1734 bp, Homo sapiens
  misc_feature 1, 2, 3, 1729, 1730, 1731, 1732, 1733, 1734: n = A,T,C or G
nnngtggtgacgtcatcggaggcgtggtcgtccccaaaactggggggggaaagggaaaaaaaaaagccagaaaaagttttcttttctggagtcccaaacgaggtgcgggacggaagagggggtgaaggccagaggctcggggcttcaagaccgctgtctggagtccccctttccaggccatgtcggggcccacctggctgcccccgaagcagccggagcccgccagagcccctcaggggagggcgatcccccgcggcaccccggggccaccaccggcccacggagcagcactccagccccaccccagggtcaatttttgcccccttccatctgagcagtgttaccaggccccagggggaccggaggatcgggggccggcgtgggtggggtcccatggagtactccagcacacgcaggggctccctgcagacagggggggccttcgccctggaagcctggacgccgagatagacttgctgagcagcacgctggccgagctgaatgggggtcggggtcatgcgtcacggcgaccagaccgacaggcatatgagcccccgccacctcctgcctaccgcacgggctccctgaagccaaatccagcctcgccgctcccagcgtctccctatgggggccccactccagcctcttacactaccgccagcaccccggctggcccagccttccccgtgcaagtgaaggtggcacagccagtgaggggctgcggcccacccaggcggggagcctctcaggcctctgggcccctcccgggcccccactttcctctcccaggccgaggtgaagtctgggggcctggctataggagccagagagagccagggccaggggccaaagaggaagctgctggggtctctggccctgcaggaagaggaagaggaggcgagcacgggccccaggtgcccctgagccagcctccagaggatgagctggataggctgacgaagaagctggttcacgacatgaaccacccgcccagcggggagtactttggccagtgtggtggctgcggagaagatgtggttggggatggggctggggttgtggcccttgatcgcgtctttcacgtgggctgctttgtgtgttctacatgccgggcccagcttcgcggccagcatttctacgccgtggagaggagggcatattgcgagggctgctacgtggccaccctggagaaatgtgccacgtgctcccagcccatcctggaccggatcctgcgggctatggggaaggcctaccaccctggctgcttcacctgcgtggtgtgtcaccgcggcctcgacggcatccccttcacagtggatgctacgagccagatccactgcattgaggactttcacaggaagtttgccccaagatgctcagtgtgcggtggggccataatgcctgagccaggtcaggaggagactgtgagaattgttgctctggatcgaagttttcacattggctgttacaagtgcgaggagtgtgggctgctgctctcctctgagggcgagtgtcagggctgctacccgctggatgggcacatcttgtgcaaggcctgcagcgcctggcgcatccaggagctctcagccaccgtcaccactgactgctgagtcttcctagaagtacctgctgggttctcagttccagttcccatcctttgattgatcactctcctgacatccacctgatattatacctgggccgctccatcgcaataatgagctcctcnnnnnn

SEQ ID NO: 23384 - DNA, 1249 bp, Homo sapiens
  misc_feature 1243, 1244, 1245, 1246, 1247, 1248, 1249: n = A,T,C or G
actatttaatatatttctccatgaactttttgtgaaattcagatcgcagtgtgtcatttacaaatcttttgtctttcttctggtcatctacaccttttgcacagttcttgaagacaacgtcatcatcccaccttctttaactttgaagttggcctgaggctgggatggggaaaaggagaaggtgatttgagccaactttcaaagcagtattcaagcagagacctaccctctcatacaaagataaaatacagacagactactcaggatgcccctgaagaggttcgtaaccgtgacttcaggagagagttggaagaaagagagagagctgctgcaagagagaaaaatagggatcgtccaacccgagaacatacaacctcctcttcagtgtcaaaaaagcagtttaatgtttaaattctggtgggacctagaagcttaaaatcaatttgcagttttctacaaacaggacagtgaaaaacctgagtggcatccaatgagtgatatcctaactatgtatacaattcagcagttaattctagagttaattgatggagttactcataatagttaaaacaggaaacctaatttcaactgaaatttaatgattattcatttgaaattattttcttctgagaatttagcacacttttttgcacttttgagtatctttgctgctagcttaaagttgttttgagctacataaaattgttttgactttcttagggtgatacgttgtacatatgtactgtgttttggtagtgtgtattttccctccaatcttctgggctctcacttctaacagatgaggaagatgaagattttgaagaagaaagtgatgatgatgatactgcagctcttcttgcagaactggaaaaaattaaaaaagaaagagctgaagagcaggccaggaaggaacaagaacaaaaagctgaagaagagaggattcgtatggaaaacattctgagcggaaaccctctccttaatctcactggcccatcccagcctcaggccaacttcaaagttaaaagaaggtgggatgatgacgttgtcttcaagaactgtgcaaaaggtgtagatgaccagaagaaagacaaaagatttgtaaatgacacactgcgatctgaatttcacaaaaagttcatggagaaatatattaaatagtacagttttatgtgcttaattaaagactgtaaaacgtaaaaaaaaaaaaaaaaaaaaaaacgtattacaattcactggccgtcgnnnnnnn

SEQ ID NO: 23385 - DNA, 2360 bp, Homo sapiens; identical to SEQ ID NO: 21878

SEQ ID NO: 23386 - DNA, 2471 bp, Homo sapiens
  misc_feature 1, 1183, 1184, 1185, 1186, 1187, 1188, 1189, 1190, 1191,1192, 1193, 1194, 1195, 1196, 1197, 1198, 1199, 1200, 1201,1202, 1203, 1204, 1205, 2469, 2470, 2471: n = A,T,C or G
nagcgaatgcttttataccacagagtatttttgcccacgtgtttagaagttgtgttttgaaaacgcgtttctgtctcccccacgctcattaccacagggaatgtcccccatgtaccaattcacaccaatggggggccatgttagaatccgcctccgtaactatggttggctccatttgatataatccgtccagaaacgacacagtgaaccatacagctgagcttgagtagttgtattcctccttcatcttaacatctggcacatgagaagaaagaggttaggtcactgaggcagttaaatataggtgatccctttagacataagcagcagaagaccttggtgccaggggtggaggcgcggcagaaggggtggtatgtaccttagctgtgaggggggctgctgaaggcatggaggacagtaatgacggctgtgcctccttggatggtggagacctcagaaatggtctgcaacacaggcactaggtcagtttcccgcccttagctgaatgcagatggatgctgggagatggatatggtgagatggtgtggggaggatgttagaaagctggaggtgtttatcacttctcaaggagctctgaatatagggggaaaaaaacaacaaaaagacaagcccagggagaaagcaccattaaggatatacctatgccagcttctatagctgcacctgctttattggcaggtcacttgccacaattgcatctgccctctaaactttttaattttcacactgtatcctagacatgaatgcataaaatacagtgtctggcgggataatgcagagaggtaccatcttgattttccccagttacattcacctggtctggtctctgtaagcttagaagagtagaatcactttattttttaaagacttccggccaggcacggtggttcacgcctgtaatgccagcactttgggaggccgaggcgggtggaccacctgaggtcaggagttcaagaccagcctggccgacatggcgaaaccctgtctctactaaaaaaaaaaatacaaaaagattagctgggtgtggtggtgtgtgcctataatcccagctactcaggaggctgaggcaggagaattcttttaacccaagaggcggaggttgcagtgagccaagatcacaccactgcactccagcctgggcgacagaatgagactctgtctnnnnnnnnnnnnnnnnnnnnnnnttttttttccaagtacaagatgttaccactgacaaaagggtctcatatgaatgatggaggtttctgttaccgtatgcccataaaggggcctgaaaccaaatatgatttgaatagaaaagaccttgggaaacataagtagcactttggggctaagctgcgaaggcactcgtattgtacaagtaatttcgaagagagcctaaatttgctacccccctgcttctacagggtataccagatttttgctgtcttgggacactgagctcatggaagcctgtggaggaaactaaccggtaagctggggatctaggtagtcatccaagagtctggagggagaagaaatttgttacttccacagctggggtcctgtagaaccatactaatgtacaaatggatgctgaaaaatacctgcatagtttcaaaacaaaactccctctccactcccagttactgacatgatgcttcttggctatctcataaggagtagcagtatgaatactttctggctccttcctaatacgttgacctgtcatacgcgcattcacttagaatttcttttgcacaactaaagttgaataagatcagaaaaatagctgagccccgctatgggactggaagtgaaggggcctccagaacctcctggccctttcacttcacccatgccaaatatggcttcttcaagccagaatccaggccccataaaccaaactagaattctggcctcttgccaactcttccctcaggcaaagcacagccagagaaggggcagcaagaactgccttgatctcccttgctctgtgtgggtctggtgacaccctccaccttcccacgctctttcagtgttgctatcattcctatcagcaagagcttccagagcaaccaggtgagggaccttagggccttgggaatttagggggtggggataggggatgtcaagatgcctcgttttgggataaatgcactcgggcctctgaaaagcaggaggcccctggtccctgagaggatgttaaaaattaaatactaagaataaataaatagctcccaaatgacacgagtcaaggaatgaaggctcctgtccaatcgagttaggagacctctccctcccagggaaggatccagaaatctccaacgtgcaggcctgggggctgggttgtggatatcgacactgggtagggtgcggtggggttaggtgtagctgctgaggtcagagcagaggcaaggtggctggcccgccggaggggcaggctgatccaagacggcggtcgannn

SEQ ID NO: 23387 - DNA, 1557 bp, Homo sapiens
ccaaatatacaaaaaattagctgggtgtggtggcgggcgcctgtaatcccagctactcgggaggctgaggcaggagaaccgcccgaacccgggaggcggatgctgcagtgagcagagaccgcgccattgcgatacagcctgggcaacaagagcaaaacttcgtcccaaaaaaaaaaaaaaactacttaaatatcattaagataaatttatgtactcctataaagacaaatatcccttaagtaaagccagtctaccatttgtttaggagagatggtttttagattcccttcttctaaaaagtaatttgacctcttcacttcatcccaaatccctgagattttgaaaggataatgccaccaatttggagctctttcaaaggatttatttgctacagaattgcttgagtccaccaatgagaagaactcaggatttctgtgtttaaaaggattttgcttactgctttatttttacaagtgctgccatatccaaaaagcacttctttttgccagcatttggcatgtctataagaggttagaaaaagtcagaatctatagaattgatgtctaaaaataggaaaaaaaaaagaatatttaaaaattcctcatttggataggtcctgagttgaaaacacattcatctgcaaaataacttttttaggtcagaatgctatatttttaaccacagatgctgaccttgaccttgactggtaaatatttccaggcaccatatggatgacaggacagacgccattcagttggccaaatctgatatatgccctacttggcttgtgaaaatttttgagtatctcttaaccccaaacctcctggttctctgaaactgattgtcttaatctgattcccaatacttttaaaaacaaataaacaaaacattccctgaaagatcacacatataagtatttgttgcctgtgaatagatacagagaaaccaagtacaaatgtgcattaacaattcagtgacgtagctgtggatctctggatggctatgtaagctgtgagaaagtcccccactggctttgcacttgctgcgcaccagaggtgaccatccaggcagtatcaacctgaagagggggtgaatcccagcagctgctcgatgggcttaaaccgccactcgtcagcctccagctcttctaccaaaccagctagtttttccatccgagcaacttgctgatcatgtttcacctgtttaagcgtggatgccacttgatagctaaaaacagattcgcagaggaatctctcagagccatcttctaacatctctccagctcctttggggtaggtgaaaagggctttccgtggtggggcaaggtctgagacactgaaaccagatccagtgacagaacttccactgaccccaccagctgaggaggatgatgatgaagcagccatttcctctctagcagagttcttacttcactcagcggctttagcactttcccctacagccccacccccaggaccagcctgagtggctgcgctcaccacgacgaggaccgcggcgtgttcgccccccaacagacggagccagcggcccccgcgt

SEQ ID NO: 23388 - DNA, 1643 bp, Homo sapiens; identical to SEQ ID NO: 21150
  misc_feature 1, 2, 3, 4, 1615, 1616, 1617, 1618, 1619, 1620, 1621, 1622,1623, 1624, 1625, 1626, 1627, 1628, 1629, 1630, 1631, 1632,1633, 1634, 1635, 1636, 1637, 1638, 1639, 1640, 1641, 1642,1643: n = A,T,C or G

SEQ ID NO: 23389 - DNA, 301 bp, Homo sapiens
  misc_feature 1, 2, 3, 4, 196, 211, 267, 300, 301: n = A,T,C or G
nnnngattctttgaacatattattgaactccaaaatgaattcgacctccattcaggcttcctgaaatctctgaagttgctgaaatttgtatataattttccttttccaatgcaagatctgctggtgacgggaatgactgtctggttttattatggtttataaattaataaatgggctatttaattctggaaaaaanaaataaaaaatttanggtccgcggggtcctggaacatttatgttccttttaaagaaacaaaaatcaaactntacagaaagatttgatgtatgtaatacatatann

SEQ ID NO: 23390 - DNA, 799 bp, Homo sapiens
  misc_feature 1, 2, 3, 4, 5, 756, 799: n = A,T,C or G
nnnnnaccccggagatccgtgcactgccttcagctctgggttgaacttacagctggactagaggatgggaaggcatcaaaaggaacccagcccaccaggaactaccagcttaggctctgaccaggaaagacaagtgttccaaaaggctttggggaaacttaaacccaacacgccatttgccgcgacgtcttcaatgggtttggaaacagaggaacaggagcccagcatcatcgggaagctgaaggtcgctggcatgctggcagtaggcaaagaagtcaacctggtcctactgctcaaaaacctgagcagggatacgaagacagtgacagtgaacatgacagcctggaccatcatctacaacggcacgcttgtacatgaagtgtggaaggactctgccacaatgtccctggaccctgaggaagaggcagaacatcccataaagatctcgtacgctcagtatgagaagtacctgaagtcagacaacatgatccggatcacagcggtgtgcaaggtcccagatgagtctgaggtggtggtggagcgggacatcatcctggacaaccccaccttgaccctggaggtgcttcaggccagcaatggcaatactctgactatcagcatctccagtcctgccagcgcacccataggacggtacacaatggccctccagatcttctcccagggcggcatctcctctgtgaaacttgggacgttcatactgctttttaacccctggctgaatgtggatagcgtctntatgggtaaccacgctgagagagaagagtatgttcaggaagan

SEQ ID NO: 23391 - DNA, 1715 bp, Homo sapiens
  misc_feature 1, 2, 1715: n = A,T,C or G
nngtacaacatttcaggatctactatttcattaaactgaggacaaattcataaaaataaaatagtcccggctaaaaaagaaaaaaagaaaaaaaatccattttcagatcttggaatgctccagtcttttgcaaagtcgatgagtggcttcagcactggggaaagaagcccgaaaggtgaccaatggaacctgtattcacagtcttcaaagttcccttttgaaacataaggaagaaaacgaagggaagaaggatttcacactttgggggcaaggggagatggtttctgttgatgtttagctatgaaagtgaaacagcaaagcatctatttatttgtctccaaaatctatgttttagcagcacaaagttttcaaagttcagaccatttatttatttttctttttacatgagaaagggtgtgtgttaacaggaatatggatattaacagaaacaagtgcctcacatacagttccttttttgctttctgtacactgctatctgctgctttgttggctgcgctctggatcactcgctgctcagactgcctaacacaaggacaaaactttgaagtaaaaaatgtgtcttttggtatatggaattgtcattaacatttgcctctctgcttgcagaagaagcacataacaacctgggaatcttttgtttttctctttcttttattaaactaagtcttgtttgtttaaatcagaaacaaattctcaagtaacaagaaccctttcccttttttctgcatcagcagtgaaagggtgtgtctttggattttatttaaagcatgaaatttttttttctgagagaggaaagaaaaaacaaacacaaaaccaaaaaccaaatccctaaccaaaaactttttttagaaaagaaaagtacacagccaattacacaaatggaaacaaatcctttagtatagaaaaaaaaagaatatttgaagctcctaccaaacaaggaggaaaagaaggggtacaaagaaaagccaaaagaaggataaataaaaaataaatgcacaaagctaacagacacaggtaactagaattatatgcctttaaaaagtttcaactccccaaccaaaaataatctgtgaggatcctaatgacccctagaatcccttgaaattctttctttagttttataaaataattctgcagctccctctaagaaatgaaggcagctaccttaagtgggagattataggacgggaggtgggagaaggaaagagaaagtggaattaagggacaagaaagagaaagtggaattaagggacaaggggagaaaagcttaggcgaatcaacggattgcaatctatcatctgctaggaatgaacaagacaacatcaaatgaggagctgtcagctggaccatacaaaaagctaaatgtacacaaaaggtttttttttttttttttccctttataaatctaccatacgggtcccaggttcattcccaagggaaacaaatctttacttccaaccaccccaaaaacggggggggcactattcttatgcactaacagtaccaggaagggtcgcgcttctctacaaacactctaatcttaccatagcggctacccagctccctccaacccaccttggcagatgccgtggggatcactcactgcgcactctatccggcagcgcggcaagtcatcactctcgccccccaccacaactggctaccaccacacacgcccccgacaacccaaagan

SEQ ID NO: 23392 - DNA, 687 bp, Homo sapiens
  misc_feature 1, 681, 682, 683, 684, 685, 686, 687: n = A,T,C or G
nacgtgggaaggcgtcggtccgggcccgccggcagctggcaaaaggggatgtctgcaaggcgaaagttgggtacgccagggtttgcccagtcacgacgttgtaaaacgacgggcagtgaattgtaatacgactcactatagggcgaattggccaagtgagctcgaattgcggccgcattttttttattttttttttttatttgcctttcctttttaatcctcttcttactccaactctttaaaaaaaaaactgcccagaaaacccagtaattaagcaaaagggagctcaaagagccaaggcaagccagcccaagagtagcagggtccctcccgcaggggccaaagtctggatgctggggtctccactcagagcctggtagtaaaagctggtgcagaataaggtcgttccggaagctagcaataacccagcccagagtggctttctgcaatggggcacccctaacagggccaggctgtgtaagaagtggtgtttgttggccttgtcaaacagctccttcccgtaggcatctgggaattgggcgccgtgcgccccgtaggaagcgaagcctaaggccgcagctccggacaaggcgcccaagcggcggaaagctgcagctggcccggccatagctgtagaacaggacgcaccggaccaacgcctctagaagactttcgacgcgnnnnnnn

SEQ ID NO: 23393 - DNA, 2883 bp, Homo sapiens
  misc_feature 2883: n = A,T,C or G
gacgcgtgggcacgccccggagcggccacaatcacagctccgggcattgggggaacccgagccggctgcgccgggggaatccgtgcgggcgccttccgtcccggtcccatcctcgccgcgctccagcacctctgaagttttgcagcgcccagaaaggaggcgaggaaggagggagtgtgtgagaggagggagcaaaaagctcaccctaaaacatttatttcaaggagaaaagaaaaagggggggcgcaaaaatggctggggcaattatagaaaacatgagcaccaagaagctgtgcattgttggtgggattctgctcgtgttccaaatcatcgcctttctggtgggaggcttgattgctccagggcccacaacggcagtgtcctacatgtcggtgaaatgtgtggatgcccgtaagaaccatcacaagacaaaatggttcgtgccttggggacccaatcattgtgacaagatccgagacattgaagaggcaattccaagggaaattgaagccaatgacatcgtgttttctgttcacattcccctcccccacatggagatgagtccttggttccaattcatgctgtttatcctgcagctggacattgccttcaagctaaacaaccaaatcagagaaaatgcagaagtctccatggacgtttccctggcttaccgtgatgacgcgtttgctgagtggactgaaatggcccatgaaagagtaccacggaaactcaaatgcaccttcacatctcccaagactccagagcatgagggccgttactatgaatgtgatgtccttcctttcatggaaattgggtctgtggcccataagttttaccttttaaacatccggctgcctgtgaatgagaagaagaaaatcaatgtgggaattggggagataaaggatatccggttggtggggatccaccaaaatggaggcttcaccaaggtgtggtttgccatgaagaccttccttacgcccagcatcttcatcattatggtgtggtattggaggaggatcaccatgatgtcccgacccccagtgcttctggaaaaagtcatctttgcccttgggatttccatgacctttatcaatatcccagtggaatggttttccatcgggtttgactggacctggatgctgctgtttggtgacatccgacagggcatcttctatgcgatgcttctgtccttctggatcatcttctgtggcgagcacatgatggatcagcacgagcggaaccacatcgcagggtattggaagcaagtcggacccattgccgttggctccttctgcctcttcatatttgacatgtgtgagagaggggtacaactcacgaatcccttctacagtatctggactacagacattggaacagagctggccatggccttcatcatcgtggctggaatctgcctctgcctctacttcctgtttctatgcttcatggtatttcaggtgtttcggaacatcagtgggaagcagtccagcctgccagctatgagcaaagtccggcggctacactatgaggggctaatttttaggttcaagttcctcatgcttatcaccttggcctgcgctgccatgactgtcatcttcttcatcgttagtcaggtaacggaaggccattggaaatggggcggcgtcacagtccaagtgaacagtgcctttttcacaggcatctatgggatgtggaatctgtatgtctttgctctgatgttcttgtatgcaccatcccataaaaactatggagaagaccagtccaatggcgatctgggtgtccatagtggggaagaactccagctcaccaccactatcacccatgtggacggacccactgagatctacaagttgacccgcaaggaggcccaggagtaggaggctgcagcgcccggctgggacggtctctccataccccagcccctctaactagagtggggagcatgccagagagagctcaatgtacaaatgaatgcctcatggctcttagctgtggtttcttggaccagcggcatggacatttgtcagtttgccttctgacggtagcttttggaggaagattcctgcagccactaatgcattgtgtatgataacaaaaactctggtatgacacattttctgtgatcattgttaattagtgacatagtaacatctgtagcagctggttagtaaacctcatgtgggggtggggtgggggtgtattccttgggggatggtttgggccgaatggggagtggaatatttgacatttttcctgttttaaattctaggatagattttaacatcctttgcggtcccagtccaaggtaggctggtgtcatagtcttctcactcctaatccatgaccactgtttttttcctatttatatcaccaggtagcctactgagttaatatttaagttgtcaatagataagtgtccctgttttgtggcataatataactgaatttcatgagaagatttattccaccaggggtatttcagctttgaaaccaaatctgtgtatctaatactaaccaatctgttggatgtgggttttaaaaaatgtttgctaaactacccaagtaagatttactgtattaaatggccttcgggtctgaaaagcttttttaacttcttgcttaaaatgcgttttattttgataagatacttcaaatagcctccaaaagtgtagatccaatcacttaaataaacctgtatgtatatgcatatgtgtacatgcatatcccctcaccacaacaaaaggggggccgaaacacaccagggcgcgaacagaacgcacgtagtagtaagaggcaataggggtaaaacaggcgagaaactacagcgaagcacggagagaaaccacagtgggtggaccacacacaacaaacagtgcaagccan

SEQ ID NO: 23394 - DNA, 1674 bp, Homo sapiens
  misc_feature 1, 2, 3, 4, 5, 7, 9, 10, 15, 20, 22, 23, 24, 1646, 1647,1648, 1649, 1650, 1651, 1652, 1653, 1654, 1655, 1656, 1657,1658, 1659, 1660, 1661, 1662, 1663, 1664, 1665, 1666, 1667,1668, 1669, 1670, 1671, 1672, 1673, 1674: n = A,T,C or G
nnnnncnannttttnaaaancnnnaaagttaactggtaagtttagtctttttgtcttttatttcaggtccgggatccggtgatccaaatctaagaactgctcctcagtgagtgttgcctttacttctaggcctgtacggaagtgttacttctgctctaaaagctgcggaattctaatacgactcactatagggagtcgacccacgcgtccgctttggcctgggactctgcccctctacctcagcacagaatcgccccgggtcctactacagaatcaatccttgaacactgcctccacgtcgccggctcaatctgggcgagaacccagacttccaccgcagccccgcaatctgcagacctcagcggcagcgcaggtggcagacctgcctcctttgcctgtgagtcatggcagctcccatgaatggccaagtgtgtgtggtgactggtgcctccaggggtattggccgtggcattgccttgcagctctgcaaagcaggcgccacagtttacatcactggccgccatctggacacccttcgcgttgttgctcaggaggcacaatccctcgggggccaatgtgtgcctgtggtgtgcgattcaagccaggagagtgaagtgcgaagcctgtttgagcaagtggatcgggaacagcaagggcgtctagatgtgctggtcaacaatgcttatgcaggggtccagacgatcctgaacaccaggaataaggcattctgggaaacccctgcctccatgtgggatgatatcaacaacgtcggactcagaggccactacttttgctcagtgtatggggcacggctgatggtaccagctggccaggggctcatcgtggtcatctcctccccaggaagcctgcagtatatgttcaatgtcccctatggtgtgggcaaagctgcgtgtgacaagctggctgctgactgtgcccacgagctgcggcgccatggggtcagctgtgtgtctctgtggccggggattgtgcagacagaactgctgaaggagcatatggcaaaggaggaggtcctgcaggatcctgtgttgaagcagttcaaatcagccttctcatctgcggaaaccacagaattgagtggcaaatgtgtggtggctttggcaacagatcccaatatcctgagcctgagtggtaaggtgctgccatcctgtgaccttgctcgacgctatggccttcgggatgtggacggccgccccgtccaagactatttgtctttgagctctgttctctcacacgtgtccggcctgggctggctggcctcctacctgccctccttcctccgtgtgcccaagtggattattgccctctacactagcaagttctaaccctcctggtctgacactacgtctctgcttgtcttctcatttggacttggtggttcgtcctgtctcagtgaaacagcagcctttcttgtttacccatacccttgatatgaagagaagccctctgctgtgtgtccgtggtgagttctggggtgcgcctaggtcccttctttgtgccttggttttccttgtccttctttttactttttgccttagtattgaaaaatgctcttggagctaataaaagtctcatttctctttcaaaaaaaaaaaaaaaaaaaaaaaaaaaaaaaaaaaaaaaannnnnnnnnnnnnnnnnnnnnnnnnnnnn

SEQ ID NO: 23395 - DNA, 2361 bp, Homo sapiens; identical to SEQ ID NO: 20124
  misc_feature 1, 2, 3, 2361: n = A,T,C or G

SEQ ID NO: 23396 - DNA, 4611 bp, Homo sapiens
  misc_feature 4610, 4611: n = A,T,C or G
cgcgtccggttcccggaggacacgggcacgtacacctgcgaggcctggaacagcgctggagaggtctcgcacccaggccgtgctcacggtacaagagcctcacgatggcacccagccctggttcatcagtaagcctcgctcagtgacagcctccctgggccagagtgtcctcatctcctgcgccatagctggtgacccctttcctaccgtgcactggctcagagatggcaaagccctctgcaaagacactggccacttcgaggtgcttcagaatgaggacgtgttcaccctggttctaaagaaggtgcagccctggcatgccggccagtatgagatcctgctcaagaaccgggttggcgaatgcagttgccaggtgtcactgatgctacagaacagctctgccagcagcccttcacgggggagggagcctgccagctgcgaggacctctgtggtggaggagttggtgctgatggtggtggtagtgaccgctatgggtccctgaggcctggctggccagcaagagggcagggttggctagaggaggaagacggcgaggacgtgcgaggggtgctgaagaggcgcgtggagacgaggcagcacactgaggaggcgatccgccagcaggaggtggagcagctggacttccgagacctcctggggaagaaggtgagtacaaagaccctatcggaagacgacctgaaggagatcccagccgagcagatggatttccgtgccaacctgcagcggcaagtgaagccaaagactgtgtctgaggaagagaggaaggtgcacagcccccagcaggtcgattttcgctctgtcctggccaagaaggggacttccaagacccccgtgcctgagaaggtgccaccgccaaaacctgccaccccggattttcgctcagtgctgggtggcaagaagaaattaccagcagagaatggcagcagcagtgccgagaccctgaatgccaaggcagtggagagttccaagcccctgagcaatgcacagccttcagggcccttgaaacccgtgggcaacgccaagcctgctgagaccctgaagccaatgggcaacgccaagcctgccgagaccctgaagcccatgggcaatgccaagcctgatgagaacctgaaatccgctagcaaagaagaactcaagaaagacgttaagaatgatgtgaactgcaagagaggccatgcagggaccacagataatgaaaagagatcagagagccaggggacagccccagccttcaagcagaagctgcaagatgttcatgtggcagagggcaagaagctgctgctccagtgccaggtgtcttctgaccccccagccaccatcatctggacgctgaatggaaagaccctcaagaccaccaagttcatcatcctctcccaggaaggctcactctgctccgtctccatcgagaaggcactgcctgaggacagaggcttatacaagtgtgtagccaagaatgacgctggccaggcggagtgctcctgccaagtcaccgtggatgatgctccagccagtgagaacaccaaggccccagagatgaaatcccggaggcccaagagctctcttcctcccgtgctaggaactgagagtgatgcgactgtgaaaaagaaacctgcccccaagacacctccgaaggcagcaatgccccctcagatcatccagttccctgaggaccagaaggtacgcgcaggagagtcagtggagctgtttggcaaagtgacaggcactcagcccatcacctgtacctggatgaagttccgaaagcagatccaggaaagcgagcacatgaaggtggagaacagcgagaatggcagcaagctcaccatcctggccgcgcgccaggagcactgcggctgctacacactgctggtggagaacaagctgggcagcaggcaggcccaggtcaacctcactgtcgtggataagccagaccccccagctggcacaccttgtgcctctgacattcggagctcctcactgaccctgtcctggtatggctcctcatatgatgggggcagtgctgtacagtcctacagcatcgagatctgggactcagccaacaagacgtggaaggaactagccacatgccgcagcacctctttcaacgtccaggacctgctgcctgaccacgaatataagttccgtgtacgtgcaatcaacgtgtatggaaccagtgagccaagccaggagtctgaactcacaacggtaggagagaaacctgaagagccgaaggatgaagtggaggtgtcagatgatgatgagaaggagcccgaggttgattaccggacagtgacaatcaatactgaacaaaaagtatctgacttctacgacattgaggagagattaggatctgggaaatttggacaggtctttcgacttgtagaaaagaaaactcgaaaagtctgggcagggaagttcttcaaggcatattcagcaaaagagaaagagaatatccggcaggagattagcatcatgaactgcctccaccaccctaagctggtccagtgtgtggatgcctttgaagaaaaggccaacatcgtcatggtcctggagatcgtgtcaggaggggagctgtttgagcgcatcattgacgaggactttgagctgacggagcgtgagtgcatcaagtacatgcggcagatctcggagggagtggagtacatccacaagcagggcatcgtgcacctggacctcaagccggagaacatcatgtgtgtcaacaagacgggcaccaggatcaagctcatcgactttggtctggccaggaggctggagaatgcggggtctctgaaggtcctctttggcaccccagaatttgtggctcctgaagtgatcaactatgagcccatcggctacgccacagacatgtggagcatcggggtcatctgctacatcctagtcagtggcctttcccccttcatgggagacaacgataacgaaaccttggccaacgttacctcagccacctgggacttcgacgacgaggcattcgatgagatctccgacgatgccaaggatttcatcagcaatctgctgaagaaagatatgaaaaaccgcctggactgcacgcagtgccttcagcatccatggctaatgaaagataccaagaacatggaggccaagaaactctccaaggaccggatgaagaagtacatggcaagaaggaaatggcagaaaacgggcaatgctgtgagagccattggaagactgtcctctatggcaatgatctcagggctcagtggcaggaaatcctcaacagggtcaccaaccagcccgctcaatgcagaaaaactagaatctgaagaagatgtgtcccaagctttccttgaggctgttgctgaggaaaagcctcatgtaaaaccctatttctctaagaccattcgcgatttagaagttgtggagggaagtgctgctagatttgactgcaagattgaaggatacccagaccccgaggttgtctggttcaaagatgaccagtcaatcagggagtcccgccacttccagatagactacgatgaggacgggaactgctctttaattattagtgatgtttgcggggatgacgatgccaagtacacctgcaaggctgtcaacagtcttggagaagccacctgcacagcagagctcattgtggaaacgatggaggaaggtgaaggggaaggggaagaggaagaagagtgaaacaaagccagagaaaagcagtttctaagtcatattaaaaggactatttctctaaaactcaaaaaaaaaaaaaaaaactcaagatagtaaaagcacctagtgtgatagattatcggttaggtcatttgtgggttgattcttcagaaacagcagttgatacctagcagcgttattgatgggcattaatctatgttagttggcaccttaagatactagtgcagctagatttcatttagggaaatcaccagtaacttgactgaccaattgattttagagagaaagtaaccaaaccaaatatttatctgggcaaagtcataaattctccacttgaatgcgctcatgaaaaataaggccaaaacaagagttctgggccacagctcagcccagagggttcctggggatgggaggcctctctctccccaccccctgactctagagaactgggttttctcccagtactccgagcaattcatttctgacaagcagttgagccacttttttccaaatgtcccctgcagatgttcaaactcctccatttctctttccccttccaccttgcagttttggctggactctccactggtcatggagtgtacagcattaggcacattatgcttctgcgattctgaagacggtcccggtcatggatagactctgggtcccttaggaaaatattttcttccaaattccagaggaagtttagttattccccttttgcaaatgtctacgcggtcgcgactttggcttacaccctgggacacacaaatcttgcgaatgtgttccttggcaccagctctatttggggggtaacatcacgctcgacgtggagactcgtgtggaaatgcagaacgtgggcaagaggtcaatcttgcgagaacgactagagaaagagacagaagtgtcccacgann

SEQ ID NO: 23397 - DNA, 1456 bp, Homo sapiens
caaacgctggaggatcattcatttatgaccggccatggtcataaacactttcttatagctgactgtttccctttccttgctgtgaaatgtctgaccactcaacatgggttttctgctgcctcccgtggcccttacctcctcggctgagtccgtggaccagaggcctctctcttccccgctcaacctccggccctttggcgtttgggcagatacaggcatcagcttctctaactctgcagcacttttgcttctgtcttgattcctctgctttttaggcacagttttcttctctaagaaagcgttcttgttctctagcttcctgttctctctagtgtcctcagcctttctcggggtcttctttttcctcctgcctctgacatcggtatcctcctcagcactcatggcactgtctaggggcttctcaaagccatgctccagccccatgtcctgccctgctctctctcttgcacttttagtgttttgtttctcttctctgctgtcggaatgtagcccttcactgtcatcctctggaaagggagaatcattaagtacacttgattcagattccacctgggattcgacaaatttttctttttttgtttttctattttctttgggatcttctcttgttttcgtctttaaatctcttatttcaccctttttaactttctttaattcttttgtttcttttacttcatcttttttgggctttttggactcctttagttcttctttggcttcagaaattcttttctttgtccttaaatcaaaaactaaactttccaaggagctctccaggtctggtttggacttgtcttttagcttcccggcctttgcttttttctttttcagatcatctgggcttttctcttctctctgcctcaattttttctttttcttctttggggaagtatcttcttttgtctcactttgctgatcgctatcagagttcgcctcaaatatgtcgttatttaaggatagtctctgaatatccttcctgactgctttggctttgttctctgcaattttcttcctaaattcaagaagcacttctttacagtcctccaggtgaatctcgggctcccaggtatcatcatccgatgtatagcctttccagcgaactttgtaaagaactttacccccctcggtcttcatgtccaggatcttctccacctcgaacacatcctctccgtcctcctcactgtcgccaaaggcctccgctcctctcgcggctgcgtcattatcttcgcccactactccaactccttcttcgacttcggccaactcctcagtgctgtcggcagctgacacagggactgcggtcacccttgctccctccgcaacctgctccatcctagcagctccgcaaaccgccgaggaaaacccgctgcgacaaacaccccagcagcccctcgcgttccgcgctcggccctactccaccggacgcgtggtcgac

SEQ ID NO: 23398 - DNA, 2019 bp, Homo sapiens; identical to SEQ ID NO: 22489
  misc_feature 2005, 2006, 2007, 2008, 2009, 2010, 2011, 2012, 2013, 2014,2015, 2016, 2017, 2018, 2019: n = A,T,C or G

SEQ ID NO: 23399 - DNA, 3996 bp, Homo sapiens; identical to SEQ ID NO: 23022

SEQ ID NO: 23400 - DNA, 2174 bp, Homo sapiens
tatagggagtcgacccacgcgtccgcgtccctggccacgtcgcgggcgatctcgccatcttcgccgcttcctctcaggggccgccgcctcctgagccgcccagccccggggccgccgcgctgcgccgaccgccaccgccgccgccgccatgaacattttccggctgactggggacctgtcccacctggcggccatcgtcatcctgctgctgaagatctggaagacgcgctcctgcgccggtatttctgggaaaagccagcttctgtttgcactggtcttcacaactcgttacctggatctttttacttcatttatttcattgtataacacatctatgaaggttatctaccttgcctgctcctatgccacagtgtacctgatctacctgaaatttaaggcaacctacgatggaaatcatgataccttccgagtggagtttctggtggtccctgtgggaggcctctcatttttagttaatcacgatttctctcctcttgagatcctctggaccttctccatctacctggagtccgtggctatccttccgcagctgtttatgatcagcaagactggggaggccgagaccatcaccacccactacctgttcttcctgggcctctatcgtgctttgtatcttgtcaactggatctggcgcttctactttgagggcttctttgacctcattgctgtggtggccggcgtagtccagaccatcctatactgtgacttcttctacttgtacattacaaaagtactcaagggaaagaagctcagtttgccagcataagtgccaaagaccatcaccagcatctgtccttcagggtgctcggacagaattcttaccacagcaaaggcataagatgcttgatacggaaaatcagaaacttaactcttttgttgcagatagtcatcagtggctctgtaaaaacgcagaggaaaagagccagaaggtttctgtttaatgcatcttgccttatctttttttattactgtgtacaaagatttttttacacaaagaaacttaatgctgtattaataaattcagtgtgtagcttcaattgggatagttccaaaagtgaagattttgtgaggaataagtgcaaattttttttttattttaaaaaattctttgaaactcttaagtctttgtgtctgcaatgaaattgtactccttgacagttgatagattatatattcttccatccctcaaacttgcattccactatatttattttttggcaaaagatgagctgtatttgtttgaaatctgagacactatgttcaattggatgtatctgttcaaatttattcccacgtgacgtggaagtccttcgttggatgtcacaacactacatttaaggttggtaaggatgacttggaggtccatggttttcattaccaacattttaagattctgaatgtcgatggagtctcactgaagagtcaccaaaggtgcctgccctcctcccctgctgggaagtgtcagttggagactgtcccaagggtgctgaagaatccagtggcaggggttctggctgctttccatctgagtgtgggatgggaggggtgttcatgatcatttggatatagcaatctactctgagaaatggaacacaaggagttacctatcactttcacttataattccaaaagatgactacaaccatgtccatgctcagattcaaacagttttccatatcacttttgggtggtaagatgatttaattacagttttttttttaattggcagcaccactaaccattccttacattcttttttgtatgtgtggttttctttttatttaacccgcagccgacatcgtagtttcttgttttgttttgttttacagagctgttgcatgacttatgttaccatcctaaaaaacactatattaaacatggaataaattgtctttttatgaattaggctttttgaacatcctgtgttgggatttttttgtttttcaattggcaacaaaagctctgtagggctgcagacatttaaagttcacataatcatctgtaagacattatgtattttgtggaaatactagaatttttttcctgattttgccattatatggatttgctattttttgattaatgcaaaagtatatgactttgtttttttatgtgatacaccataaatattaaagtgttgaatactaaaaaaa

SEQ ID NO: 23401 - DNA, 4444 bp, Homo sapiens; identical to SEQ ID NO: 22727

SEQ ID NO: 23402 - DNA, 1120 bp, Homo sapiens; identical to SEQ ID NO: 22234
  misc_feature 1, 1119, 1120: n = A,T,C or G

SEQ ID NO: 23403 - DNA, 3181 bp, Homo sapiens
  misc_feature 1, 2, 3, 4, 96, 97, 98, 99, 100, 101, 102, 103, 104, 105,106, 107, 108, 109, 110, 111, 112, 113, 114, 115, 116, 117,118, 119, 120, 121, 122, 123, 124, 125, 126, 127, 128, 129,130, 131, 132, 133, 134, 135, 136, 137, 138, 139, 140: n = A,T,C or G
  misc_feature 141, 142, 143, 144, 145, 146, 147, 3181: n = A,T,C or G
nnnncccgggatccggtgggtggtgcaaatcaaagaacctgctcctcagtggatgttgccctttactttctaggccttgtccgggaagtgttactnnnnnnnnnnnnnnnnnnnnnnnnnnnnnnnnnnnnnnnnnnnnnnnnnnnncacgcgtccgccggccgctgggccgctgcctgagccagggaggcgcagcgcgagctcccacttcgtcttcatggattcccagcccagctgcgtggtggtgactggttttgggcccttccggcagcacttggtgaattccagctgggaagcagtgaaggagctctccaagctgggcctggggaatgaaacagtggtgcagctgcggactctggagctgcctgtagattacagggaggctaagcggagggtcaccggaatctgggaagatcatcagccgcaactcgtcgtgcatgtgggcatggacaccgccgccaaggcgatcattctggaacagtctggcaagaaccaaggctaccgggacgccgacatccgcagcttctggcccgagggcggcgtgtgcctacctggcagcccagacgtgctggagtcaggggtctgcatgaaggcagtctgcaagcgcgtagctgtggagggtgtcgacgtgatcttttcccgagatgcaggcagatacgtctgtgattatacctattacctgtctctgcatcatggaaagggctgcgcggcactcatccatgtccctccactatcgcgcgggctcccggccagcctgctgggaagagccttgagaggtcatcatccagcaaatgctggaagagggtgattgtgaacatctggtgagagaatggatgtgaaggtctttttagcaacattagaacactacaaaaatcacacatctgaatgatttaatggagggagaaacagatagcttccctgtcgtctttactggcaatttgcatgctgagaaagctcagctgtcagagaagaggcaatgcttttctggagaacgcttccaggcaacatgcgtgaacacacgtgccccacatagctcagcttccctgccaccaaagtgtagtgatgcttccaggagggacaaaaccaaaccagagacagaaatgcatacagaattattttatttaacttaaaccatgtagtactttactagaaaaaagcagagtaagagaaactaacgttgccttagcttcagccattcaaaatagacagtttcttttttccattatgtaaagaatccagagtatatcgcaataacaggaataaattcttacaacagaatatacaaaaacattttgaaatttttttcatctactgattttttatataaacaggattttttaggaataatttatacacagaaagtcattttatgtaacaaattggccatgttattacctttttttttcttacttaaaaaaatttttttttaacaagaaaactcagaaaatgcattatttgcggtgcatccattccatcccgccttctggtttgattttttttatcccagacaaagggatacccagaggtagacaaactctggcaaacctctcacctcaacctcactggcttagaaagcagacaggtgttttcaccgggcgtctcttccaccggtggatgtgtgtgtgcaacgccaaacatccaaatgaaaagttgaaaacaaaacccaaatagtttccagatctttctcctatgtagcgcaaaaaccccaggtgtttcccatgatagagatattgtggagttggggagacatggccaacaatccactggagttagaggaagtggagtcaactttaaaaccaatttttgtgtatgttatagtttttattaaaaattcttttctgtattggaaatacgtatcttcggggttctgccttaaataaaatagggtctcttctgtgttctaacaaagcagtaatcaatcatgatacgaggcatgtaagcaaatggcctgtgtgccccatagctgtcatcgtttatgtgatcactgtgtatgctgtaatcatcatgaaaaccattggctgtgcagtcaagtcttcccatgtccatggcactgtgctgacaatgacggcagccagaccaatcaagccagatgccgaacggtgccatgcactgctgggctccaacacctcggctgtttccatggccaatgaggttctttccatctgttaaagtagctacactccaaagggaaatgaccagtaaaaaatgatccccttcccaaccagagggttctggaagaccaagatactgaagatacagaactactttttaaatcatcatcattcctttgttataaactagggcaaaaagcatggggggaaaagagggtgaaccacggatggggtcagggagaaatccttttttggcatattgtaaagctagctagtaaacaggtgtcctaaaaaaaaaaaaaaaaatggatcacaaacacacatttgcacacacagagaaaaaaaaagtgtctttaaattattttcggcaattataaactacaaacattttataaaattattctgttcttacaaaaatgcaatgaaacatttaattagttcttgtaaaccagatcttcgtcaactgactacccgtaatctactggacttaagagccctattgaaaacgctaatgagtgactagttaaaacaatgttgaccagaaagatgcggacacacacacgtgggacataaaaatgagtgatcgttatgttctcgcagaaacaaaacgctaaagtcatgccccagaactgacaactgacgagtgcgatgtagtttgtgttcttgaacaattcgccttaactccgagatcagtttccagagtaggatgttaggtttctttgttgaaaccaaatgcccacggatgactgctgagcctcgatgtggtctgatagcttcaagaacaatcaagttcaaaaccttgcccacattccttccaagccctgcaccctgctgctcgtaactcttctctgtgccaggatccctgtgacaatggttctgtacccaccacccggtcattccaccatcaaggagcactcacttctccaaatgacgcaaccagtcatctaagatgaaggccaaaaatgaaaccctctgacctgtccaaggtctgtatcttcagcatctctggcaacagaggttcagtctaaataacatcctctcttgaagttctccggacgcgtgggtcgacn

SEQ ID NO: 23404 - DNA, 4489 bp, Homo sapiens
  misc_feature 1, 4489: n = A,T,C or G
ncgagggtgcgatggcgcggacgcgggaccgcgtacgccctgctgcttctcctgatctgctttaacgttggaagtggacttcacttacaggtcttaagcacaagaaatgaaaataagctgcttcctaaacatcctcatttagtgcggcaaaagcgcgcctggatcaccgcccccgtggctcttcgggagggagaggatctgtccaagaagaatccaattgccaagatacattctgatcttgcagaagaaagaggactcaaaattacttacaaatacactggaaaagggattacagagccaccttttggtatatttgtctttaacaaagatactggagaactgaatgttaccagcattcttgatcgagaagaaacaccattttttctgctaacaggttacgctttggatgcaagaggaaacaatgtagagaaacccttagagctacgcattaaggttcttgatatcaatgacaacgaaccagtgttcacacaggatgtctttgttgggtctgttgaagagttgagtgcagcacatactcttgtgatgaaaatcaatgcaacagatgcagatgagcccaataccctgaattcgaaaatttcctatagaatcgtatctctggagcctgcttatcctccagtgttctacctaaataaagatacaggagagatttatacaaccagtgttaccttggacagagaggaacacagcagctacactttgacagtagaagcaagagatggcaatggagaagttacagacaaacctgtaaaacaagctcaagttcagattcgtattttggatgtcaatgacaatatacctgtagtagaaaataaagtgcttgaagggatggttgaagaaaatcaagtcaatgtagaagttacgcgcataaaagtgttcgatgcagatgaaataggttctgataattggctggcaaattttacatttgcatcaggaaatgaaggaggttatttccacatagaaacagatgctcaaactaacgaaggaattgtgacccttattaaggaagtagattatgaagaaatgaagaatcttgacttcagtgttattgtcgctaataaagcagcttttcacaagtcgattaggagtaaatacaagcctacacccattcccatcaaggtcaaagtgaaaaatgtgaaagaaggcattcattttaaaagcagcgtcatctcaatttatgttagcgagagcatggatagatcaagcaaaggccaaataattggaaattttcaagcttttgatgaggacactggactaccagcccatgcaagatatgtaaaattagaagatagagataattggatctctgtggattctgtcacatctgaaattaaacttgcaaaacttcctgattttgaatctagatatgttcaaaatggcacatacactgtaaagattgtggccatatcagaagattatcctagaaaaaccatcactggcacagtccttatcaatgttgaagacatcaacgacaactgtcccacactgatagagcctgtgcagacaatctgtcacgatgcagagtatgtgaatgttactgcagaggacctggatggacacccaaacagtggccctttcagtttctccgtcattgacaaaccacctggcatggcagaaaaatggaaaatagcacgccaagaaagtaccagtgtgctgctgcaacaaagtgagaaaaagcttgggagaagtgaaattcagttcctgatttcagacaatcagggttttagttgtcctgaaaagcaggtccttacactcacagtttgtgagtgtctgcatggcagcggctgcagggaagcacagcatgactcctatgtgggcctgggacccgcagcaattgcgctcatgattttggcctttctgctcctgctattggtaccacttttactgctgatgtgccattgcggaaagggcgccaaaggctttacccccatacctggcaccatagagatgctgcatccttggaataatgaaggagcaccacctgaagacaaggtggtgccatcatttctgccagtggatcaagggggcagtctagtaggaagaaatggagtaggaggtatggccaaggaagccacgatgaaaggaagtagctctgcttccattgtcaaagggcaacatgagatgtccgagatggatggaaggtgggaagaacacagaagcctgctttctggtagagctacccagtttacaggggccacaggcgctatcatgaccactgaaaccacgaagaccgcaagggccacaggggcttccagagacatggccggagctcaggcagctgctgttgcactgaacgaagaattcttaagaaattatttcactgataaagcggcctcttacactgaggaagatgaaaatcacacagccaaagattgccttctggtttattctcaggaagaaactgaatcgctgaatgcttctattggttgttgcagttttattgaaggagagctagatgaccgcttcttagatgatttgggacttaaattcaagacactagctgaagtttgcctgggtcaaaaaatagatataaataaggaaattgagcagagacaaaaacctgccacagaaacaagtatgaacacagcttcacattcactctgtgagcaaactatggttaattcagagaatacctactcctctggcagtagcttcccagttccaaaatctttgcaagaagccaatgcagagaaagtaactcaggaaatagtcactgaaagatctgtgtcttctaggcaggcgcaaaaggtagctacacctcttcctgacccaatggcttctagaaatgtgatagcaacagaaacttcctatgtcacagggtccactatgccaccaaccactgtgatcctgggtcctagccagccacagagccttattgtgacagagagggtgtatgctccagcttctaccttggtagatcagccttatgctaatgaaggtacagttgtggtcactgaaagagtaatacagcctcatgggggtggatcgaatcctctggaaggcactcagcatcttcaagatgtaccttacgtcatggtgagggaaagagagagcttccttgcccccagctcaggtgtgcagcctactctggccatgcctaatatagcagtaggacagaatgtgacagtgacagaaagagttctagcacctgcttccactctgcaatccagttaccagattcccactgaaaattctatgacggctaggaacaccacggtgtctggagctggagtccctggccctctgccagattttggtttagaggaatctggtcattctaattctaccataaccacatcttccaccagagtcaccaagcatagcactgtacagcattcttactcctaaacagcagtcagccacaaactgacccagagtttaattagcagtgactaatttcatgtttccaatgtacctgatttttcatgagccttacagacacacagagacacatacacattgatcttaaaatttttctcagtcactgatatgcaaaggaccacactgtctctgcttccaggagtattttagaaatgttccacaatttactgaagacatagagatgatgctgctgcttaggtgccttttagcaagctatgcaaacaatcctgataaaacaagatacatagagagtcaatctggcttctgagaatttaccaagtgaacagagtacctagttcatcagccgtccagtaaagcaacccaggaaactgactgggtctctttgcctaccgtattaacattaaacattgatgttctgtattctgtactttactgcacccagcagactttcaacaactcattgatccaaagatacatgcacagtctgagcaccagctatggtgctcataacttctttaagacttgaaccctttcaatctgtgtgattcattaaattggaccattgatgataagaatacacattgtatgtttctgtgcacatgacagtgtgtgtgtgtgcacgtacatactgtatagtcttaaaaatagcattatactggccaggggtggtggctaacgcctgtaatcccagcactttgggaggccgaggcgggtggatcaactgtggtcaggagtttgagatcagccaggccaacctggtgaaaccccgtctctactaaaaatacaaaaattagctgggcgtgatggtgggcgcctgtaatcccagctacttgggaggctgaggcaggagaatcacttgaacccgggaggcggaggttgcagtgagccgagatcgcaccattgcactccagtctgggccaacagagtgagatcccgtctcaacaaaaaaatgggaacagggaaacaaatgcattaataacctttcctggtctaaaccgcatgaaattttgaaccctccaattgggtgagttaaccacacaacgtattagtttaaaattgtgttctatggaaggatcttaaaaccgggtttaattcaaaggaacgaggcggtattccttttctttgtaan

SEQ ID NO: 23405 - DNA, 898 bp, Homo sapiens
  misc_feature 1, 2, 3, 4, 897, 898: n = A,T,C or G
nnnnccagggctattggttgaatgagtaggctgatggtttcgataataactagtatggggataaggggtgtaggcgtgccttgtggtaagcccgcgtaccatcttttccagagagagaaagtggaggtccagctgccagagctctaccacaaaataggtgttggcgcaatggcatggtctccacttgcctgtggaatcatctcaggaaaatacggaaacggggtgcctgaaagttccagggcttcactgaagtgctaccagtggttgaaagaaagaattgtaagtgaagaagggagaaaacagcaaaacaagctaaaagacctttccccaattgcggagcgtctgggatgcacactacctcagctagctgttgcgtggtgcctgagaaatgaaggtgtgagttctgtgctcctgggatcatccactcctgaacaactcattgaaaaccttggtgccattcaggttctcccaaagatgacatcacatgtggtaaatgagattgataacatactgcgcaacaagccctacagcaagaaggactatagatcataaggcaatgcatgaaccacagaagctgcatggttaaaatagcggcctgtgcccagtacagaaaggtgttactaaccagtcttttgaatcacttagcagcttgctgctcaacctctagtgtccctccctggattctttgaggtgtctgctgtcgctaccactgtgcacatctgaaaactcacaaccaagaaaatccattctattttcttatcttggactgggagtcacctattcttgcattgctgtatacacctcatgcttatggcaatggggaagaatatggggggccagggggtgtggtactacccctccgggcatttgggaaacttcaaaaggagggtgttacann

SEQ ID NO: 23406 - DNA, 1024 bp, Homo sapiens
  misc_feature 1, 1024: n = A,T,C or G
ncgacccacgcgtccgctcgacggtgccctaggtgccgtggggccacacgcgagtctgataagcaccctcccccggaatcatgcggtgctgtgaggcctagcgaagatgaagatagaatgcaaggtagaaagtgctggatacctttagaaagctgcaggactggtgcgatgggagttgagacgtaagaacctgcccgtccgtagggctctggatgctgctgaggcccgaggcccctatggcagatttgaaaattcacccttgtagagtcattcctgcctttgagcggactcccttttaagtttacagaagcacttgcagaactcatcagaagccaccccgcttatcagcagatctcaagagagcgttcggtggaggccctgggtctgcacagctcacctccctgggaactgctcgcccgagcgtcggagccggcgctggccccctgcagccggaaggttgcagccgcaggagccccggaggcccaggacacagggctcttgctcttgcagaatccacaggtctttcttgaggaaatctgtagacagaactttgtgctgcgtttttatctacggaaggaacagacgagtgtcgtctcctagaaatctagcactggagaaacgaggaaaattcttccagcgatggtctcccactcagagctgaggaagcttttctactcagcagatgctgtgtgttttgatgttgacagcacggtcatcagagaagaaggaatcgatgagctagccaaaatctgtggcgttgatgacgcggcgtcagaaatggagctggtgaatatgcaggttttgatgagacgcagccaacagctgaatctggtggaaaaggaaaagtgattaaacttttaaaggaaaaatttcattttaagaaaataatcatgattggagatggtgccacagatatggaagcctgtcctcctgctgatgcttacattggatttggaggaaatgtgatcaggcaacaagtcaaggattacgcccaatggtatatcactgattttgcagagctgcn

SEQ ID NO: 23407 - DNA, 482 bp, Homo sapiens; identical to SEQ ID NO: 23041
  misc_feature 1, 2: n = A,T,C or G

SEQ ID NO: 23408 - DNA, 2019 bp, Homo sapiens; identical to SEQ ID NO: 22489
  misc_feature 2005, 2006, 2007, 2008, 2009, 2010, 2011, 2012, 2013, 2014,2015, 2016, 2017, 2018, 2019: n = A,T,C or G

SEQ ID NO: 23409 - DNA, 465 bp, Homo sapiens
gcatgctgcagacccgtcagggcgatgtacgcggggctcttcctttctccgccatcgtggtgtgttcttgactccgctgctcgccatgtcttctcacaagactttcaggattaagcgattcctggccaagaaacaaaagcaaaatcgtcccattccccagtggattcggatgaaaactggaaataaaatcaggtacaactccaaaaggagacattggagaagaaccaagctgggtctataaggaattgcacatgagatggcacacatatttatgctgtctgaaggtcacgatcatgttaccatatcaagctgaaaatgtcaccactatctggacagttggtcatgttttattgggaatatatttttttcctctctgaatctattgtgaatgcgctggttggctgggttcagtaataaatatgtgagacctttcatttgaaaaaataaaaataataataatttgca

SEQ ID NO: 23410 - DNA, 2001 bp, Homo sapiens
  misc_feature 1, 2, 3, 2000, 2001: n = A,T,C or G
nnncgacccgtccgtccagatagccggcgccttcctcttcccatcgcgcgggtcctagccaccggtgtctccttctacatccgcctctgcgccggctgccacccgcgctccctccgccgccgccgccttgctgctgctcaaagctgctgccgccccttgggctaaaaggttttcaaatggaacattttgatgcatcacttagtacctatttcaaggcattgctaggccctcgagatactagagtaaaaggatggtttcttctggacaattatatacccacatttatctgctctgtcatatatttactaattgtatggctgggaccaaaatacatgaggaataaacagccattctcttgccgggggattttagtggtgtataaccttggactcacactgctgtctctgtatatgttctgtgagttagtaacaggagtatgggaaggcaaatacaacttcttctgtcagggcacacgcaccgcaggagaatcagatatgaagattatccgtgtcctctggtggtactacttctccaaactcatagaatttatggacactttcttcttcatcctgcgcaagaacaaccaccagatcacggtcctgcacgtctaccaccatgcctcgatgctgaacatctggtggtttgtgatgaactgggtcccctgcggccactcttattttggtgccacacttaatagcttcatccacgtcctcatgtactcttactatggtttgtcgtcagtcccttccatgcgtccatacctctggtggaagaagtacatcactcaggggcagctgcttcagtttgtgctgacaatcatccagaccagctgcggggtcatctggccgtgcacattccctcttggttggttgtatttccagattggatacatgatttccctgattgctctcttcacaaacttctacattcagacctacaacaagaaaggggcctcccgaaggaaagaccacctgaaggaccaccagaatgggtccatggctgctgtgaatggacacaccaacagcttttcacccctggaaaacaatgtgaagccaaggaagctgcggaaggattgaagtcaaagaattgaaaccctccaaaccacgtcatctgattgtaagcacaatatgagttgtgccccaatgctcgttaacagctgctgtaactagtctggcctacaatagtgtgattcatgtaggacttctttcatcaattcaaaacccctagaaaacgtatacagattatataagtagggataagatttctaacatttctgggctctctgacccctgcgctagactgtggaaagggagtattattatagtatacaacactgctgttgccttattagttataacatgataggtgctgaattgtgattcacaatttaaaaacactgtaatccaaacttttttttttaactgtagatcatgcatgtgattgtaaatgtaaatttgtacaatgttgttatggtagagaaacacacatgccttaaaatttaaaaagcagggcccaaagcttattagtttaaattagggtatgtttcaagtcggtattactctcgtaatacgctctgtccagaaaaactccacgaccatgcatttatgaaactaactgggacataatttccagtgacttgtcgatgtgacatcagacacggcacttcagcttcggactacaggccttgcatcaacgcaggcccaaaccaagcggaaacgccacgcacacctttaacccgacctcaacaccacacccgagcgccccactcagggaccaccggggggggccacacaacgccgtcaggcccccaagaaaaccccagaccccacacaccacacggcacgacgcaggccccacacccccacgacccacctccccccgacaccacccctcgctccccgcccacgaccactaccgaacccaccgaccgccaccgccacccctaccaccacccgcacacacaaccaacaccacccaccaccgacgccagcgacacccann

SEQ ID NO: 23411 - DNA, 1179 bp, Homo sapiens
  misc_feature 1, 2, 3, 1178, 1179: n = A,T,C or G
nnnaactgacctgcatgcccaggacacaagtaaaacatttgtgagatagtggtggtaagtgatgcactcgtgttaagtcaaaggctataagaaacactgtgaaaagttcatattcatccattgtgattctttccccacgtcttgcatgtattactggattcccacagtaatatagactgtgcatggtgtgtatatttcattgcgatttcctgttaagatgagtttgtactcagaattgaccaattcaggaggtgtaaaaataaacagtgttctcttctctaccccaaagccactactgaccaaggtctcttcagtgcactcgctccctctctggctaaggcatgcattagccactacacaagtcattagtgaaagtggtcttttatgtcctcccagcagacagacatcaaggatgagttaaccaggagactactcctgtgactgtggagctctggaaggcttggtgggagtgaatttgcccacaccttacaattgtggcaggatccagaagagcctgtctttttatatccattccttgatgtcattggcctctcccaccgatttcattacggtgccacgcagtcatggatctgggtagtccggaaaacaaaaggagggaagacagcctggtaatgaataagatccttaccacagttttctcatgggaaatacataataaaccctttcatctttttttttttcctttaagaattaaaactgggaaatagaaacatgaactgaaaagtcttgcaatgacaagaggtttcatggtcttaaaaagatactttatgtggttgaagatgaaatcattcctaaattaacctttttttaaaaaaaaaacaatgtatattatgttcctgtgtgttgaatttaaaaaaaaaaatactttacttggatattcatgtaatatataaaggtttggtgaaatgaactttagttaggaaaaagctggcatcagctttcatctgtgtaagttgacaccaatgtgtcataatattctttattttgggaaattagtggtttctcttcacaccttcacacggaacacgcactactaccggttacgacaattctttaccggctttcctccaatttaagcatggaatgagaccctggccaggtccggtaaacgggcactccccggcacaacacggaacaagcagggtccaggttgcacnn

SEQ ID NO: 23412 - DNA, 408 bp, Homo sapiens; identical to SEQ ID NO: 21570
  misc_feature 1: n = A,T,C or G

SEQ ID NO: 23413 - DNA, 4276 bp, Homo sapiens
  misc_feature 1, 2, 3, 4, 5, 4276: n = A,T,C or G
nnnnnctggctaaagagttactgggcggcgtcgggcccggagctgccaggcgggagcggcgtaggcgcggggtcgccggccagcgtgaaccgggacatggagccgcccggcgggagcctggggcccggccgcgggacccgggacaagaagaagggccggagcccagatgagctgccctcggcgggcggcgacggcggcaaatctaagaaatttctggagagatttaccagcatgagaattaagaaggagaaggaaaagcccaattctgctcatagaaattcttctgcatcatatggggatgatcccacagcacagtcattgcaagatgtttcagatgaacaagtgctggttctctttgaacagatgctgctggatatgaacctgaatgaggagaaacagcaacctttgagggagaaggacatcatcatcaagagggagatggtgtcccaatacttgtacacctccaaggctggcatgagccagaaggagagctctaagtctgccatgatgtatattcaggagttgaggtcaggcttgcgggatatgcctctgctcagctgcctggagtcccttcgtgtgtctctcaacaacaaccctgtcagttgggtgcaaacatttggtgctgaaggcttggcctccttattggacattcttaaacgacttcatgatgagaaagaagagactgctgggagttacgatagccggaacaagcatgagatcattcgctgcttgaaagcttttatgaacaacaagtttggaatcaagaccatgttggagacagaagaaggaatcctactgctggtcagagccatggatcctgctgttcccaacatgatgattgatgcagctaagctgctttctgctctttgtattctaccgcagccagaggacatgaatgaaagggttttggaggcaatgacagaaagagctgagatggatgaagtggaacgtttccagccgctgctggatggattaaaaagtggaaccactattgcactgaaggttggatgcctacagctgatcaatgctctcatcacaccagcggaggaacttgacttccgagttcacatcagaagtgaactgatgcgtttggggctacatcaggtgttgcaggaccttcgagagattgaaaatgaagatatgagagtgcaactaaatgtgtttgatgaacaaggggaagaggattcctatgacctgaagggacggctggatgacattcgcatggagatggatgactttaatgaagtctttcagattctcttaaacacagtgaaggattcaaaggcagagccacacttcctttccatcctgcagcacttactcttggtccgaaatgactatgaggccagacctcagtactataagttgattgaagaatgtatttcccagatagttctgcacaagaacggggctgatcctgacttcaagtgccggcacctccagattgagattgagggattaattgatcaaatgattgataagacaaaggtggagaaatctgaagccaaagctgcagagctggaaaagaagttggactcagagttaacagcccgacatgagctacaggtggaaatgaaaaagatggaaagtgactttgagcagaagcttcaagatcttcagggagaaaaagatgcactgcattctgaaaagcagcaaattgccacagagaaacaggacctggaagcagaggtgtcccagctcacaggagaggttgccaagctgacaaaggaactggaagatgccaagaaagaaatggcttccctctctgcggcagctattactgtacctccttctgttcctagtcgtgctcctgttccccctgcccctcctttacctggtgactctggcactattattccaccaccacctgctcctggggatagtaccactcctcctcctcctccaccaccaccacctccaccacctcctttacctggaggtactgctatctctccaccccctcctttgtctggggatgctaccatccctccaccccctcctttgcctgagggtgttggcatcccttcaccctcttctttgcctggaggtactgccatccccccacctcctcctttgcctgggagtgctagaatccccccaccaccacctcctttgcctgggagtgctggaattccccccccacctcctcccttgcctggagaagcaggaatgccacctcctcctccccctcttcctggtggtcctggaatccctccacctcctccatttcccggaggccctggcattcctccacctccacccggaatgggtatgcctccacctcccccatttggatttggagttcctgcagccccagttctgccatttggattaacccccaaaaagctttataagccagaggtgcagctccggaggccaaactggtccaagcttgtggctgaggacctctcccaggactgcttctggacaaaggtgaaggaggaccgctttgagaacaatgaacttttcgccaaacttacccttaccttctctgcccagaccaagacttccaaagccaagaaggatcaagaaggtggagaagaaaagaaatctgtgcaaaagaaaaaagtaaaagagttaaaggtgttggattcaaagacagcccagaatctctcaatctttttgggttccttccgcatgccctatcaagagattaagaatgtcatcctggaggtgaatgaggctgttctgactgagtctatgatccagaacctcattaagcaaatgccagagccagagcagttaaaaatgctttctgaactgaaggatgaatatgatgacctggctgagtcagagcagtttggcgtggtgatgggcactgtgccccgactgcggcctcgcctcaatgccattctcttcaagctacaattcagcgagcaagtggagaatatcaagccagagattgtgtctgtcactgctgcatgtgaggagttacgtaagagtgagagcttttccaatctcctagagattaccttgcttgttggaaattacatgaatgctggctccagaaatgctggtgcttttggcttcaatatcagcttcctctgtaagcttcgagacaccaagtccacagatcagaagatgacgttgttacacttcttggctgagttgtgtgagaatgactatcccgatgtcctcaagtttccagacgagcttgcccatgtggagaaagccagccgagtttctgctgaaaacttgcaaaagaacctagatcagatgaagaaacaaatttctgatgtggaacgtgatgttcagaatttcccagctgccacagatgaaaaagacaagtttgttgaaaaaatgaccagctttgtgaaggatgcacaggaacagtataacaagctgcggatgatgcattctaacatggagaccctctataaggagctgggcgagtacttcctctttgaccccaagaagttgtctgttgaagaatttttcatggatcttcacaattttcggaatatgtttttgcaagcagtcaaggagaaccagaagcggcgggagacagaagaaaagatgaggcgagcaaaactagccaaggagaaggcagagaaggagcggctagagaagcagcagaagagagagcaactcatagacatgaatgcagagggcgatgagacaggtgtgatggacagtcttctagaagccctgcagtcaggggcagcattccgacggaagagagggccccgtcaagccaacaggaaggccgggtgtgcagtcacatctctgctagcttcggagctgaccaaggatgatgccatggctgctgttcctgccaaggtgtccaagaacagtgagacattccccacaatccttgaggaagccaaggagttggttggccgtgcaagctaatgtgggtcctgtgaccgcggcagctcctcagcggagccgcagactgtcctgccctgcagcatgtgcctaaaggctcaaggggatattcctctggggtggccactcccaccaccctgaccctgtctttctctctggcctgctgctctctcaacatcacatacagcttcagctgcctggaggccagaaggaaagggcagtgcaggggaggcctgagcccgacttagccagccctggctgttgtattaccaaagcagggtccatgtttgctgccttaaccctgtctcctctctgttactcagaggctcattcagaaaggccactgcttttttcagcctgaatttaagggtttccctagggtatttggggatgggccctgggggtctgcccgaaaatgggggtacttgggaaccccatgggggtcgan

SEQ ID NO: 23414 - DNA, 751 bp, Homo sapiens
ataggggagtcgacccacgcgtccgcaggagcaggagctgttacccttctaatccccacaatgaccccagcctaataatacaatgatccccaagtagaaccaggggcccaaggccccctcgtcagctgggctcccacctccaagctgacgccctcaaccactctgctggggtgagcaaacccaggccccacagctggctagcgggacatccgtgtccacgattggcgccatgtgttttaagttgcagcgtcaaaaacatgaagagattgctttagcaaatatttacccagtcctgactctgcacatggcatcgttctaggagcccaaagatgttaacttgtttaataatcaagccctgtgaaggagtttatagcatctgtggattttggtacccacggaggtgctggaaccaatcgttgaggattccaaggacaactctatgatgcaggcacacctgtcctaggggggcattggaggcttctaggaggtggcacggtgcacgccaagatggctgtgtccacagaggagctggaggccacggttcaggaagtcctggggagactgaagagccaccagtttttccagtccacatgggacactgttgccttcattgttttcctcaccttcatgggcaccgtgctgctcctgctgctgctggtcgtcgcccactgctgctgctgcagctcccccgggccccgcagggaaagccccaggaaggaaagacccaagggagtggataacttggccctgg

SEQ ID NO: 23415 - DNA, 700 bp, Homo sapiens
  misc_feature 1, 2, 700: n = A,T,C or G
nnaccggggccccccctcggaggtacttctaggattaattgacgcggggggagcgcggcggtgatggcggggccggtgaaggaccgcgaggccttccagaggctcaacttcctgtaccaggccgcccattgtgtccttgcccaggaccccgagaaccaggcgctggcgaggttttactgctacactgagaggaccattgcgaagcggctcgtcttgcggcgggatccctcggtgaagaggactctctgtcgaggctgctcttccctcctcgtcccgggcctcacctgcacccagcgccagagacgctgcaggggacagcgctggaccgtacagacctgcctaacatgccagcgcagccaacgcttcctcaatgatcccgggcatttactctggggagacaggcctgaggcccagctcgggagccaagcagattccaaaccactacaacccttgccaaacacagcccactccatttcagaccgccttcctgaggagaaaatgcagactcagggttccagtaaccagtgatggattcaccccatctcccaaataaagtttacttgttttacattccatgaaaatctgtgggtatttcactggccggcgttttacaacgtcgtgactgggccctggcgttacccaacttaatcgccttgcagcacatccccctttcgccagctggcgtaatagcggggtccgn

SEQ ID NO: 23416 - DNA, 391 bp, Homo sapiens
  misc_feature 385, 386, 387, 388, 389, 390, 391: n = A,T,C or G
acgcgggggggaatgtaagggccacttcagcaacagaaaggagtggtggagcggcttctcatcagaaaaacagaactttcagtgcctgacttgagatgtaaacttgatgggaaaaattattttagttttggaaagatcctcttcagaaataccactatcttcctgaagtttgatggagaaccttgtgacctgtctttgaatataacctggtatctgaaaagcgctgattgttacaatgaaatctataacttcaaggcagaagaagtagagttgtatttggaaaaacttaaggaaaaaagaggcttgtctgggaaatatcaaacatcatcaaaattgttccagaactgcagtgaactctttaaaacacagacctttttctggagannnnnnn

SEQ ID NO: 23417 - DNA, 1054 bp, Homo sapiens
  misc_feature 1, 2, 3, 1049, 1050, 1051, 1052, 1053, 1054: n = A,T,C or G
nnnctcgcgatgagcgcctcggtttattggtgctttgtttttggtggcctgtctcgcttttgctcttcgttggtggtgtcataagtgcgtttttggttgtcctgtgactgtgccttctgtctccctcttttttggccgcttccttctgcaggtttcttgccctggttcttcgcgggcaccttggcagcccttaagcgtgctacacccgtggccgggttttcctgactcatcctccgggcctcctggccccttcgctgccatcctcgcataggtcttcttcagcacgcttcagctgtttgtgctgggagctggtggcgcggtgcagggctcttaagaacgaacggcttgggcgcggactggtatccggggactgtgacttgcagggtccgccatggagccagagcagatgctggagggacaaacgcaggttgcagaaaatcctcactctgagtacggtctcacagacaacgttgagagaatagtagaaaatgagaagattaatgcagaaaagtcatcaaagcagaaggtagatctccagtctttgccaactcgtgcctacctggatcagacagttgtgcctatcttattacagggacttgctgtgcttgcaaaggaaagaccaccaaatcccattgaatttctagcatcttatcttttaaaaaacaaggcacagtttgaagatcgaaactgacttaatgggaagaacagaaaaatttagttgctactgtagatttacatgattaagaggcagctttaattgccatgatcattccctctttttggatgtataagaaccttccggacaacagaacctatttctggaattgcagaagataacatatttcccttattttgatttaatcaccataaaccatacctatttaatgagtgtattctgtgcaatttttttctcagattgtctttaactttgtttttaaaatgaccttcaaaataaactgtcaaaacaccaaaaaaaaaaaaaaaacctcttggtctggtatggcaatatttctgtttggattggtatgacattcttgctccggttcaannnnnn

SEQ ID NO: 23418 - DNA, 2018 bp, Homo sapiens
  misc_feature 1, 2, 2018: n = A,T,C or G
nnacgcgtccggtctgacaccagcctccaacttcatattccttccacaggcaactgtgcacttgacccaaggtaaaatgaaagggctgccaatcactcggactccagaaggtgcctgccctgagaagagctggcatgttacctcccacatacatttcctgtcatcctgtccgaatctgggaaattttgctctggagtattttcaagaaagcgcattgtgttttaatgaagtatttttcagggttccaatgttattttttataaatgcagcattttaatggcagattcaatatgaaggacatgtcttcctgggctctatatttgattttggaaggcagcatactctaggagaaaaaaagcatagggctgaggctctgaagacacagcttccagccctggctttgtctccgagggggagtcatgttccccactcagtgcctcagtttccccatctgtaaaatgaggggctttgactagatgagctctgaagtttcatccagctcttacactgtagggctttcattccctgccagcacctgctctccccgttcctccccacctccactgagctgcacacatcccacaatgcctgccccacagcgatgtcctcagatgtcctggacagccaccgcactcctcactagagcctggggtgggcctgatgggctcggccacccagggatgccctcgtacctgaagtttaagggcctaaccattcaataggtcaccaactgtgtgcccatgggaaggccctcttgttaaaggacacacctgaaaccatccttaagtgactgtgggaattctgggggtattcttgagtttggagtttccatttggatacggtccttatagctggagggaggcggttccaatttcagagagggagctggctggagagaaaggtctggaggttggcccataagggcatgaagtttgtacttgagggcagctgggaaattcatttcaagctgcagaggaacgtgttcacaggctgttgtgtggcaatgaatgtcatgataacccactctggaatatgtgtcctgaagaccaagtctggacactgaggctccattccaactggaggaggaggcatctccatctgggctgctaggaaggggcactcatcccatcctagtacctttgtagcccttcgtcatgacactaccgtcctcccggtgaaggcttgtgaagcaagaatggagagtccaagtttgtgatattcaaacccatcttgtaaatcagcaaacacattaaccttccatcagtcagagaaataatgttgtggctgtgtgtttccttaatgctctccctcctgagggaggagaagaccctgctcaactttgctgcccaccctgcagtgacccctgaatgccacaccatgggaggactcattcattggctttgtagtggcaaatattcctctagttctataactcaactagacattttgtagtaaagaattcttgaaattctctaataaaaagcaattcttactgtaatatttttagtttggggacacaatttcctaaggggggattaatgaacatttttatgcattagcccaatttatgaattccatgtttattatatggtagtactgatgaaaagtacctttctatctgtatctttgcagtttcttcgttactcatatgtaagcctcatggtaagcagtgctctagtaactgcttctctgtacaaatctcatcgttctacttacctgtcaaagcacattctacatgtactgtaaacagatacactttagtaagatttagtcttaaggatttttccacttttgtcagtaacagatatttatggattaaaaaataaagccgtttcaacaaaaaaacacaaaaaaacgttggggcgcccggcccaaaagtttcaaacactcgtggggcgcggccccaggggtaggacatggcagcgggtccaggaacccggccgaaggcggggttcccccaaaaagccgggcccgggttgaacaaccggggtttgggctgggttaaagggcaggctccn

SEQ ID NO: 23419 - DNA, 1096 bp, Homo sapiens
  misc_feature 1, 15, 1096: n = A,T,C or G
ngtagatgccgcganctgggttcttggaagcagccccctgtgcgggccttccgggtctcgcagcctgaagcctggattccagcagtgaatgctagacagaaaccaagccattaatgagatgttattactgttttgggcctccatgccccagctctggatgaaggcaaaaactgtactgtgtttcgcattaagcacacacatctggccctgacttctggagatggatccttccatcttgtggggccaggaccatggccgaagccccttggagagagaggctgcctcagccagtggcacaggagactccaaggagctactgacattcctaagagtggaggaggaggaggagccttgctgggccagggaaacaaagtttacattgtcctgtagctttaaaaccacagctgggcagggtgagaagctagatgcccctgcagtttggccctggagccagggcagaggaatgtagggcctgcatggagaagggttctgccctgcctgaggaggaggacacagcacaagggcacattgcccatggctgggaacatgacccagcctgaaagatacaggggatcatgttaaaaatagcagtattatttttcgtctcaatggtattgtaactaagttatttactcctcctgctcctcacccctgtagggaaaccttggagaggagagtggcaggtgggctgcctgctgtgttaagaggacttagtttgtgatgtaaggcactgtcaggaatggggggcgggccagggtgggaagagaagaaatagcagagcctattttggtgaggttttttgtttttaagtcaaagaagactcagtatgctttccctgaggaatgaaaaagggattgaggagttgcctgactcctgggtgggtggggtacaggcagttaggtgctgaatgaagctgccatccttgctgcagcttctaactggtaaaaagatccagggatggagatgggaaggttagaaggcggcttacctctgagcagagcggggtcaggccgtggcgcaaggtgctcttagtaccagttcgccaaactatgcgctttggtccgtggcttgggttggcccttaatgggcaaatccn

SEQ ID NO: 23420 - DNA, 638 bp, Homo sapiens
  misc_feature 1, 2, 638: n = A,T,C or G
nnactactatagggcgactccgagctgcggcggccgaggacgcgggcactcctctctctcttcctctctcacacgttctccaacccaaggaggccagacagagggacgtggtcactctctgaaaagttcaacttgagagacaaaatgcagtggacctccctcctgctgtgcagggcttttcctctcccaggcccagtatgaagatgaccctcattggtggttccactacctccgcagccagcagtccacctactacgatccctatgacccttacccgtatgagacctacgagccttacccctatggggtggatgaagggccagcctacacctacggctctccatcccctccagatccccgcaaggactgttggaggagagttagcccaagtataggctctgcccagatgccatcacatccctgatactgtgtatgctttgaagcaccttccctgagaagggaagaggggatctttggactaggttcttggctccagacctggaatccacaaaagccaaaccagctcatttcaacaaaggagctccgatgtgaggggcaaggctgccccctgccccagggctcttcagaaagcatctgcatgtgaacaccatcatgcctttataaaggatccttattan

SEQ ID NO: 23421 - DNA, 455 bp, Homo sapiens
  misc_feature 1, 2, 3, 4, 5, 6, 7, 8, 9, 10, 11, 12, 13, 14: n = A,T,C or G
nnnnnnnnnnnnnngctaggaatgggaagaatttccagtagagacagggtttcaccatgttggccaggctggtctcgaactcctgacctcaactgatccacccaccttggcctcccaaagtgctggtattacaggtgtaagccaccgcacccagccaatataggacatattttagttatataagttcattctgctttgtccagtaaagcaatgtaatctatcctaccagtaagtagagactacctacacagtagtgaaagatctagccatttcaagaggtcaagggacaattctgtaaataaattgcatctaagtagttccttactactcacaacatgctctaatagtgtgaagaaattaattcttatcccaaagaatatacttttcctagtaatgataggcttcatataattggaatctaagaatgctttaacaattctaccatcccgcgtacc

SEQ ID NO: 23422 - DNA, 1746 bp, Homo sapiens
acttcaggggactgtggacgtctgtcttgatggattggatggcgaactcgggccggtaggacccgcaccacacctgggcatagttgatgaagaagagctgctcatgggtgagatccaggccgggcagctgctggtccttgccaccctctgccatccacttgaggtaggcctataggcttccgcacccctccgttgtcagcaatgttttccccaagggtgttgaatccgttcacctgcgcacaggagacaggattggggcagccccggccctgacttccctctccctcagggccagggctggggctccggtacccccgcagcctgggtgctggtggcagcgctcacgttctgttcgtctgccaggtcccaggagtagttgccgtactggtagatcatgcactctgactgctcccggaagtgctgggtggagaagttactccaccaatccatcatgttgccattcttgtcgaagttccggcctgggcaggggcagaggagggctgcccacatgcccctggctgcactgtgcctggccccacggcagccactgtgcctggtcgctcctgcccctcctgcagccagccccagtgcggagagcccacagtctgagtaggctgagcctggaagagcatcgcgggctccaaggggcagcagctgtctggggctacacagcccccagagaaggagggcttcagtggtctcccatgccaccccccgaggctagggcctagcacctgggtcctgtggtcttggaggcatcatggtttacgggctcctcctgggatgcccaaactctaagttccaggcgagaggagtacgtggtccctggggacaaggactgcccacggaaggtccggatggccgagccacaggggaaaaccagctggggcccctgtcccaggcacggcagtccccaccgaggggcggaggtcagcatggccatggcgggggtagcacaccccccggtggaggatgctggccatctggagagtctcccaggctgggatctgggcttcgctgctgtattgggcagtgttgtcgtccccatgtcacaggccgtgggagggaagtgcccagtgccaggtggagtcagggtcatgggctggagtccctgggtcccctcctccatgctgggagtcagtgcccccagacagggccccagcctggcattcaaagcctgctctgcccccacagctccctgaggacctggcctcggtgtccccactgaaaccgtgaaggggttgaatggagcgcccccaggccccttcctggctgcttctccgcggagaggggagggcgtgtgtgattggaggggcggccgctcaccattgtcgtcaaagccgtgcgtgatctcgtgcccgatcaccatcccaacgcctccaaagttcaaggcctgtggctgctccttgctgaagaaggggggctggaggatcccggcagggaatacaatctggtttcggtttggggagtagaacgcattgaccaccgccgccccgatgatccagagatttgggtccaccttttcccgaagcttcctgaggctccgctgggcgcccaccttgaggttctgcagactgttctcaaagtacaggtcctctgagaagttcagctacgggagaggggcagtcactgccagatgctggggccgggccctcagaggagcaaggggagaggtcctgggtggttggggaaggacctcaagccttgccaggcgtccgcacgtggacagtcggctgtgggcgcagg

SEQ ID NO: 23423 - DNA, 3266 bp, Homo sapiens; identical to SEQ ID NO: 23004
  misc_feature 1, 2, 3266: n = A,T,C or G

SEQ ID NO: 23424 - DNA, 2451 bp, Homo sapiens; identical to SEQ ID NO: 22898

SEQ ID NO: 23425 - DNA, 4584 bp, Homo sapiens
  misc_feature 1, 2, 3, 4, 5, 6, 7, 8, 9, 10, 106, 4580, 4581, 4582, 4583,4584: n = A,T,C or G
nnnnnnnnnnaccagactccggggtccctgtggaagggccacccccaccagagcccgtatgccaccaaggcagtcaacacccagccgcagatcagcacctctcaangtcatcaccacaccacggtggtgcagcccaacggcatgcctgcaacggtgtaccctgctcccatcccccctcctagaggcaacggggtcaccatgggcatggtggctgggaccaccatggccatgtcagcaggtaccctgctgactgctcactccccaactcctgtcgccccccacccggtcactgtgcccacgtaccgggccccaggaacgcccacttacagctatgtgccccctcagtggtgatcacctgcaaatgtttgaggacggagctgtgcagtcacattattggggattccacagctggtgctgcaggccttgcgcctccaaccaggactttcttcttaatgctctcgacacttagctaaacacgactatatcccggcccagcaggccccagcgccgttagtctccagctgactctgtgggttggtcttaaagcaaattctgttttgtggactgcctggcaattttttagctaactgtaatgataaaaagggagtattaatctattctgaatcatatctagttgaatgcatgtttaaaaaaacaaacacaaaaagcttgctcaatctacctgcagtgactgatgcaaaaccatcatatgcaaaatccaaaggaatggaaacgtattttacaacttgtatcactaatgcactgttgtaatgtatgcaaagtcttacagttataagtgttaaagtgaatttcttcatagagcatctgaaatatcttagatgattcttcaaccttttggggttgatgtgggttgccagttagggatgtggacattttagttttcagcgacctgtttctttggcactgactgtcctgggagggagttgcgaggtttgggagagagtagggaagccacagctgcttgggtgcagctggttcatggacatccctttgagtttaggcttggtggagtcagtggaacagggacatgcttaaagctcatcatgaaagattatggtagtgtggccagtgaaatttggggcgaggggggtggtttatgtgtcagcaaagcagtttctctgctatctaaattttcattacagttctcttagagagatgatgtttttatatgtctttattggaaaagtcctatgtaaaactaaattattttcctgggatggaagaaatgtgaaagagaaacagccatgcttgcaggaggtattgtcctctgctttatttagcttagaaaatcattccttttttttttttttcctggagaaatgtttgaatcagctgaaaacaggtaggcattgctgtttttccccaacaaagaagggcaaaggtttcagctgtatgttatgaagaaagtggtatatttaagaatgagttaaaagggaacaaaactttatttaaaattcctccaatttcttgtagaaaggcagggccgtggatatgtctggaaatgtagaaacctgtagctgcttctgggatcacccacctgatggtggtgacttgtctgctgaggccggctggaggggacgcttagagatggggcgagggggaggccagtgtctgttgtctgcgagcctctcctgccatctcttttgcagctgagggcacttggcacaaagcaagcacagacagcagagagggccaggcagtgctggagtgcgtttgctggcagggtttattgtgggagaggaatttgagtttaggatctgaatcttgtacataagaaatgaaaaggcttccctccaccccgcccccaaaatatgcccgtcctgtatccatgagagtgcatgtcggttctcagtgagggtcagagtgggggtgggggatgtaaggcctgggtccctttcagcggcctctagggcaggagcgtgcgtcttcttcccagtgcagtggtggtttgagtgctgtgggctctggtggggagggggctctgctcctcttcatttgctggtagctgggtcagggcactggcgcccagtgaggatgcccactagcattctgccccagttggttggtggggggacacctgaccactgagcctttggtaaccttattttttatagtaagtacttcttataattttctttttcacatcttattttataagaagtttaggaatatttttgcatggatcattgtaaacagcagattctttattcctgatgtctattaacatagaatgtttactgataagtactttaaattgcttcatgagcacttaatccatcttagtgtctatgtgtgggggcagacatttaccgcaggcacacagtttgtgcccctttcttcaagtctctgttggtaattccatctgtttagtggatggttggcaggattagtaggttctaacggttccaggggttcagctgaccaagtagcagagaagtcttttttcccaattgagtgctaatagattaggataaaatactcacaatgttagtgtatgcttttaaaaagccccacacaacaaaatggaaacatacatgtacaactcctgtgagggctggagtcttggggttcaggaggaggttagaagttacaggcatctcttcaggcttgcttggtacttggcacacacaggatggtgttttaaagagtgggctgcaccccccacacgccatttacatcagcttcataaacacttttcttcctccctgtaacttaaccttttttcccttttatgaagttgagaggctttatgaaataagtttgcattgcacatccgtgcagaaatctttctgactttgaaatttttaggacgtcagctgtcagatacgaaaggtagatatcaggtaagaatctggacttaggaaatagtcacaaaactgtcataggttgtaattttatcaacattcgcttctagtaaaattaaagtcaattaagaaatagaacttgggtcaaaattctgttacaaagcttcataatttgtcccgaagcatatggtggagcattctgagaaatttgctttttgtgtgtttgacattcctaatttgggagtccttcagctgaattactattcttttagaagttgagacagcaggtaagcaaaggacctagttcatgtaaacatggacatcatgatggctatttaaaaaatatttgttctacaccttctcccctgaggcttggggagtgtgttcagccgctgcagtttctctgctcatggaggtcttgtttggatctgtgctggcggctgagcatttagtgtgagccagtgacccatgaacttgccgctctgtgagggccagagtcagggccagtcatggtaatgggcctgaaggcacttccagaaccttttatgtctctcgtgagccatctgttaagaacgttcttcttggtgtggtttgtaggcctacctgtcgctattctgggaaaccttcttgagtgctatgcaaatgtgttcacaggcaatgggggtggtcctgagccttggggtgggcacctggtcagtgagtgtcttgcccttccccagctgggcatacagtaccttgctctttctggtggcatcatctggctgtgatgaatgaggtctaggaaataatttgcatgtgtcttgggggacacaacagtaacgagaggaaatacattattacagcaacttgcgacgtactaatacctgtcagtgttggcccccgtaaggtatgtaaggcacctgtgagtgccagtgagtgctggtgaaaggccaacatgtactagttatgtaagtattggtgtctgctttaaaaaaggagacccagacttcacctgtcctttttaaacatttgagaacagtgttactctgagcagttgggccaccttcaccttatccgacagctgactgttggatgtgtccattgtcgccagtttggctgttgcccggacaggacaggacctccattgggcgcagcagcaggtggcaggggtgtggcttgaggtgggtggcagcgtctggtcctcctctctggtgctttctgagagggtctctaaagcagagtgtggttggcctgggggaaggcagagcacgtatttctcccctctagtacctctgcatttgtgagtgttccctctggctttctgaagggcagcagactcttgagtatactgcagaggacatgctttatcagtaggtcctgagggctccaggggctcaactgaccaagtaacacagaagttggggtatgtggcctatttgggtcggaaactgcatgtttcagaaagtttgtctctttttcctactcattatttgaagaagagagagcctgtggggatagccttatcttggtccacaggactgaagtgaagtcacttgggaaggggagacagaggatgagcggcgtctgtgtagggacccccccccgggcctgcagaagggtggtgtgctcccaggactggcatgacaggtgtctcctcctcaccacaggctgtgcccatgagtccctgtgcagaccagtgggcaaggcagctgggcccaaggggggggccaggaggcaaacgggtaaaaaacgcggaaaaaacgcggtaaggaagannnnn

SEQ ID NO: 23426 - DNA, 403 bp, Homo sapiens
acttcactgctctaagtaggtgccccactttgataaagtgctgtcccagtctgtgctgtcccagtctggaagggtcgctacccatgaacgtagcagccatcctgctattgggtaagtcatctgcatgatgactgtagcctgttctgccatgctcttatgagtccgaagggcagcatatgcagttactaactgcttcccagtccagggggtcattatccatgaacatacccatcctgctattactaactgcttctctatcaataaagacaagctcagctccatagttggggccaaaagcctactggcatactcaagcactccgtgcactgctataggccctaaactgaaactatctgtggtcacatgcacatctagcctaaatgggcacctctgatcaactacc

SEQ ID NO: 23427 - DNA, 897 bp, Homo sapiens
  misc_feature 897: n = A,T,C or G
acgcgggggggggaagctgagggctgagaccaagggctaaagctgggagactgaaaaaatgcagaccgccggggcattattcatttctccagctctgatccgctgttgtaccattattttatgttgtgccagtgaatccggttgccagaaataagtctgaatgttttcatgcatctttttcttaaatgcaagagcttctactgactcttaacaagcatgcttacccaaattttgttgcatgcttttaagtagcattagctatgcacacttgacatttttaaatatccctttcctagtgtaccagccttcacaataaagggggttatattgtaagcttttagatggtgcttaagaattcttatctttttaaatagcagtatttttttttttaagaataaattgtaaggagcaaataaggcagaatgccactctaccctcaggtcaattttatggtatatgaaaatgccaggggtgtttgtgccacttgccaactcggggggaggaggggcttttcccttactggatacttttgttatagtttgactatgtcattatgttgtttagagagcctccacaatgagaagttgccactgcagggctaactcgccttcagaaataatcagaatgattcaaggggtcaaaccactttcatcccttaaaatatagggactaatatttctttttctttttttaaaaaaaaacatttcttctgtggcttagaaatgtgccagtgtgttcaaaacatttacaccaatttcaccagatttaggacctattaaccggactatttgcattcttttgttatttcacaccttaggtaaagtgataacactggtaaactgtgatcattataagactgactgaatgctttctgattccagggagggatcctagccn

SEQ ID NO: 23428 - DNA, 1979 bp, Homo sapiens; identical to SEQ ID NO: 20196
  misc_feature 1978, 1979: n = A,T,C or G

SEQ ID NO: 23429 - DNA, 2071 bp, Homo sapiens; identical to SEQ ID NO: 21824

SEQ ID NO: 23430 - DNA, 1120 bp, Homo sapiens; identical to SEQ ID NO: 22234
  misc_feature 1, 1119, 1120: n = A,T,C or G

SEQ ID NO: 23431 - DNA, 392 bp, Homo sapiens
  misc_feature 1, 2, 3, 4, 5, 6, 7: n = A,T,C or G
nnnnnnnaaactattttggattaaggtcaattaggactaacatctaatacgtgtattttggtttcctcacctctaggcacagaccccacaggctcctcggacactgggtccatcacctcctgccccatcatccactccaacaccaacagcccctattgccactctgaaccagcctccaccacttcttcgtccaacactgcctgctgccccggctcttcaccggcagcctcctccactccagcagcaggctcggttcatccagccccggccaactttaaatcagcctccaccacctcttattcgccctgctaattccatgccaccccgtctaaacccaagaccggtgttgtccacggttgggtggtcaacagccaccatcacttattggaatt

SEQ ID NO: 23432 - DNA, 2186 bp, Homo sapiens
  misc_feature 1, 2, 3, 4, 5, 6, 7, 8, 9, 10, 11, 12, 13, 14, 2181, 2182,2183, 2184, 2185, 2186: n = A,T,C or G
nnnnnnnnnnnnnnaaggccaggacgggtcaccctttgtgggcccctgaaaaatacaaaacgaagtttggagagagttgaaaggcgtttgggctgaccatggagatttttgtttcccaccctcctgcgaaagcgttcgcgctgccattggctctggctgagggcgagtccggaacctgtgcgccgcggaactttcggctctgaaatccaacttgcgctgggcgcatctttgccgcgcggtttccgggcggctcccttcccttgcatgctgcattgtgtcgggagttgctgacagccatggcgccgcaggtctggcgtcgacggaccctggagcggtgtctgacggaagtcggcaaagccacgggtcggcccgagtgcttcctcacgattcaagagggattggcatcaaagttcacttctttaacaaaagtgctttatgactttaataaaatattagagaatggtaggatccatggaagccccttgcaaaaacttgtgatagaaaattttgatgatgagcagatttggcaacaactggaattgcaaaatgaaccaattttacaatactttcagaatgcagttagtgaaacaattaatgatgaagatatcagtcttctcccagagagtgaagaacaggaacgtgaagaggatggttcagagatagaggctgatgacaaggaggacctagaagatttagaggaggaggaagtgtccgacatgggtaatgatgatcctgaaatgggtgagagagctgaaaactcaagcaaatctgatctgaggaaaagccccgttttcagtgatgaggattctgaccttgactttgatatcagcaaattggaacagcagagcaaggtgcaaaacaaaggacagggaaaaccaagagaaaagtccatagtagatgataaattcttcaaactctctgaaatggaggcctatttagaaaacatagaaaaagaagaggaacgaaaagatgataatgatgaggaggaggaagatattgatttttttgaagatattgattctgatgaagatgaagggggactgtttggaagtaaaaaacttaagtcaggtaaaagttccagaaatctgaaatacaaagatttttttgatccagttgaaagtgatgaagacataacaaatgttcatgatgatgagctggattcaaacaaagaagatgatgaaattgctgaagaagaagcagaagaactaagtatttcggaaacggatgaagatgatgaccttcaagaaaatgaagacaataaacaacataaagaaagcttgaaaagagtgacctttgctttaccagatgatgcggaaactgaagatacaggtgttttaaatgtaaagaaaaattctgatgaagttaaatcctcctttgaaaaaagacaggaaaagatgaatgaaaaaattgcatctttagaaaaagagttgttagaaaaaaagccgtggcagcttcagggggaagtgacagcacagaagaggccagagaacagcctcctggaggagaccctacactttgaccatgctgtccggatggcacctgtgattacagaggaaaccacccttcaactggaagatatcattaaacagaggataagagatcaggcttgggatgatgtagtacgtaaagaaaaacctaaagaggatgcatatgaatataaaaagcgtttaaccttagaccatgagaagagtaaattgagccttgctgaaatttatgaacaggagtacatcaaactcaaccagcaaaaaacagcagaagaagaaaatccagaacatgtagaaattcagaagatgatggattccctcttcttaaaattggatgccctctcaaacttccactttatccctaaaccgcctgtaccagagattaaagttgtgtcaaatctgccagccataaccatggaggaagtagccccagtgagtgttagtgatgcagctctcctggccccagaggagatcaaggagaaaaataaagctggagatataaaaacagctgctgaaaaaacagtacagaccagaaccgagagcgagggaaagaatatcaaacggctggaataaagagacgggaagcggcgaaaccgcgcaacaagcacggcactcacagcgaaacgaacacgccccgcaataacacgaccacggagcccaaagagagaaaagcccacccacctccaacacaacagcnnnnnn

SEQ ID NO: 23433 - DNA, 6860 bp, Homo sapiens
tgaggtcatacatttttttttctttattcaaaacacttagtaaaggaaaaggacacaaggaaattctgattaaagtcttctcctgctctgtttgcaattatacatgctttcaaagtcatttgaaagtaagaccatttcctttggcaggtatcttgtataaagtaactttacaacatatgtttcttgaacagaaactttacaccactgtcattatgttacctatagagacaaaactactaacacaagtaatatgggcttacaattataacacaaacctgtgagagggcatgataaaattaaattttgattgccttcttttattattatcactactactgtctgctcacaaattctgtggccagagtccatttcaaatccttctaagagtccacttcatgagttaaacatatacatatagaacaaagcaggtatactgtaatttttaaaagtaaatctgttttacatagtacagctggaggcagtttaatataatcaaaagttatagctctaaaaaatatgatagtagaatattaaacctcaggttacgttaggtttgttaactcttgatttgctttgagtaatttttttcttcaaaagccacattccaagaagatgccttaagtatcaatgagctatatttgaagtacatcaactctgtttaaagctgtccaacaataaggacacaagcagtaaaatatctgaagcatgaaacatgtaatgttgatgactaatgttctagatcatcaggaataagattaacgaagagcaaagtaaatctaaaacaaggaaagggaagatacatttattaaaaataaaaatagtacacaatctctgataacaaaaaaagcatttagggtcaaaagacatccaacatacattgtaacaatgcacacatattaattaaaaaaaagacccatgaaataatttttaaaaaactttcaaaaggaaaaaactattttggcttccttctgctgaaattcgcctataaacataccacgccagctagaccagcattccctttcacgtggtctgtacaacatagtactgcacaatgtgagcaattactttgatgaacacattgtttttgaataaaattgttggttctgtatggatgatccagacataaatccatggttccatttcacaaaaatattcataggctggaagagcagtgacaaccattttccaaaatcttcagttttaacaaaaggcgcagaataaactactaaatctagatgttttcacattattttgcatgagtgtcaaatactatgtaaaaattaacgtaaaatcttaagttggccaaaactagtgtctctaaagatcaaaattcttcactcttttagcatggctgataaatcttttctgcctttgtcactaatgcttgtcaaaccaaagaactttgcaaaagaatatgcactgctgaaggaagacagtaccaaaaataccatattgaacttcggtcttaagacacacacagttcctgttggatactggactgtgaaagtttattatcttcagtcttttcatgtcctggagcatggcaagtagtcttccgcttaaataaccgaagactcaatcgaagtaattcattgtctaccattggagcactcgtgtaagcttgttttatggtgcccttctcatttttaacaagctgctttcgaattgcagaatcccgtctgaagcacaacgccttacaacatgggccaagattactaagaagacttgctctttcttcttttcgtagtaatgcagccatattgagagcccccaattcatgttcaaagagattgtctgcatctttgggtttttctaaaagtctctgacatgtttctttgactttggcaaagagttcagaacctgccaactttttagaaatcccaactcttagcataacagctccaggtgtgaattttaagagtgcagccccaggctctcgtggttcttttggatgctttggcataagaccagaccaatccacatctatcacatctaagggatctggcatcttctcctcatcctgttggtcctccctcttttctgcatcacctgccagaatttcatctagttcgtcatcactgattggctcgtatccttctccagcaccagagcctaatgaatgtgcatcatctaacttggactcgtcatctcctgcttccagactctcagttctctcggatttatttgtatcttcaaatccctgcacagatcccagatctttatccattctctctttatccaaggctagagagtctcgggaagtgctttctagatccctttcatgttcaccttccagttttgcttcacagcgtttcacagactctatttgagaactctcaaaagttctgtctctgtctctgtccctgtccctttcaacagaatcagaaattagtctctctctttccctatccaagtctctccttttgtctcgttctctctctcgttctcgttctcgcaatctatctcgatccctgttgcgtggccaatctttatcagcatctcggtcccattctctctgcctcgtatctctcctctctctctcgcgctctctgtcgtgttcatatcgatctcgttcttgaagcctgtctctgctatcaaatgacccagatcttgaatggacctgtcgatctgactctggagaacttcttcttgaactatggcttcttgaatcctggcgatctgaagaagtacttcgactgggttctccacgctttaactgatcaatcctagattttctctctcctgtgatttccaggctttttgttttttctctatctcttgagccactgtgcagtactctctttcgaccactttggtcatctccacttcgatgggctgaatcattggatggggagcgaagacgaccagacgtatgactacggttactccgattgctcccgaggctgctgctcctcttttgatccataggcttgcgatgctgtgcatcttctatagtcacgtgaggcgtctctactttttctactcgtgttctgtggcattttctgtgtgagtcttcattggcaaaagtattattggtggtattggtgggggtggcagaggtggaaatagtgatggcagatgtgctgaaagaggtggcggcagcagcagtagtggcagcaagagttgcaggcacagttgtagcagtggcagtagccacaggcggtggaggaggaagaagagaagatagaggagaaggggtactaccaggagtcgtggcggtggcagtatgctctgcttctgtcacctctgtacggtcagggacatcctcatcagaccagtcactgaatgctgtatcttcttttttctgggagtcctctagaataccattcttaccattgcacatttcaaccaattcctctttagttgttatagggggagtccgtgggcctcttttcttcttactttgctgggctgcttcttcatcagaaatatcagaatcacctttggattttttacgttttttttcaatgcttttctttttctgtcctttttttggtgaaaatacttgaccatcttcagatgttgtctctatgttacccctctctattccaacatcatcctctttctttttcttaattggtttcttttgaatttttgctttcttcttgttttcatcatgagctcgatcagatgtctctcgatcttcagactggtggtgtcctataatgtcctgtgcacgcattcttgagctttccaggatttctgtctgttctctctgtttatctacagaagaaactttctccttgagttcctgttcttcgtagcgccttgaactctctttcctttctggtttacgatcctcctctttccatctaccctgtctgtcttctgtgaggtgcgagggactaagagaacgagattcttgaggtcgtacaacttggctcaagagtctgtgtttttcatttttatcatctccactgttgtaggcatcactgtccggagaatgttcacgccggcgcttcggggactgtctagggctgggactcccttcatttctatagcgcttctttgattttctttcatcatgtccatctcttggattcctatcttctcggatctcttctcgcttttctctgcggtcatctcgtcctttgtctttgtcttcccaatccctttggcgttctcgttctttatccctttctctcgctctttctcgttcccgttctcgctctcgctctctctcccgttctcgctctctctccctctctctctcttctctttctcgttcccgttctttttccctgtctcgttccctctctctttcccgctctcgatcgtggtctcggtctctatccctttcacgatctctctctttttctctttctctctcccgttccctagcacgctctctttctagttctctctctttttctctttcccgatcccgttcacgttccctctctctctcccgctccctgtctcgttctcgttcccgatctctctctctagccctttcatctctcctatcatccactctgtctactcttcgttcctctcttctttcatcacgctcaagctcgtcattccttccctgatgtcgaattggtgagcttggtctttgatctctctctctgttgtcacgacggtctcgctctccatgtcttctctcaaaggaagaatcccttgcttgatctctgttgtctctttcaggatatctatctctttcaggatagctacttcgagtttcccagctgtcatgatagttgctattactactgtgactatcaatttgagaacctcttgagcctcgacttcccttttcaggtaactcaggaaccctccccctacttcggcccattcggtcatttctaatttcacttcgagactcatttctggactcattccttatttccgtacgagaactttcttctctcaaatggtttcggccataactccgggattcttctggatatgtatcctcctttcgatgagtatctcgaccttcacggtccctgtagtcatgggcatcacgagtggaccgagaatctctgggatcacggctctctttggtatctctgctataatctctcatctcccttgagtcccgcatgtctctggagtctcttagttcccttcggtccctagtatctctggcatctctccgatcccgaccatctcgaggttctctgtcatctctgtggtctctagaagagctctgatcctgttcatattctcgttcttctcttgagtccttttctctgtctcgtttgcccctagtatcttccctcctttcgtggcgtcgatcatgagactgtgaagttcgttcatgatcatgtctccctttctctcgcattggagagcgatgtcttggaggactctgctttctctggggagacgacaaagaatgtgaaggataaggagaggcagagcgtcgtaaaggtggagttagtgtccgctgataagatggtgaaggagttctttttcgacgaggagaaggagaatgtctttgaatagatgatcctgattgtgaggaagatgagtgatgtctagaagatataggagaatgatgctgtcctgctggggaagtagaccttggcttgtctctcttttctctttgtcgttcaaaatctcgtcctctgtcctttccatctcttgttttttcttctatcctgtcttttactttatatttttctttgtattttttccccagagcgatatcttctggtataggagggggtggactaggagtacgtggtcctttctttttactttggttggtttttgaatttctctgctggtccaacaggggagaagatactgcagatgtcttcctatctttcttgctagctgaagacgacttcgggcttgattttcgcttcggagatttgctagactttcttagagaaggtgacggggacaattttgatctaaccacttctggtgaaacctcctttttaatgataatttcttctctcttctccatgttttcttgttccagcttcattaattccctctgtatcttctgacgcttcatttccaatgacaattcatgaacataatcataattaatatctccattgtcagaatcatctctattagtttcccattctacattttcttcttcactttctggagttctttccttagtgatttttatgtcttccttttccctatgtctccctcttgaagattctttcctaacaggtgaggatgactcctctgtatttcgtttctggggctcagtgtccacgtcttggcgcttgttcttcattctttctctaagatcccctgtaggtctttctggtgaccttctataattgctgctataacctttaccacgaggtgaagggccatgtacgaatctacatgtgtttccatagaggcagttgccagtcttcagccagttacggcactgtgtctctgctgtactgccagtgctgggtccaagcctctcaaatacactgggtcttcgggatgtgctatcagatatagtcttggtattttccactgtgaccttccttctaatttttgacattttgtactactaaggcttgtgaagataaagtagcactcaattcccaggacctaaatcgttatcactgttcctccccaagctcccttcgcaagtgcagtccggaggcaccaccgccgccgccgctccgaggagcgggggaggcgactctgtccccgcgcctggacccaggaggacgacgacgaggagaaagcgatgcgcgcgcggctcccgggaaccggctcttggctagcgaggagcccccgggatggctgagaagcagaaccaacccgcccgccgcctctccagggtcaagcgaaactgggtcgcaggaagaaaaataacgaagagattgtagattaagaaaaggcaacaaaaacactaccaggccggacgcgtgggtcgactc

SEQ ID NO: 23434 - DNA, 724 bp, Homo sapiens
  misc_feature 721, 722, 723, 724: n = A,T,C or G
gagatagggtcttctctgtcacccaggctggagtgtggtggcacgatctcagctcactgcaaccactgcctcccgggttcaggcgattctcctgcctcagcctcccagtagctggggttacaggcgcccaccaccacgcttggctaatttttgtgtttttagcagagacgggggtttcaccatgttggccaggctggtcttgaactcttgacctgaagtgatccgcccgcctcggcctcccaaagtgctgggatgacgcgtgagccaccatgcccgacgtgaagacaggaatttatacccatggagtgcaagaagggaccttgtaatttttaacacgtgacacttagtggcagatgagacctaatgaagccaggcccaccttccacaccagattataaattcccctggagcagagattaaatgttttattcaccaacatgcccagatccctcgcaatgcctacgcttgacaaacacctgttgtcaacaagtgcacgaggcagcctaggaggagaatgtctccacgaggagaattactcgggcctagcagctagagtatttcgaggtcatcctaactgggttccacttttgaatttttggtttttgggttttttgtttttttggagacaagatctcgctccacttgggagcaaggtctcccaaagctggagtgcagtggtgggacctcagcctccgggggtagctggggccaaaagtgcgcnnnn

SEQ ID NO: 23435 - DNA, 11657 bp, Homo sapiens
  misc_feature 1, 2, 3, 4, 11656, 11657: n = A,T,C or G
nnnnccgccaggtgctcctggagtgcagtgcctatcgccggggcgtgtgggggccacaccgagcaccagcttctccgacgccgggaagccgctgtcgccgccgctacctctccctgttgccgccgcctcagatctcttcatgccgctgtaagctcggaggccaaggatgcggagtaggcttcccccagcgcttgccgccctgggcgcggccctactcctgtcttccattgaggcagaagttgacccaccttcagacttgaattttaaaattatagatgaaaatactgttcatatgtcatgggcagaaccagttgatccaattgtgggttacagaataacggtggaccctacaacggatgggcctactaaagaatttaccctttcagctagtaccactgaaactttattgtcagaacttgtacctgaaacagagtatgtggtgacaataacttcatatgatgaagtagaagaaagtgtaccagttataggacaactaacaattcaaacaggtagttcgacaaagccagtggagaagaaacctggaaaaaccgagatacaaaaatgctctgtcagtgcctggactgatttggttttcctcgtggatggctcttggagtgtgggaagaaataatttcaagtacattttagacttcattgctgctcttgtgtctgcttttgacattggggaagagaagacaagagttggagttgttcaatacagctctgacaccaggactgaatttaacttaaatcagtactaccaaagggatgaacttcttgctgcaataaaaaaaattccatataaaggtggcaacacaatgacaggggatgccattgattatttagttaaaaatactttcacggaatctgctggggcaagagttggctttcctaaagtggcaattattattacggatggaaaatcccaggatgaagtggaaattccagcaagagagcttcgtaatgttggagttgaagttttctccttgggcattaaagctgcagatgcaaaagaactcaaacaaattgcctccacaccttcactgaaccatgttttcaatgtggccaactttgatgcaattgtggatattcagaatgagatcatctcccaggtgtgctcaggagttgatgagcagcttggtgaattggttagtggagaagaagttgttgagcctccttcaaatttgattgccatggaagtctcttcaaaatatgttaagctaaattggaatccatctcctagtccagtgactggctacaaagtcatcctcacaccaatgactgcaggaagccgacagcacgctctgagtgtggggcctcagacaaccacgctcagtgttcgcgacctctcagcagacacggagtaccagatcagtgtttccgccatgaagggaatgacatccagtgaacccatttcaataatggagaagactcagccaatgaaagttcaagtggaatgttcacgtggtgtggatataaaagccgatattgtgtttttggttgatggctcctatagcattgggattgcaaactttgttaaagttagagcctttttggaagttcttgtaaaaagttttgaaatttcaccaaatagggtccagattagtcttgtgcaatacagccgggatcctcatactgagttcactttgaaaaaattcaccaaagttgaagatataattgaagcaataaacaccttcccttacagaggaggatctacaaatactggcaaagcaatgacttatgtcagagagaaaatatttgtgcctagcaagggatcaagaagcaatgtgccaaaggtcatgattcttatcacggatgggaaatcatcagatgctttcagagatcctgcgataaaactgaggaattcagatgttgaaatctttgcagttggtgtgaaggatgccgttcgctcagaattggaagctattgcctctcctcctgcagagacccatgtgttcacagtggaagattttgatgcttttcagaggatatcttttgaactcacacagtctatctgccttagaattgagcaagaattggcagctataaagaagaaagcttacgtccctccaaaggatcttagtttttcagaagtgacttcttatggtttcaaaaccaactggtctccagctggagaaaatgttttttcatatcacatcacctacaaggaagcggctggggatgatgaggtcactgtggtggagccagcatcgagcaccagtgttgttctcagcagcctgaagccagagaccttgtatttggtcaatgtgactgcggagtatgaggatggcttcagcattcccttagctggagaggagaccaccgaagaagtaaaaggagcacctcgaaacctaaaggtgacagatgagactacagatagtttcaaaattacttggactcaagctccagggagagttttaagatgtcgaattatatatagaccagttgctggtggagagagcagagaagttaccaccccacccaatcagaggaggagaacactggagaacttgattccagacacgaaatatgaagtatctgtaattcctgaatacttctcaggacctggtactccattaactggaaatgcagccactgaagaagttagagggaatccaagagacttaagagtttctgaccctacgacgtctactatgaaattatcttggagtggggcaccaggaaaagtgaaacagtatctcgtcacatataccccagtggcagggggtgaaactcaagaggtcactgtgaggggagatacaaccaatacggtgctgcagggattgaaggaagggacacaatacgccttatctgtgacagcactgtatgcgtctggggctggcgacgccctctttggtgaaggaacaacacttgaagaacgtggttctcctcaagatttagttactaaagacatcactgacacatcaattggggcttattggacatctgctccaggaatggttcgcggttacagggtctcatggaaatcactttatgatgatgttgacactggagagaaaaatctgcctgaagatgcaattcatacgatgatagaaaatctgcagccagagaccaaatacagaatttcagtatttgccacttacagcagtggagaaggagaacctttgactggagatgccacaactgaattatctcaagattccaaaaccctgaaagtagatgaagaaacagaaaacacaatgagagttacatggaaaccagcaccagggaaagtcgtcaactaccgtgttgtctatcgccctcatgggagagggaagcaaatggttgctaaggtgccccccacagtcacttcgacagtgttaaagcgacttcagccacagaccacatatgacatcacagttcttcctatttacaagatgggagaaggaaagcttaggcaaggatcaggaacaacagcttctcggtttaagtctcctagaaacctcaaaacatctgacccaaccatgtcaagcttccgagtgacttgggagcctgcccctggggaagtgaagggttataaagtcacattccaccctacgggggatgacagaagactgggggagttagtggttggaccctatgacaacacagttgttttggaggaacttagggctggtaccacctataaagtaaatgtttttggaatgtttgatggaggagaaagctcaccacttgttggacaagaaatgacaaccctttccgacacaactgttatgccaattttatcttctgggatggagtgtctcaccagagctgaggcagacattgtgttgctggtggatggatcatggagcatcggccgggcaaattttagaaccgtgaggagtttcatttctcgtattgtggaagtctttgacattggccccaaaagagtacaaattgctcttgctcagtatagtggggatcccagaacagagtggcagttaaatgcacacagagacaagaagagcttgttgcaagctgtggcaaacttgccgtacaaaggaggcaatactctcacaggcatggctttgaatttcattcgccaacagaacttcaggacccaagctggcatgagacctcgagctcgaaaaattggtgtgctcattactgatggaaaatcacaagacgatgttgaagcaccttcaaagaaactcaaggatgagggagtggagctgtttgctattggtattaaaaatgctgatgaagtcgaattaaagatgattgcaactgatcctgatgatacccatgactacaatgtggcagattttgagtcactctccaggatagtggatgatctcaccattaatttgtgtaacagtgtcaaaggtccaggtgatttggaagcaccttctaacttagttatttctgagcgaacccatcgttcttttagagtgagctggacaccaccttctgacagtgtggatcgatataaggtggaatactatccagtttctggagggaaacgtcaagaattttatgtgagtcgaatggaaactagcacagtgctgaaagatctgaaacctgaaactgaatatgttgtcaatgtgtattctgtggtagaagatgaatatagtgagcctctgaaggggacagaaaaaaccttgccagtgcctgtagtcagcctgaatatttatgatgttggccctaccaccatgcatgtgcagtggcagcctgtgggaggagctactggctacatcttgtcatacaaacctgttaaggacacagagccaacaagacccaaagaggtgcgtttggggccaacagtgaatgacatgcagctgactgaccttgttcccaacacggagtatgcagtcacagtccaggctgtcctgcacgacctcactagtgaacctgtcactgttcgggaagtcaccttgcctttacccagacctcaggatctgaaactcagagatgtgactcacagcactatgaatgtcttttgggaacctgtgcctggaaaagtgcgtaaatatattgttcgatacaaaacaccagaagaggatgtcaaagaggtagaggtggacagatcagagaccagcacttccctcaaagacctcttctcacagaccttgtacacagtcagcgtttctgcagtacatgacgagggggagtctcctccagtgactgctcaagaaactacccgacccgtgccagccccaacaaacttaaagattactgaagtaacatcagagggtttcagagggacttgggatcatggagcttcagatgtgtctctctacagaataacttggggaccttttggaagctcagataagatggagaccatcttaaatggagatgaaaacactttggtgttcgaaaacctgaaccccaacaccatctatgaagtttccattactgccatctatgctgatgagtcagaaagtgatgacctgattggcagtgagcgcactctgcctatcttaacaacacaagctcccaaaagtgggccacgaaaccttcaagtgtacaatgcaacatctaacagcctgactgttaagtgggatcctgctagtggtcgtgtgcagaaatataggatcacttatcagccttccacaggggaaggcaatgagcaaacgaccacaataggaggacggcagaacagtgtggtcctgcagaaactgaagccagacactccttacactatcaccgtatcctctctgtatcctgatggtgaaggaggtcggatgacgggaagaggcaagaccaaacctctaaacactgtaaggaacctgagagtgtatgacccttctaccagcactctgaatgtccgctgggaccatgcagagggaaatcctcgtcagtacaagctcttctatgcaccagcagcaggtggtccagaggaactggtaccaatccccgggaataccaattatgccattcttaggaatctgcagccagatacctcatacactgtgactgtagttcccgtttatactgaaggtgatgggggacgcacatcagatactggaaggacattgatgagaggactggcaagaaatgtccaagtatacaatcctacacctaacaggctcggtgttcgctgggaccctgcaccaggacctgtgctgcaatatcgcgttgtgtattctcctgtggatggcacaagaccctcagaatctatagtagtgccaggaaacacgcgcatggtgcatctggagcggctgattccggacacactctattccgtgaaccttgtggctctgtactcggatggagagggaaatcccagccctgcccagggccgaacgctaccacgcagtggaccaaggaacctgagagtctttggtgaaacaaccaatagcctctcggtagcctgggatcatgctgatgggccagttcagcagtacaggatcatctattctcccactgttggtgatccaattgatgaatataccacagtcccaggcagaagaaacaatgtaatactgcagcccctgcaacctgacactccatataaaattactgttattgctgtttatgaagatggagatggtggccatctaacaggaaatggaagaactgtgggactccttcctcctcagaacatacacatctctgacgaatggtatacaagattcagggtgtcctgggatccttcaccttctccagttcttggatataaaatagtatataagccagtgggttccaatgagcccatggaagcctttgttggagaaatgacatcatataccttacacaatctcaatcccagcaccacctacgatgtgaatgtttatgctcaatatgattctggactcagtgtccccttgacagatcaaggcactacattatatttaaatgtaacagatctgaaaacttaccagattgggtgggatacattctgtgtcaaatggtcacctcaccgggcagccacctcctacaggctaaaactaagccctgcagatggaaccaggggacaagaaattacagtgcgtggatcagaaaccagtcactgcttcactggcctttcaccagacactgattatggtgtcactgtttttgtgcagacaccaaatctcgagggaccaggagtctctgttaaagaacataccactgtgaaaccaacagaagcccctacagagccacccacacctcctccccctcccaccattccaccagcccgggatgtatgcaaaggggccaaggcagatattgtgttcttgactgatgcctcctggagcattggggacgataattttaacaaagttgtaaaattcatcttcaatactgtgggaggctttgatgaaatcagtcctgctgggattcaggtttcatttgtgcaatacagcgatgaggtcaagtctgagttcaagctgaacacgtacaatgacaaggccctagcccttggggccctccagaatattaggtacagaggaggaaacacaagaacaggcaaggccctcacgtttatcaaggagaaagtcttgacttgggagagcggcatgaggaagaatgtccctaaggtgttggttgtggtcacggacggtcggtcccaggatgaggtcaagaaggcggctttggtcatccagcagtcagggttcagtgtctttgtagttggtgtggctgatgtcgactacaatgagcttgccaacattgccagcaaaccaagtgaacggcacgtgttcattgtggacgactttgaatcttttgagaagatcgaagacaatcttattacatttgtttgtgaaactgccacttcaagttgtcctctcatttatttggatggctacacctcaccaggttttaaaatgcttgaagcatacaacctgacagaaaagaattttgcttctgtacaaggagtatctttggagtcagggtctttccccagctactcagcatacaggattcagaagaatgcgtttgtgaatcagcctacagcagacctacacccaaatggactccctccttcatacacgattatattattattcagacttctcccagaaactcccagtgacccttttgcaatttggcaaatcacagacagagactacaaaccacaagttggagtgattgcagatccttctagcaagacgttatcattctttaacaaggatacaagaggcgaggtgcaaactgttacatttgacacagaagaagtaaagacattattttatggaagttttcacaaggttcatattgtagtgacctcaaaaagtgttaagatttacattgactgctatgaaattatagaaaaagacatcaaggaagctggaaatataacaactgatggttatgaaattcttggaaaactccttaaaggggaaaggaaatcagccgcattccaaatccagagttttgacattgtctgcagtccagtgtggaccagtagagacagatgctgtgatattccctctaggagagatgagggaaaatgccctgcttttccaaattcttgcacatgtacacaggacagcgttggacctccaggacctccaggccctgcaggaggacctggtgctaaaggtcccagaggtgaaagaggtatcagtggggcaattgggccccctggtcctcgtggagacataggtcctccaggcccccagggtcctccaggccctcagggacccaatggactctctattccgggagagcaaggtcgccaagggatgaaaggtgatgctggagagccaggacttccaggccgaacaggaaccccaggattacctggcccaccaggaccaatgggacctccaggagacagaggcttcactggaaaagacggtgcaatgggacccaggggcccaccagggccgccgggaagcccaggctccccaggagtcacaggaccaagtgggaagccaggaaaacctggagatcatggcagaccaggtccatctgggttgaaaggagaaaaaggtgataggggagacattgcttcccagaacatgatgcgagcagttgcaagacaagtctgtgaacaattgataagtggtcagatgaacagattcaatcagatgctgaatcagattccaaatgattaccagtccagtcgcaaccagccaggcccgccgggtccaccgggacctcctggtagcgcaggagccagaggagaacctgggcctggggggcggccaggcttcccgggcacaccagggatgcagggaccccctggggaacgaggtttgccaggagagaaaggtgaaaggggtactggatcttcaggacctcgggggctgcctggccccccaggtccacaaggagaatccagaacaggtccaccagggtccacaggttcaagaggtccccctggcccccctggccgtcctggaaactcaggtatccgaggacccccaggtcctcctggatactgtgattcttctcagtgtgccagcatcccatacaacgggcaaagctatccaggttccggctaacacattttctaagtcgccagtgctgcttacagtttgaatacatgaaaatcctgtttctgagatgtttgcgcacgtgcttattaggaaatgagtctgtatggaaatctcaccacagataatggttaacgaaccgggtcgacatcacaaaggagggtggagactctttttactaacttgaatgagacaaaagcagtggtgtcagtttataatcctgatgcatttcagtaataatgtagaaaaacattattttaaaaaagttccaacacacagccatgaggagcctcagttttgaaagaggtgcataataaaactactaaccagaggagtctatgccattttaagaaaaacaattaacctggttaaagagaaatgtcttatgtaaataataaactaattgtggcttgtaaatgatttgtatgtgatcctgtcgactaaaatcacttaacaattctacaataagcttctgcatcaaagcctgccgcttgctctatgccggaataacaccaaatggaatctcctcatctcttgcttgttagcgatgtgtctgattcagggcatctgtctttttgttacttttttgtccgtgtcctctcatttgggttttgtaactgcaattttcaaaccaaagtttaaaatcaccttttcttcctgttttgctgtagtcactggtgttcctcacccaccagctgtaactcagtttgtgtgaggtacagccacagaagatgtcatgtactgtatattacctggtgatagttgcttttcaccccccgagttcagtttctaggagccaatgaaacttcccctcacctcctcatctttccaagttgttctttgaattgaggagtttgaaggcataaacagttacttggggatttgcgaaaatcctacttagttactgcgtttacagttctttggcccagtctctgacccttcccaagtatttgtgcaatgattgtgtttactgctggatttttgaaggtttttttttttaagaaagtgccatttcattatttgattatcaccaaattatctggaaataattgggacattgtaacttatctatttatagttatgagattaagactggagtgccatcaccgcgggtgatgatttagcttttgctgtgtgtgtgtgtgtgtgtgtgccttccaaatcatgccataattgtaatgttgaatcggacagagccttacgtgcccgagggcggggcctacctgcctgagcgcgagcccttcatcgtgccggtggagcccgagcggacagcggaatacgaggactacggcgcagacgagcctgcagaggagcctcctgagccccaccggcgctggcggcgcgccctgccccacggacccgggcagtgaaccagagatcacgcgccgcgccgcgaggcttgggggaggtgttgaaattctcatttacaggtcagatagagcagtgtacgtcttttctgaggtgtttcttccagcgttgctcatccaggagtaccctttctgattgtagagaaccttgtttctgcaggaagcctagctccaagcacgcagtctgtagacatttttgcctttgcccttgaaatgcttgcaaaatactttgttaacaaaagctgcaaagagagaacatgccgtgtgcctttagttagcacagcgggcagcctcagtgaaactcttaggttaagcagttaagtcctggaacccagagctgctgtgtatttcgagcgggcagtttatcttttgctatacttattttcaattcaattacaccacgattcaaataattcccctcctaaaaccaaaaaggagggaaacgtcaactccattgcaattacttatcttcctcttctatctctgttatacgccggggcatagaatgctcgtatacatctctttaacaaccacaaaccttaagccatgtagatgaagttagtgcatcaacgggatacagttccatattgccttaaacctccttgttttagacacactaacatttataccaaattgcagattattctgcagagagggaattgcatgtttgtgttgtatatttagtatgaacttttttcagaatataatatttcttagttatcaaaagtagttggaaaacatttgcaagactatgaacatagaattgctgcttttatattttaactgcagattgtgaatttcactgccttatattatttatttctgaaacaaaagaggcatttttcaataaaactactgaaaatttgaaaaaaaaaaaaaaaaaaaaaaaaaaaaaatgactagtcttgagaaaaaaaccttccacaccttccccttgaann

SEQ ID NO: 23436 - DNA, 766 bp, Homo sapiens
  misc_feature 1, 2, 3, 4, 5, 6, 7, 8, 9, 10, 11, 12, 13, 14, 15, 16, 17,18, 19, 20, 21, 22, 23, 24, 25, 765, 766: n = A,T,C or G
nnnnnnnnnnnnnnnnnnnnnnnnnggtcttttgtgttgtaaaggttgttggtgttaaccataattgactttttatttaaaaaattacacggagcaatttccagcttatctttttttataaaagtactgcctatatcaaacattttatatcacgttaattccattgaagagctgcctttttctgttaaggtactgattccaattgatgggatacatgcccttaatacagaaagtttccattatttattcaaatatcaaaattaagattattgagaagtttattgctttatggctgggcaagatgctactagcacattttaggtaaataatattctttattaaaaactatgaggtcattctgtttaaaactttcaagataattcacggaaaacagatatatctattcaaattaaacattaaagggccaggctactagctatagacatttatatgtgaagcagctcttttttttttttttctgagaccgagtctcactctgtcgcccagggtggagtgcagtggcccaatctcagctcactgcaacctccgcctcctgggttcaggcaattctcctgcctgagccccccaagtagctgggattacaggcgcgtgacaccacacccggctaatttttttgtatttttagttaagatggggtttcgccatgtttgccaggctggtctcgaactcctgacctcaagtaacccacccgcctcggcctcccaagtgctgggattacagacgtgagccatggcgcccggccann

SEQ ID NO: 23437 - DNA, 1811 bp, Homo sapiens; identical to SEQ ID NO: 22429
  misc_feature 1, 2, 3, 4, 5, 55, 56, 57, 58, 59, 60, 61, 62, 63, 64, 65,66, 67, 68, 69, 70, 71, 72, 73, 74, 75, 76, 77, 78, 79,80, 81, 90, 1811: n = A,T,C or G

SEQ ID NO: 23438 - DNA, 766 bp, Homo sapiens
acagagagcagaggctcctgttctgtcctcgccacccacgagggtgacactgcttgtaaatggtggctgtgctctcccagcaagaaaaaagcacaactaaatccacactgcacacagacgcagacagaaagccttcaagtggctctgttttctgctccctgccttgccaggtccacaagcagagaggagtgtcaggcacatggccccgctgtcaggctccccagtgagctgcgggctcagcaggagctgcccactgacacacaggggacacccactcctgccaccttgggagcggttgccagacagagccgcactgggtgctggtgtcatccagggaccccacacacttccttaaatgtgatcctgcttccctctgcacagctgcatcctctcctcctgcaggactgtctggaaacttggctctcagtttgctctcccttctctcctctgcttaaatccagtggctgagtggacgatgacattcagaaacccatagagccccggagactcatcatcttccttattgatggtcagcggaatgctgtggacagtctggagtttcacacacgagttggtcagcatctgcagctccacggatgtcagggagaagcttctgaaacacttcttctgctgctcccggatgttctccctccactctgcacgctcatagtcagaggagatcaggaacgtgtaactcttgccgttgcggctgtgcaccctgaaggccatgctgggagacataagcagcagcagtgactcctgctcc

SEQ ID NO: 23439 - DNA, 886 bp, Homo sapiens; identical to SEQ ID NO: 21881
  misc_feature 1, 2, 3, 4, 5, 6, 886: n = A,T,C or G

SEQ ID NO: 23440 - DNA, 3405 bp, Homo sapiens
  misc_feature 1, 3322, 3405: n = A,T,C or G
nccaaaaactctttcagtagcagcagcttttaatgaagatgaagatgtaagttgatatcgagttttgtttttttactttaaccagttatttaaggaaggtattagtggcaaattataggttataatagtattagtgaattttctttataatagtttttgtgtctgtgtgtgacatccataaaaactggatactctatttttgcattttatttggttgtaagattattttagagtattgttgactttggggacaagaagcttaaggatgaaatcagcaaatgtttattatgagtagtttgtgctaggaagtatgtaggatccaaaaaaagaaaaatctaatactgttgcgtcaaggccgaggcggcagcggctgcgagaggcggcggcacgacgacggtccctcagcccagccaccatgagcaccaagcagatcacttgcaggtattttatgcatggtgtgtgtcgggaaggaagtcagtgcctattctcacatgacttggcaaacagcaaaccgtccaccatctgcaagtactaccagaagggctactgtgcctatggaactcggtgcagatatgaccacacgaggccctctgctgcagctggaggtgctgtgggcaccatggcccacagtgtgccctccccagctttccacagtcctcaccctccttccgaggtcactgcatccattgtgaaaactaactcacatgaacccggaaagcgtgaaaagagaacattggttcttagagaccgaaatctctctggcatggctgaaaggaagacccagccgagcatggtgagtaatccaggcagctgcagcgacccccagcccagccccgagatgaagccgcattcctacctggatgccatcaggagtggccttgatgacgtggaggccagcagctcctacagcaacgagcagcagctgtgcccctacgcagctgctggggagtgccggtttggggatgcctgtgtctacctgcacggggaggtgtgtgaaatctgtaggctgcaagtcttgcacccattcgacccagagcagaggaaggctcatgaaaagatctgcatgttgacgttcgaacacgagatggaaaaggcctttgccttccaggcaagccaggacaaagtgtgcagtatctgcatggaagtgatcctggagaaggcctctgcttctgagaggagatttgggattctctccaattgcaatcacacgtactgtttgtcctgcatccggcagtggcggtgtgccaaacagtttgaaaacccaatcattaagtcttgtccagaatgccgtgtgatatcagagtttgtaattccaagtgtgtattgggtggaagatcagaataaaaagaacgagttgattgaagctttcaaacaggggatggggaaaaaagcctgtaaatactttgagcaaggcaaggggacctgcccatttggaagcaaatgtctttatcgccatgcttaccccgatgggcggctagcagagcctgagaaacctcggaaacagctcagttctcaaggcactgtgaggttctttaattcagtgcggctctgggatttcatcgagaaccgagaaagccggcatgtccccaacaatgaagatgtcgacatgacagagctcggggacctcttcatgcacctttctggagtggaatcatcagaaccctaaagagtagatggttgccctgcatcttgggctccatcggccgaaactttcccaagccagggtgtgcggagcttccctgtactgcagccaaggtgacgtgtgacttggatttgagtggagttgggcttagccttagtctcattcaatctccattattacagccatggggaagagtgaaagatataaagtaacctaattaaatgtatggaattgctatttttatagctgatatagttacacctcaagcccctcaggggtaacaactaacaaacacccaaactgtttggattgattgctttaaaaaacaaacctggctcttacctttgatcttttcttccccagaaatagtaaacttgcagctgcccctaatgcagcatatttttcttaccaaaggagtcttcagccctataaaaggattcctctatagtgtatttctctagtgtatttagtgtgtcgtcaaaattttgatttatacagagctttcaagaacacacaatgcaaagtgagcgcagcatagctgttaacaaacatacaacttttttctagggctttaagggtggtcatttttttcaagttctctcaagtgtcccaaatcagggtagcaatcttgttgccacatgtgcagcaaacaaagtggaagtatagatcttcttctcccttagggaggctcttgaaggagcaggaggtacagtactgggtagcagtctggccctcctgtcgtctggttggtgttggggcctccagccagggccctctaggggaaccaagcctctgctctcacctgtgggttcttgcccatcagggtaattgtattgagaactcaaatatacgtgcacttacatgtgtggttcgtactcaagtgatctattatctagctgcaaagcctggctttgatttgaaattttgtaaaaatttcatggcacccaaggtttctgattctgacccagcagtggtcctgaagagagctgatggcaagtcttgtagtcattttgattttaattgaagggtgagcataaccttgtgaaccagcactagcttgttccaagctggaatttatctaatctatttttgtgtttaaaaaagctgtacctaccaaataaataaatagtttataaaatgtattacttaaggtattagctgagtttagagtactttctgcttaattaatttttatacttaactcttcagtagaggtttacaaagagtacaaaggttaaattacaaattcattcccagcctaggctctgggcacatttcctgttcttgaattctgctcctgaagagggtgaacaaatggggcattcaagttgtgagctcagaattactttaaaaggaggtaacagccagccattacacctaaatttaatttattttattaaaataacataattgagggaccatcagataactgtattttgtcaggtgcaataaaaacaaaattaaaacccaaatcatccaaaaaaaataaaacacaaaaaatctgttcgggcggtccgccccggaaagttctaaaaccatcctgggggcgggccatgtcgtattgtgcacatggccacggggccagcaaccggccagggacgggggcgttcaccaaaaaaaacgcccgggacccggtgtcgacaaccagggtcggggcaacggtagcaggcaacgctatcncccccgccggggtaaaaatcaaacagacagcagcgcaccacagacacagcaacacgcacccgacaacaaacacgacaccacan

SEQ ID NO: 23441 - DNA, 676 bp, Homo sapiens
  misc_feature 676: n = A,T,C or G
acgcgggggcctgagccaaggccacgtgatgatgacagacggcactctggctttcctggagctgtctctatggtattcttcccagcccacccgtccctttggtagcggcagtcacgtgacagactctggggtgggtgctaccaaatacagccatgaagaaaaaggtgctgttgatgggtaaaagtgggtctggtaagaccagcatgaggtctattatctttgcaaattatattgccagagacacacgtcgccttggcgcaacaattgatgtagaacattctcatgttcgatttctgggaaacctggtattgaacctgtgggattgtggtgggcaagacaccttcatggaaaattatttcactagccaacgggacaacatcttccgaaatgtggaggttctgatttatgtctttgatgtggagagccgcgaactggaaaaggacatgcactattaccaatcatgcctggaggccattctgcagaattctccagatgccaaaatattttgcttggtacacaaaatggatctggtacaggaggatcaacgggacctggtaagaaacagaagaagtgctgcaccaaatgctcgacatgctttgcaaacttattttgtagaggtataggtaaatttgtaccattttttcaggaataaaaagtcagcagaagttttgaaagn

SEQ ID NO: 23442 - DNA, 367 bp, Homo sapiens
gcctcctgaccacgctgttggacggactaaatacgtccaccaagaactgttaaaccacaaaaattcctacgtgattaaaacaacaaaattaaaaactcctcctcctcatgacatggtgatttactttggcacggcctacgtggctctcacaagggactttgctaacttcgtcctccaagaccagctcgcacttgacttactctcctggtccaaggacacctcagccccacgaacatttctgggtgacactcaacaggattcccggtgttcctggctctatgccaaatgcatcctggactggaaacctcagagctataaagtggagtgacatggaagacagacacggaggctgccacggccactatgt

SEQ ID NO: 23443 - DNA, 7955 bp, Homo sapiens
  misc_feature 1, 2, 3, 4, 5, 7338, 7341, 7342, 7954, 7955: n = A,T,C or G
nnnnnccgcagcctcggctacagcttcggcggcgaaggtcagcgccgacggcagccggcacctgacggcgtgaccgacccgagccgatttctcttggatttggctacacacttatagatcttctgcactgtttacaggcacagttgctgatatgtgttcaagatgagtgggatgggagaaaatacctctgacccctccagggcagagacaagaaagcgcaaggaatgtcctgaccaacttggacccagccccaaaaggaacactgaaaaacgtaatcgtgaacaggaaaataaatatatagaagaacttgcagagttgatttttgcaaattttaatgatatagacaactttaacttcaaacctgacaaatgtgcaatcttaaaagaaactgtgaagcaaattcgtcagatcaaagaacaagagaaagcagcagctgccaacatagatgaagtgcagaagtcagatgtatcctctacagggcagggtgtcatcgacaaggatgcgctggggcctatgatgcttgaggcccttgatgggttcttctttgtagtgaacctggaaggcaacgttgtgtttgtgtcagagaatgtgacacagtatctaaggtataaccaagaagagctgatgaacaaaagtgtatatagcatcttgcatgttggggaccacacggaatttgtcaaaaacctgctgccaaagtctatagtaaatgggggatcttggtctggcgaacctccgaggcggaacagccataccttcaattgtcggatgctggtaaaacctttacctgattcagaagaggagggtcatgataaccaggaagctcatcagaaatatgaaactatgcagtgcttcgctgtctctcaaccaaagtccatcaaagaagaaggagaagatttgcagtcctgcttgatttgcgtggcaagaagagttcccatgaaggaaagaccagttcttccctcatcagaaagttttactactcgccaggatctccaaggcaagatcacgtctctggataccagcaccatgagagcagccatgaaaccaggctgggaggacctggtaagaaggtgtattcagaagttccatgcgcagcatgaaggagaatctgtgtcctatgctaagaggcatcatcatgaagtactgagacaaggattggcattcagtcaaatctatcgtttttccttgtctgatggcactcttgttgctgcacaaacgaagagcaaactcatccgttctcagactactaatgaacctcaacttgtaatatctttacatatgcttcacagagagcagaatgtgtgtgtgatgaatccggatctgactggacaaacgatggggaagccactgaatccaattagctctaacagccctgcccatcaggccctgtgcagtgggaacccaggtcaggacatgaccctcagtagcaatataaattttcccataaatggcccaaaggaacaaatgggcatgcccatgggcaggtttggtggttctgggggaatgaaccatgtgtcaggcatgcaagcaaccactcctcagggtagtaactatgcactcaaaatgaacagcccctcacaaagcagccctggcatgaatccaggacagcccacctccatgctttcaccaaggcatcgcatgagccctggagtggctggcagccctcgaatcccacccagtcagttttcccctgcaggaagcttgcattcccctgtgggagtttgcagcagcacaggaaatagccatagttataccaacagctccctcaatgcacttcaggccctcagcgaggggcacggggtctcattagggtcatcgttggcttcaccagacctaaaaatgggcaatttgcaaaactccccagttaatatgaatcctcccccactcagcaagatgggaagcttggactcaaaagactgttttggactatatggggagccctctgaaggtacaactggacaagcagagagcagctgccatcctggagagcaaaaggaaacaaatgaccccaacctgcccccggccgtgagcagtgagagagctgacgggcagagcagactgcatgacagcaaagggcagaccaaactcctgcagctgctgaccaccaaatctgatcagatggagccctcgcccttagccagctctttgtcggatacaaacaaagactccacaggtagcttgcctggttctgggtctacacatggaacctcgctcaaggagaagcataaaattttgcacagactcttgcaggacagcagttcccctgtggacttggccaagttaacagcagaagccacaggcaaagacctgagccaggagtccagcagcacagctcctggatcagaagtgactattaaacaagagccggtgagccccaagaagaaagagaatgcactacttcgctatttgctagataaagatgatactaaagatattggtttaccagaaataacccccaaacttgagagactggacagtaagacagatcctgccagtaacacaaaattaatagcaatgaaaactgagaaggaggagatgagctttgagcctggtgaccagcctggcagtgagctggacaacttggaggagattttggatgatttgcagaatagtcaattaccacagcttttcccagacacgaggccaggcgcccctgctggatcagttgacaagcaagccatcatcaatgacctcatgcaactcacagctgaaaacagccctgtcacacctgttggagcccagaaaacagcactgcgaatttcacagagcacttttaataacccacgaccagggcaactgggcaggttattgccaaaccagaatttaccacttgacatcacattgcaaagcccaactggtgctggacctttcccaccaatcagaaacagtagtccctactcagtgatacctcagccaggaatgatgggtaatcaagggatgataggaaaccaaggaaatttagggaacagtagcacaggaatgattggtaacagtgcttctcggcctactatgccatctggagaatgggcaccgcagagttcggctgtgagagtcacctgtgctgctaccaccagtgccatgaaccggccagtccaaggaggtatgattcggaacccagcagccagcatccccatgaggcccagcagccagcctggccaaagacagacgcttcagtctcaggtcatgaatatagggccatctgaattagagatgaacatggggggacctcagtatagccaacaacaagctcctccaaatcagactgccccatggcctgaaagcatcctgcctatagaccaggcgtcttttgccagccaaaacaggcagccatttggcagttctccagatgacttgctatgtccacatcctgcagctgagtctccgagtgatgagggagctctcctggaccagctgtatctggccttgcggaattttgatggcctggaggagattgatagagccttaggaatacccgaactggtcagccagagccaagcagtagatccagaacagttctcaagtcaggattccaacatcatgctggagcagaaggcgcccgttttcccacagcagtatgcatctcaggcacaaatggcccagggtagctattctcccatgcaagatccaaactttcacaccatgggacagcggcctagttatgccacactccgtatgcagcccagaccgggcctcaggcccacgggcctagtgcagaaccagccaaatcaactaagacttcaacttcagcatcgcctccaagcacagcagaatcgccagccacttatgaatcaaatcagcaatgtttccaatgtgaacttgactctgaggcctggagtaccaacacaggcacctattaatgcacagatgctggcccagagacagagggaaatcctgaaccagcatcttcgacagagacaaatgcatcagcaacagcaagttcagcaacgaactttgatgatgagaggacaagggttgaatatgacaccaagcatggtggctcctagtggtatgccagcaactatgagcaaccctcggattccccaggcaaatgcacagcagtttccatttcctccaaactacggaataagtcagcaacctgatccaggctttactggggctacgactccccagagcccacttatgtcaccccgaatggcacatacacagagtcccatgatgcaacagtctcaggccaacccagcctatcaggccccctccgacataaatggatgggcgcaggggaacatgggcggaaacagcatgttttcccagcagtccccaccacactttgggcagcaagcaaacaccagcatgtacagtaacaacatgaacatcaatgtgtccatggcgaccaacacaggtggcatgagcagcatgaaccagatgacaggacagatcagcatgacctcagtgacctccgtgcctacgtcagggctgtcctccatgggtcccgagcaggttaatgatcctgctctgaggggaggcaacctgttcccaaaccagctgcctggaatggatatgattaagcaggagggagacacaacacggaaatattgctgacactgctgaagccagttgcttcttcagctgaccgggctcacttgctcaaaacacttccagtctggagagctgtgtctatttgtttcaacccaactgacctgccagccggttctgctagagcagacaggcctggccctggttcccagggtggcgtccactcggctgtggcaggaggagctgcctcttctcttgacagtctgaagctcgcatccagacagtcgctcagtctgttcactgcattcaccttagtgcaacttagatctctcctgcaaaagtaaatgttgacaggcaaatttcatacccatgtcagattgaatgtatttaaatgtatgtatttaaggagaaccatgctcttgttctgttcctgttcggttccagacactggtttcttgctttgttttccctggctaacagtctagtgcaaaagattaagattttatctgggggaaagaaaagaattttttaaaaaattaaactaaagatgttttaagctaaagcctgaatttgggatggaagcaggacagacaccgtggacagcgctgtatttacagacacacccagtgcgtgaagaccaacaaagtcacagtcgtatctctagaaagctctaaagaccatgttggaaagagtctccagttactgaacagatgaaaaggagcctgtgagagggctgttaacattagcaaatattttttccttgttttttctttgttaaaaccaaactggttcacctgaatcatgaattgagaagaaataattttcatttctaaattaagtcccttttagtttgatcagacagcttgaatcagcatctcttcttccctgtcagcctgactcttcccttcccctctctcattccccatactccctattttcattccttttttaaaaaataatataagctacagaaaccaggtaagccctttatttccttaaatgttttgccagccacttaccaattgctaagtattgaatttcagaaaaaaaaaatgcatttactggcaaggagaagagcaaagttaaggcttgataccaatcgagctaaggatacctgctttggaagcatgtttattctgttccccagcaactctggcctccaaaatgggagaaaacgccagtgtgtttaaattgatagcagatatcacgacagatttaacctctgccatgtgttttttattttgttttttagcagtgctgactaagccgaagttttgtaaggtacataaaatccaatttatatgtaaacaagcaataatttaagttgagaacttatgtgttttaattgtataatttttgtgaggtatacatattgtggaattgactcaaaaatgaggtacttcagtattaaattagatatcttcatagcaatgtctcctaaaggtgttttgtaaaggatatcaatgccttgattagacctaatttgtagacttaagactttttattttctaaaccttgtgattctgcttataagtcatttatctaatctatatgatatgcagccgctgtaggaaccaattcttgatttttatatgtttatattctttcttaatgaaccttagaaagactacatgttactaagcaggccacttttatggttgtttttcttgcccactctggtaggggaaaaatcttttattaataggtgtcagtttcagacaactccaataccaagaaactgatgaccttttttgagctatttctccttaacccctaatacctttcttacctaaatttcagaatgatatctttttgatgtctaaaaagcaaagcattttataatatctcattagccaggctttttaggaacagagaagtttttccttgaaatttgattgtttgtttatttgtggcagggtgaaaaatgtacaaactacccctatttatacttatatctctctctatatgtacgcattatggaaatataggaagagatatagcccaaagatagatggtaagtagacagtctgaaaatgttgctccatactaaagaacctttctggaaatttgcatttcgctacttttttccacttgagaggggtctcaatacagggaggtggccaaggaacaacacttctcagtggccaccagttcatatatcccctcaaaaggctctacttttctccaccaaaccattgggttgcccaactgtgatggaaaaaacaagcagatgttggcccagaactccaggacctccccgtgggctgaggctcatgtggcatacaattcagtgtgaccagttttaatgttcagaaatatgtgaattagaatgacttttaacttcacacagcacaaaagagaaatggagtttaaactggatttgttttgttttgagtttcaagtcccttttcactacaacaccgtccaaaactatctacctatctcttcttttttatccatctgcccgctgtattttaatgtcaatcctaattcagacaaatccgcaacttcatgatactggtaatttataataattcgtgatcatgctgtttgaaggacaagagatgataaatctcttacggtttcaatcaggtactggactttggttacatctagttggagacgaaagtagtaaggaaccctgggcaaattgtcacataatgaacaagcaaataggtccctatataaggatttccagcgggcacaatcgcgcacgcggcactgcttggtctagacaccaatcggtcctcattttaggtacacacagaggacatcatggcgagcaaccgttcgctcgtgtttccctcctctctctcctccctctctctttgatatgtacatgacatnctnncaacacaacagaaaaaaaaacaaaaccaaaaacaaaagacaaacaaacaaaaacaaaaaaacaaacacaacaaaacaaaaggaagagaaaggggaacaagagaggagaggacaggagagaagagacaagagaacaacagggaagagaagaagaggagaagagagcgaggagggagaagggagcgaaagagagaaggagaaaaggagaaagagccggcatgaagcaggcgaggcaagaggaagagagacggaccagaagacgagagagaaagagagagagaaagaagaagaaaggaaggaagagagagagcacagagaagaggagagaacgatagaagagcgaaggagaagaaagagagagggaaacaagggagggcgacaaaagtgggaggaagcaaaggaagaagagacgagagcgagaggagaggaggagacgacgggagaggagaccaagagaaagagagaaggaaggagacgagaggagaacacagggagagcggcagagagagaggggaagagaggacgaggagcgccgagagaagcgagagcacagcaaccgagaggagcaaagcagagagaggaagaagagacgaaaagaagacggagagaagann

SEQ ID NO: 23444 - DNA, 965 bp, Homo sapiens
cgcgtccgggcgctcgcagactccggagtcgccaacatgtcgaccgccatgaatttcgggaccaagagcttccagccgcggcccccggacaagggcagcttcccgctggatcacttaggtgaatgtaaaagctttaaagagaaattcatgaagtgtcttcataacaataattttgaaaatgctttgtgcagaaaggaatcaaaagaatatttagaatgcaggatggagagaaaattgatgctacaagaaccattggagaaactgggatttggagacttgactagtggaaaatcagaggcaaaaaaatgaattttgatgagaagacccctgggccgtgttcagtggtctctcaggacggagggcatcatcctgcctcttaggttggctgaggcctgcgtgtggtgtccttagaaatgggcttcgaatagaagctccagccctgtgggggcgtctcctgggtagggagtggcgtcccgttttcccttaggagggtgtttctgcattgaacccctgagtgggacggcgttcccggcaaagctgggagggaggcgagcgtggggcaagaccccttgtcttcgaggccggggccctcttgtatggggcggttttatgttgcagtcctctgatactttctgagttcaaagaggtaaatgtataaatttcagtcccttctgaacacagatatcatcagaaaattaccattccctagcaggatgttttcgtgtttgtattcgtatatgccagttcatttcctttgaaaaaaaaaaaaagtggaacacaaagtaggaagtgagaaccttctggctttggatggattgacttcttgattctttctggttttgcctgaacaccaagtagcttcataatcaaagggtcattttctggtttgtatcagaccgtatttataaagttgggtatttgaaaaaacaaagaacaagtggagacaaaggcgactaccgaaggaa

SEQ ID NO: 23445 - DNA, 3228 bp, Homo sapiens; identical to SEQ ID NO: 22886
  misc_feature 1, 2, 3216, 3217, 3218, 3219, 3220, 3221, 3222, 3223, 3224,3225, 3226, 3227, 3228: n = A,T,C or G

SEQ ID NO: 23446 - DNA, 564 bp, Homo sapiens; identical to SEQ ID NO: 22496
  misc_feature 564: n = A,T,C or G

SEQ ID NO: 23447 - DNA, 886 bp, Homo sapiens
  misc_feature 1, 2, 3, 4, 5, 6, 7, 8, 9, 10, 11, 12, 13, 14, 15: n = A,T,C or G
nnnnnnnnnnnnnnncatctccttttattgacagaaatagaaatttgtgctgcagaggcagtagtacctcagagcatgagaaggtagtcaatggggctgacatgacaagccacaatgctggccaggggtcctaccatagtgggagaaccaaaaccatccagaactaacatgcagtctctaatttggagactctttattgtgaccaaaagatttggaccattagaagatccaagttaatctttcagcttcttatcctaggcagaaaaaggggctgagttcctgaaacatcacacaagtagagctggacaggtgctgatgcccagccttgctctaaaagtagtcaccattttccccgacttctcaacactgctctcactcagtatgtgccctagaaaacctctcaatgttataaacaagggacaggataggggcagcagcctagggtatgcagggaatcaaaagctgctacatagccgagagcatttcacaagaaacagcatgggaacactattgggtcaaggtcctcccgaacagctgctagaagcacacacaaagaaaaatgtggttgttctcccatgtcaggatcagctgagccaaagtcatggtccaggaagctgagcctcttcatgtccctggcagattatcaaaccccatggcattcccaagctgttccagttttcaagtacaggaaaatgcattctgtaatgaagtggggcccatgtaattgtttatattttcagttttaagcaggtatagtgcaggcttgttaggaatgtgtggaagggaagattggaagtgatttttcctcttttaaaagtaaacaaaattcttcaaatatgccctagttaactatttcagcataccatttttacttggttaacagtgt

SEQ ID NO: 23448 - DNA, 4859 bp, Homo sapiens; identical to SEQ ID NO: 23111
  misc_feature 1, 2, 3, 4, 5, 6, 7, 8, 9, 10, 11, 12, 13, 14, 15, 16, 17,18, 19, 20, 21, 22, 23, 24, 25, 26, 27, 28, 29, 30, 31,4859: n = A,T,C or G

SEQ ID NO: 23449 - DNA, 1073 bp, Homo sapiens; identical to SEQ ID NO: 23360
  misc_feature 1, 2, 1051, 1052, 1053, 1054, 1055, 1056, 1057, 1058, 1059,1060, 1061, 1062, 1063, 1064, 1065, 1066, 1067, 1068, 1069,1070, 1071, 1072, 1073: n = A,T,C or G

SEQ ID NO: 23450 - DNA, 675 bp, Homo sapiens
  misc_feature 604, 622, 628, 659, 670, 671, 672, 673, 674, 675: n = A,T,C or G
acgcgggcaatatcctgccgggcagcaagccatacagcccaggcctctcccgcccataccaaggccagcatccttcagaaaaagcatccccgaggaggaagacgaatcgttaaacatctgaaagggtcaggccagcatcttagaaaagcattcccgaggaggaagacgaatcgttaaacatcttaggtcagctctagcctctcggaatttgtcttcttcagtggaaaccccgagaagactgatcagttcttcagttctaaaacaatggcccagggtttggtgacgttcgccgacgtagccatagacttttctcaggaggagtgggcctgtctgaactctgctcagagggacctgtactgggacgtgatgctggagaactacagtaacttggtctcactgggtgagttgcacgcctcagataacttagactgcctcctgggaatatccgctctcccctgtgaatttcaggaccgcctttcaagaaactagttgaatttcttcttcctgtccccaaggaatgtattgagccttattgatgtgggccgtgagcaccacaaccttcccctcccatccatcggttaccttcccacctttgttcggattnccccgtaaattcatcttnaatttncttaatgttccgtggggaatgagtgggggantttggggatannnnnn

SEQ ID NO: 23451 - DNA, 2678 bp, Homo sapiens
  misc_feature 1, 2, 3, 4, 5: n = A,T,C or G
nnnnnatcctcttagttgctcagactgaaaagctagcagccatcctggatttctctcacactgcctattcaacgtgtgaatgcatgagtggaaagctgagttcgcactcgtgactggccggggtcgactctgacattcactcccactttggcgcgctgatttgcctctgagcggatgaaggttgagccatggcgggcggggccggggaggcgggcttggagcgagggggcggggcaggcgccacaaaaacgcgctcgcacagcctaggctaggtacgaggctgggtgccccgcgctcccgggtggcaagatggtggcgcgcaggaggaagtgcgccgcgcgggacccggaggaccgtatccccagcccactgggctacgcagctattccaatcaagttctctgaaaagcaacaggcttctcactacctctatgtgagagcacacggcgttcgacaaggcaccaagtccacctggcctcagaagaggactctttttgtcctcaatgtgcccccatactgcacagaggagagcctgtcccgcctcctgtccacctgtggcctcgtccagtctgtagagttgcaggagaagccggacctggctgagagcccaaaggagtcaaggtcgaagttttttcatcccaagccagttccgggtttccaggtagcctatgtggtgttccagaagccaagtggggtgtcagcggccttggccctgaagggccccctgctggtgtccacagagagccaccctgtgaagagtggcattcacaagtggatcagtgactacgcagactctgtgcccgaccctgaggccctgagggtggaagtggacacgttcatggaggcatatgaccagaagatcgctgaggaagaagctaaggccaaggaggaggagggggtccctgacgaggagggctgggtgaaggtgacccgccggggccggcggcctgtgctcccccggactgaggcagccagcttgcgggtgctggagagggagagacggaagcgcagccgaaaagagctgctcaacttctacgcctggcagcatcgagagagcaagatggagcatctagcgcagctgcgcaagaagttcgaggaggacaagcagaggatcgagctgctgcgggcccagcgcaaattccgaccgtactgagctgtgagagccgcagtgaatggctggaggtgcagggccaggaggaggcgaggcagggcctgcagcggtctctgagaggccgagctctggccaacgggccccaggttgaaggccaccgcgtccaacagccccatcagagtccacacaggccaggagggaaggaccaggccacccctcgggtcttgtgcttcagcagtcctggggacccaggcgtgccgagaggaggacttgtccttcctgcttcttgcctccacaccctcctctccaggaccctggatgaatccgttctgtgcttccttttccctcaatgcaaaagcccttgctggcaacgaaaaagcctcaaaagcagtgagaatacaagaaccttttattttccatccagttgggcagcagggaaaggctaggtgggcccagcctgcccttccttcctccagctggctggatatttattattagccaggagaaagcagccctggaacccagactctgtctccctcttgaggtcacagatgttgaagttggaatctcgctccttcccctgactaccatcctaggctgggcctcaagactagtgaggcctgtccccaccatccctggccttgttgtggggctcaggaactcagagtcccagtgttgagtctgggagcactaggtcttcatagttccaggcccagagctacagctgggctgggagcatgtgtgtgcactgtaagaaggagctgatgatactggccacgtgctggggttcgctcatgtggacacagtgattgcctgggacttccacaaactggaactgctctttgagggtggatttcatcgtgtctatcatgaacgacagggactccttctcagagtaattctgtcttgaatcaaaatatccgtggactgctttgatcaacaggacatggcctgcagcttcctgatggaatgcgcacacagctccctgctgatgaagtcaatgctgttctctgcccaggcgagcctctggtctctgttcagaaccagacctgtggccaccttcgtggttcctctttgcaggagaagctccccgcactcctcactcaagtggctattgctcttcagtaacctctgcagcagctgcttcaggctgaacacgtgcgagggctcctgggaggcctctacctgcagcacgtgctctatggctctccgcttgtaggtcagcaagttctccatttcatctgattccaggagaaagagcggcgtgtccagcaagataagtttatccaccatctcggggaaggtacagaaaaacattccgcccacccctagacggccccacccctaggccgccccgccccacccctaggccgccccgccccaccccaggcaagccccgcaactccagcagtccccgcaactccagccgtcgccgcccccattcagaaggccccgccctcccaccgccctgccagagccccggcgggccctgtgcccagggccgctggctccaccccaggaaggccccggctccacccccggaaggccggacgcgtgggtcgactccc

SEQ ID NO: 23452 - DNA, 1505 bp, Homo sapiens
  misc_feature 1504, 1505: n = A,T,C or G
acaaatggacaatatatatggtatgtgaccattgtgtaaaaaactgtaatagataactccagagggatagaaaacttgatggtgactgcctttagggagtggcagtgggcatggacctgggaaggcagatgtagttgtcatggtacaagatcgcggtgctggtgctgctgaacgagatgagccgcacaggcgagggcgccgtcagcctcatggagcggcggaggctcaaccagctgctcctgcccctgctgcagggcccagatattacactgtcaaaactttacaagttaattgaagagtcttgtccacagctggcaaattcagtgcagatcagaatcaaactgcatggctgcaaggcgagtagacaggcatatggcacacagttttttgatgaccctttcagattctttctctggcaactgaaccagaggttcacaacaacaagtgtacgtaggttcgtttctgcgtcacatgcatcttggcactacaggtaagcttgcatttcatgccacagtgtttaaactgtacactgcccttcagcagtacttccagaatggtgagaaaaagacagcggaggatgctgatatggaactgacccagtcagcagcatgcagggtgcaaagcaacacaatggcaccaaagcaagcacactgcactgtcatcctgtcacagagcaagcaggcaggtcatcatcgcccgcaggcgccctctaggacccctacacaaaaccacagcccgcaattcctctctctttctactccacaccagtgcttcatctctgcctccaaagcacattgcattgagcactccaagcgcccctccaatcccagcctttccctctgccagcaacggcactcaaccacaaaatccggtacggaacatcttcatcccttgacccccccgcccgcaggccgccactcattctccacgctaactcaaacaccaaacctccggggtccacagcaagccacccaagccccaccaccacagctcctcctcccatcattcccgacacgccctgatcctcaccgcgaccccgacacgcaaccacaacgacccgccaccagcgccaacaggcccgcgagccctgacgcactcacccggccctgacacctgaaccgccctgacactggccggcccggcaaccaatccacaagcacccaccccccccgccacgcgccgcacccaccgaacgcacccaacagcccacgcaacacccccaccaccccaaccacgcacgcaaccgcccacacccctagcccccccacacaccccaccacaccagaccacacgccacaaacggaacaaacaggagcacacacggagaacagcaaccccgccacaggacacagaccctgtcacacacgaaagactgccaccccaacgccgacgacccaccacacacacgaaacacccccccacaccccccaccacacaccagaccacaacaaacacaacacacaacagacagatcaccccaccccaccgcgcgcaccaccaacann

SEQ ID NO: 23453 - DNA, 2053 bp, Homo sapiens; identical to SEQ ID NO: 22286
  misc_feature 2052, 2053: n = A,T,C or G

SEQ ID NO: 23454 - DNA, 1352 bp, Homo sapiens
  misc_feature 1, 2, 3, 4, 1347, 1348, 1349, 1350, 1351, 1352: n = A,T,C or G
nnnnacagcccgctttattgagcgcaaccactgtgtgctctggggttccccggtggttttcacgaaacaaggtggttgactgctcacgcaggcgtttctgccccggaattttggtaaccgcgaaaaattgtatgcgtgtcacaaggagtacaggccccgcgttgcaataacttggatagaaaaatattataaggttttaattttctaaataccaagggttaacatcttacgattaccctttgaaaatagggtattttggaacatttaaaaagttctcaaaataagtacaaagcttattcacatttttactaaatccaacacaactttcacaaatggcaaaatgattgcctcttcaaagcaatgcagcctagtttttggtgggttctggtcactgcttagctaagtctttgttgggcagagtcctggctccacagtctccttcgatgggctccttgatacacgaggcttcataacatgcgctctttgaagaaccatttctgatgatccgagttggtgcagtctcgtaagagtggaacgaaactgtcactcgactccttcctcgcagcctggacacatttcttggactgttcgtgaaataaagatccatcctcctgcaagatgaacttctgattctctggggcagtttcttcgcagagatgcatgataagggtatccattcctgcttccacagcaatgcagccctcaggctggtgggtgttatagcgtatttctttctgggacgtgtactcgaaaaactgattctggcccatcccatgacagaggtacagaatgacctggtgtcccacaatctggttttcatcgggagggttatagtcaaagcagtagtctgttagtcctttgttctggagcatcccgaagaagccaggcctgtcctcaggcacatgcagttctggatacacagtctccaagaaccacttgaagtctttacactggagcttgtcccggagctgcttcctctctgtcacatccccaaaaggttccaagcgggcacgggggttgcgatggtagtagagctctttaaattcatccatccatacttcagctgcacaacactgttggccagagccttgttgcgggagtagggagcttgcttggggaaaacatggccaacatgggaacatgggtgtgtttccagaaccccaccacactgccagatcctaaaggaaaattcgaggttttctcctccccaaacttccattcctgtatcataagaccccagatattcaaaatatttcttactcacagcaaacagcccaccagccattgttggagaccacatggcacgcagcacatgctcaggtcacttcctgctccgatcccttcagnnnnnn

SEQ ID NO: 23455 - DNA, 1927 bp, Homo sapiens
actggagagaaggcacagcaccctagggtgacatcagtggacaggtcagtttcctgttcctgttcccagccacccctgtctgtctgcccagggacctacctgcctggcccactcctgctgccacccctctccatgagtgggactcctgagcagtgccaggcccaggccctcagggtggcagttgctggatggggccaggcttcccattccctggcaggcagactcttggctctggaagatccctgggggactctgacttcttggttactcaggctactccgtaagggtagccttacgagagcgtaagggcatgaggggaagtcgatgggtagaccaggtgtctctgatttctctgaggaaatgcagcttctttgccaagaactcttgggctttggtggcttcgtcgcccttgcctggggtgggcgagttttagtctcttcagctgcagaccagaagctgagctgacctgaaaagagctggagttctggagtaggggcttccaggccagggcctgcttctgggtgagagtgggaggtaatggttgcttgaggcagaggcagtaaaccctcacacccgcagctggacaaaggcaccagctggctgtattctgtgggggcaatgtggcttctggaaggtctctccagtggctctgtagctggtcttggcaaagaatgttctagaccaagggttgtcaaactacagctcatgggccaaatccagcctgctgtctgcttttgtaagtaaagttttattggaacaaagccatgttcatttgttacatattgtctatggctgctttcacactgcaacagcagagaccatgtgtcctgcaaagcctaaaatatgttctgtcttatcctttacaaaaacagtttactgacccctgctctagacctccaaagacatggtatcctctttcctggtgttcaagttcagagaggtgtctggagtaggggctgagcctggcctggatgggcagtgctgtgacaagtgtctaggatggccgggtatcctgcacagagctagaaggctgcctggcacgggtgaaagcagagctgctccctgaccctctgcccctccctcctccaccctggcctgctttagctttccccagacatggccaacaagggtccttcctatggcatgagccgcgaagtgcagtccaaaatcgagaagaagtatgacgaggagctggaggagcggctggtggagtggatcatagtgcagcaacagaggggcctcccaggccggcatgacaggctacggacgacctcggcagatcatcagttagagcggagagggctagccctgagcccggccctcccccagctccttggctgcagccatcccgcttagcctgcctcacccacacccgtgtggtaccttcagccctggccaagctttgaggctctgtcactgagcaatggtaactgcacctgggcagctcctccctgtgcccccagcctcagcccaacttcttacccgaaagcatcactgccttggcccctctgttgctgcccatctgaaggccaatgacatgctttccctcctgcagctggctctctgtgaattccctcttatgctcctgcgctttcttcataaaccagttgggatctccacggtagtgcccatcattcttggtcactgccaagctgcccaaagccatcagggtcctctgcactgctgccatgtctttgccttcaaagaggtcaacagtctggaacatgtcagtcttgatgaccccatagtcctcagccgccttcaggaactgagccacctgctccatctgtttgaagaccatggagggtgggttctcgattttggactgcacttcgcggctcatgccataggaaggacccttgttggccatgtctggggaaagaaggcttcctcagggctcgcaggaaggagtgaagacttgtgtctg

SEQ ID NO: 23456 - DNA, 1883 bp, Homo sapiens; identical to SEQ ID NO: 23102

SEQ ID NO: 23457 - DNA, 1007 bp, Homo sapiens
  misc_feature 1, 2, 3, 999, 1000, 1001, 1002, 1003, 1004, 1005, 1006, 1007: n = A,T,C or G
nnncagaagaaagacatccaatctgttttttattttatttttttacacagggtcttgctctgtggtccaggctgaagtgcagtggcatgatcatcactcactacagccacaacctcctggtctcaagtgatcctcctgcctcactcagcctcccgagtagctgggactacaggcatgcaccaccacatccggctaatttagagaagtttttttttgtatagacagggtcgtagtatgttgtctaggctggtctcaaactcctgagctcaagtgatcctcccaccctggcctcccaaagacccaaagactacagacctgagccaccatgcccacctgttttcttgacaggacttgcatatgacaagctctctgcttctcctcacctatgcattgcaagccaggtcagaggcaggttaaacaccttaaggacatgttaggacaagtggcatacaagggaaaaaaacccgttcatttaagttacagaaacagaaaaaaaaaaactggcttattcccacacttactctactcaaagctttgagaagactaattttggcatcctctggctaaatacaaaacaacaaaacaaaacaaggcaaactctttcagcaagagctgtgggggaagggactataagggacacacacaactgacaggcaaaagctctgagcacgtgattgctaagtttaattcaactgttacaccccattctgccttgtaaaaataacaaaacgctcctatcaaaatgacattgtgatgtgagtacaggctttttgttttggtacagctctaaaaaatgttggcaccgaatgcacttaagaaaagtgttaaggcttaatacaaatacagagacgagtcatttctcaatgcagcttagagggtgagaacaggatgctaggtttttaaatcttccaaatacaggcagtccccaacgtacagacatacaggacacctcccaaacatacactcatagctgcctcgtgccgaattcttggcctcgannnnnnnnn

SEQ ID NO: 23458 - DNA, 372 bp, Homo sapiens
acgcgggtgccgcttccccttgctggatgccctacgcccactgccacttgactggatggaaactgggcctgtggtgatctcttgacctcttaatcctctccctacaaatcccaggggcactgggcatgatgctgggcctgtgctaccggataagctgtgtgttattcctgctgccatactggtatgtgtttctcctggacaagacatcatggaacaaccactcctatctgtatgggttgttggcctttcagctaacattcatggatgcaaaccactactggtctgtggacggtctgctgaatgcccataggaggaatgcccacgtgcccctttggaactatgcagtgctccgtggccagatcttcattgtgt

SEQ ID NO: 23459 - DNA, 3316 bp, Homo sapiens
  misc_feature 1, 2, 3, 4, 5, 225, 226, 227, 228, 229, 230, 231, 232, 233,234, 235, 236, 237, 238, 239, 240, 241, 242, 243, 244, 245,246, 247, 248, 249, 250, 251, 252, 253, 254, 255, 256, 257,258, 259, 260, 261, 262, 263, 264, 265, 266, 267, 268: n = A,T,C or G
  misc_feature 269, 270, 271, 272, 273, 274, 275, 276, 277, 278, 279, 280,281, 282, 283, 284, 285, 286, 287, 288, 289, 290, 291, 292,293, 294, 295, 296, 297, 298, 299, 300, 301, 302, 303, 304,305, 306, 307, 308, 309, 310, 311, 312, 313, 314, 315: n = A,T,C or G
  misc_feature 316, 317, 318, 319, 320, 321, 322, 323, 324, 325, 326, 327,328, 329, 330, 331, 332, 333, 334, 335, 336, 451, 476: n = A,T,C or G
nnnnncccaacctttttaaaaaccatttttggttttggccaccccccatttagaacccttttaaaaaattgttttttttttaaattttttaaggatttttttttttttttaccctttttaatttccattaaacagtttacacccccccttggctttttttttttttttcggtttaggggggggggttgggggttttttttttaaaattttttaagggcccccccnnnnnnnnnnnnnnnnnnnnnnnnnnnnnnnnnnnnnnnnnnnnnnnnnnnnnnnnnnnnnnnnnnnnnnnnnnnnnnnnnnnnnnnnnnnnnnnnnnnnnnnnnnnnnnnnatatcagggggaagcttttattgctgtggggggacctggagagggaggggggccttggaaatggggatacctgggaccacttgttccccccattcctcacagaaggccattcttnttcttccattgggggattccagganggttcagattcgggatcctcaaattccaaaacccctccaaactgaatacctaaggttatggaaaaggctagggtggggcacagaagtcaatgggggaacagaaagaggaaccaatgaaactgagaaccaaaagggacctgagaggccatgatgtccatgctgctgcctctgtgcagaccccagagaaaactcaggtaaaccaacggaaactccaaataagagagggtagggtgccccaggaattggctttggggcatcagacaagggagtgtgagtgtgagtgtgtgtgtgcagtggctgtgtatcagaagcaaccagggctaggagtggacgattctattcccacaggggaaggcctcctccatcccggttcctccaaaaccactttcaggggataaattcagccactgcttccgaacaggacccctccctgggacaaaagagccaggtaggagaggatgaagtgagaaatcttgggatgaaaacagggcacacagaagcagttcttagggaacagaatatcatggagcccagtgtgatagaaaatgggcatgaaacctaagtgtatgcatgtgtgtgagtgtgtgtgtgcatgagtgtgtatttgtgcatgtacgagggagtaagatcactcaaaggtgaaggggtcctgggtgctgaaaaagaagtgtccatccatgtggtcctccagggcatccttgtcactctcagcaggaaagcgctccttacagataggacactccttccatgtgggggtggcagggcccccagtgctggtttctgacagggtacccactgtaaagccactggccatgtcatagaaggcactgcccagttcaggaagcagtaagttggcctcctcacccccactctgcacagctgccatcaggactgacttctcatcttcagcctccgagtcagagctactgtcctcagctggcccagagaggtgaggagaaatgggagccggctggctgatgacaacaaggggagaagcctctcgaggcccagcaggagaggagcctgggtctccacgctcacaaaggccatagggtgggagcctcatgtcttctggggactcgtcctctgagtctgtcagagctgccgggcagctcagccccacagcggcctcctcatcctctgtggtggcatcctcattccacttctcatctgccaccttctccaggcgggcctctagctttctcatgtactctagcaattcctgtttctcctcctgtaactgctccttttccttctggagcacacgcagggctgaccgcagctctgtcagctcccgcttactttctgacaactgtaccaggctagaatccttctcccgggccagctcagtcttgaacacttggttttgggtcctctcctcctgaactgccttctccaatcgaagtatctctgcactcagcttcaggatcttgtccttctctgcctccacactctgcagcagccctgcccgctccttgctccattggcatttttcttccttcaagtgcaaaccgagctcagccagcctgccgttaacttcagccacttccaggcggctgcggtgtagttcggctatggtgcggtccctggctgctgctgcactggccaactcctccccaagaagggtggctttctgctggcttgaggctgcaagctcctgggcccctcgaagctgctccttcaagggctccagctcggccacccgctgctgggcctggcctagggtgtccttcatctgggccaccttgtctttcagtcgctgagcctgagcactctgctcctcttgccagctcttcgcctccttcaggtccaaatttaagtgatggttctcctgttgtgccacttggagctcagcctcactttgctccttgtctgcttgtacttctttcagttgcccaaggagcttctcttgttcccgagtcagggccttcactgtgtctctaagcctgtccagctccacttccttcgtcagcactttctcactgatggtctggatgtcatcctctagctccaggatgcgtgccacatggtctccctgttgccggctcaggatgtccctctcttctgtgatctccccatgggaccgggaaatccccttgtactgttccatcagctccgtgtgctcctgcctggcagttgccagagccctctcgagctcctgcactcggctcctcagctctgtcacctgtccctccagctgtagcttcagctgcatcaggtcattccgttcttgctggctctcatcgagctggttctgtaacacagttgccttggggacaaccagcaggatgtcagagcccccatcagcctcctccagggtcaccagttcatccatgggccttggctctcggaactggaaaggggggctctgcccacacacctggccctggcggttcacatatcggaactggtagagctgagctcctggtttgggcaggtagctggcttggaactggacactggtgtgaatgggggaaccatcagttgtactttcaggcacggaagaccacacaaatgtgtggtaatcccgaacacaggcagcctccaccttgaagatgccaatccagtcactggcactgggcatggtgcctgggggaagggtgtagtgacattccaccttggtgttggggatgtaggtccgggctacattgagaaagttgactccaccacgggatggtgcccggcttagtggtgattcttccatcctggccttgagatatctgtcctcccaacagacggatcagctgttcccctcacctttccggacgggtgcgtggcctcagaaagcagcaactaatctccaacagacggatcagctgttcccctcaccttaccggacg

SEQ ID NO: 23460 - DNA, 1677 bp, Homo sapiens
  misc_feature 1676, 1677: n = A,T,C or G
cccacgcgtccgcacgcctccgcgggcagttaccagctttggctgctcgcgcctccccaactcgggtaaagctcctcggcctcggcgtgctgcgcctccgcggctgccctgcgccagaattcggttccctcaaaattataaaagcaggaaagctcaagacaaagaaatccaacaaggctagtgatttcagtgatatggagaattggccaacaccaagtgaattagtgaacactggatttcagagcgtcctcagccaaggaaataaaaagccacaaaatagaaaagaaaaagaagagaaggttgaaaagagaagtaacagtgacagcaaagaaaaccgggaaacaaaattaaatggtcctggtgaaaacgtcagtgaggatgaggctcagtcaagtaatcaacgtaagagaggttggaagcgagatagagaaaaaagagatgatcaagatgacgtttccagtgtgagaagtgagggtggtaatatccgaggttcctttagaggtcgaggaagaggccgaggacggggaagaggacgaggcagaggaaatcctcgattgaactttgattattcatatggttatcaagaacatggtgaaaggactgatcaaccatttcaaacagaacttaataccagtatgatgtattactatgatgatggtacaggtgtacaggtgtatcctgtggaagaagcgttgcttaaagagtatattaagcgtcaaattgaatattacttcagtgtagaaaatttggaacgagacttctttcttcggggaaagatggatgaacaaggtttcttgcctatttccctgattgctggttttcagcgtgttcaggctctcactacaaaccttaatctcatcttagaggcactgaaggatagcacagaagtagaaatggtggatgagaacactgagaaaaaagatagaaccagaaaaatggccaattccaggccctcctccacgcaggtggccaccaacagattctctcaatgatggatgtgtccagagtgtgtccccaggccaagctttgtgctcaccatacagtcagggtgatgatcttctgaaagctctgggatggtcatgggaccggaatatgcagtgacataggtgactcactggaaatgccttaataaatacggaacaaatcggttgcaaaattgaaagcgatcaagacggtctcctggtcaaggactgtctatccccacctctgtgtgggcgacatgtgtgggcccaaccacgtgcaggggagataacacacccttgtgcgcatactgagagacagaccagaaggattgctaactctttacataggagcggcctattctgtgtaatcggcctggctgcatgcgcggctttatccatggtgggcaaggttacttcatacatactcctgggaaataccgacaagatatgtctctggtcccagggtattgaccttggtggtccagcatgacagtaacggcgaaacagagggattgagttagcatttcccagatcctcaaagtacctgataatcagaatgtgctttaaagtgtagtggccctgtgtaacactcagattcggtcgatgtccctggcgctcccatataatgtggcttaagcgtaagcaattcaacacctgcgcgagtatctccgtcacctcacagtccttggacatactagcaggcacccctacaann

SEQ ID NO: 23461 - DNA, 1040 bp, Homo sapiens
  misc_feature 1, 2, 1038, 1039, 1040: n = A,T,C or G
nnctggccgcaaagtccagggggtgtgctggtggaaaggtggggggttgcgggtggggtttaaggcctgctttctactcgagtgggggtcctgtcgcgaggggcagggcgcgttgaggattgtcttggttttttttcctatttgtggggtattttccccctcaggctcctgggtctgctgctgcctcaaggtgtcctgaccttgaggctgatgaggggacccctgcctgtttcccccatactgagttctagggaggtgctcaccccagactcttaggaagggtctagagaaatgagaggagcccaagccaggggccagctccgagaaagggtaacctccacgcttctctctcccaaattggaaatgaagacaggttttcaaaggcacaggctccccctgccagcttctaggatcttccttggtgtgcaatgggccagttaggggtaggcagcttgcacccagttctcctttatctcaacttattttcctggggagaggtgcctagagggattgaggtaacttcaactgggaattccaaggaaggtgggcaagtagccttggctctctcccaccatgtccatcaggattgagagtgtgtctagctcccgaccactttgtcttgacctactgaaaagttgggaactgaggggtgccttcattcccctttgttcactttctccagctcaacttgggacttgggtggtgggactggagacctcacccctgctcccgtcccgccccctttctatcccaacctgtttccatgtagcagacccttcctagggagcagggaggggaagccacagattgcaaacccaggggctcctttttcattctttctaaaaccttgatatcctcagcccaaaggcgatgcccccctgccacctccaagcctggaattgtgcataacccggatcttgtatctttgtataacggatgttatttgtacgaagggcagttcgtaaacagcacttgttcttttaataaaagaatgttttgcaaaaaaaaaaaaaaaaaagggcgccgctcgcgatctannn

SEQ ID NO: 23462 - DNA, 1329 bp, Homo sapiens
acgcggggagccccaagcttaccacctgcacccggagagctgtgtcaccatgtgggtcccggttgtcttcctcaccctgtccgtgacgtggattggcgctgcgcccctcatcctgtctcggattgtgggaggctgggagtgcgagaagcattcccaaccctggcaggtgcttgtggcctctcgtggcagggcagtctgcggcggtgttctggtgcacccccagtgggtcctcacagctgcccactgcatcaggaacaaaagcgtgatcttgctgggtcggcacagcctgtttcatcctgaagacacaggccaggtatttcaggtcagccacagcttcccacacccgctctacgatatgagcctcctgaagaatcgattcctcaggccaggtgatgactccagccacgacctcatgctgctccgcctgtcagagcctgccgagctcacggatgctgtgaaggtcatggacctgcccacccaggagccagcactggggaccacctgctacgcctcaggctggggcagcattgaaccagaggagttcttgaccccaaagaaacttcagtgtgtggacctccatgttatttccaatgacgtgtgtgcgcaagttcaccctcagaaggtgaccaagttcatgctgtgtgctggacgctggacagggggcaaaagcacctgctcgggtgattctgggggcccacttgtctgtaatggtgtgcttcaaggtatcacgtcatggggcagtgaaccatgtgccctgcccgaaaggccttccctgtacaccaaggtggtgcattaccggaagtggatcaaggacaccatcgtggccaacccctgagcacccctatcaactccctattgtagtaaacttggaaccttggaaatgaccaggccaagactcaggcctgcccagttctactgacctttgtccttaggtgtgaggtccagggttgctaggaaaagaaatcagcagacactcacagcaaggatggagctgaaaacataacccactctgtcctggaggcactgggaagcctagagaaggctgtgagccaaggagggagggtcttcctttggcatgggatggggatgaagtaaggagagggactggaccccctggaagctgattcactatggggggaggtgtattgaagtcctccagacaaccctcagatttgatgatttcctagtagaactcacagaaataaagagctgttatactgtgaaaaaaaaaaacaaagagacaaaaaaaaataaggtccgatacggccaagggcatgctccccgaccccaagaacacgcacatcgtggtgagctggatgatcgcgcaga

SEQ ID NO: 23463 - DNA, 573 bp, Homo sapiens
  misc_feature 1, 2, 3, 4, 573: n = A,T,C or G
nnnncgccctttgagcgaccgcccgggcaggtacgcggggagttgcagcccggacgcgtgggcgcgcaatgcgcttcttctgcctgcagcagagaaaaggaaagaaaactccgcaggggctccgttggcttctccacgagtgacaaccatgttttcccagatagaagaccggagccctgctcctttgcgatccgccgagggctgcagagagcatcctcatccatttgggcacccctgcccaggaagagcccggccatccctttccggactggatccttaagaggtgaattttcttccgtggattccgatttgctccgtctgaccagcctaggcaatccagcatcgcgtggtaccagtgccgctgggcacactggcttcacgccggctccgcctcaccagcaagcgcattcccaggtggtcaggctcaggatggaccatgagctttcaaaaaggaaaaaggtggaaatcctcaactatgctgccatctgaataagtgtttctttgtagatgcacagagtcaaggaaaattacatccccgcattatgtaatgtaccaacaacgcacttacccacn

SEQ ID NO: 23464 - DNA, 272 bp, Homo sapiens
  misc_feature 270, 271, 272: n = A,T,C or G
acaaatacagcttcaaggggccgcacctggtgcagagcgacgggaccgtgcccttctgggcccacgcggggagtaaacatatggtgaatccaagagaataagagaattatttgctcaaagtcacacagctgaactgagactaggaacaagtctcttgattcctagtgatgctattccaagttcagatcaaattcgagtagcaccatctttaaaaagccaaagaggctcagtgtggacaaagacaaaagcggtctttgagaactggaaagnnn

SEQ ID NO: 23465 - DNA, 2361 bp, Homo sapiens; identical to SEQ ID NO: 20124
  misc_feature 1, 2, 3, 2361: n = A,T,C or G

SEQ ID NO: 23466 - DNA, 4816 bp, Homo sapiens
  misc_feature 226, 227, 228, 229, 230, 231, 232, 233, 234, 235, 236, 237,238, 239, 240, 241, 242, 243, 244, 245, 246, 247, 248, 249,250, 251, 252, 253, 254, 255, 256, 257, 258, 4807, 4808,4809, 4810, 4811, 4812, 4813, 4814, 4815, 4816: n = A,T,C or G
acgcggggaaaaaaaatactactttttagtgcaatggctgggaggaaagtatgtttaattagagcaaggaacagcaaaccaaactgcagactaaatcaggccacccacctattggtttatattttttcatggctctttcatcctaccatggcaaagttgagtaacttcgatagagaccatgtaactctcaaagccaagagtatttacgggttggaactttccagtnnnnnnnnnnnnnnnnnnnnnnnnnnnnnnnnnttgaggaggggctggatgaccaaagcattgtaacagggctggaagccaaggaagacctctatcttgaaccccaagttggccatgaccccgccggccctgctgcctcgcctgtcctggcagatggactgtccgtgtcccaggcccctgccattttgcccgtctccaagaacactgtaaagctgttggagtcccctgttccagcagcacaagtattaagtacagtgccattggctgtgtccccagggtcgtcttcgtcggggcccttagctagctctcccagtgtgtcatccctttctgagcagaaaaccagttcttcctccccattgtcctctccttctaagtctcccatcctctcatccagtgcctcaacctccaccctttccagtgcaaaacccttcatgagccttgtgaagtccctgtcgaccgaggtggagccaaaagaatccccacaccccgcaaggcacaggcacttgatgaagacattagtcaagtctctgtccacggacacttcccggcaggagtcggatacagtgtcctataagccacctgattccaaactgaacttacacctgttcaagcagttcacacagccccgaaacacaggtggagattccaaaactgcaccttcttccccactgacttctccctctgatactcgttccttttttaaagtgcccgaaatggaggctaaaattgaagatactaaacgacgcctttcagaagtcatctatgagccttttcagctccttagtaaaattataggggaagaaagtggcagccataggcccaaagccttatcttcaagtgcttcagaactctccaatctgtccagcttgaatgggcacttggaaagcaataacaactacagcatcaaggaggaggagtgtgattctgagggggatggctacggaagtgattccaacatccccagaagtgaccacccaaagtccactggtgagcccacaagagagatagaactgaaaagttcccaggggagcagtctgaaggatttaggcctgaagacaagttctctagttctggagaaatgttctttgtctgccttagtgagcaaagaagatgaagagttttgtgaactgtacactgaggacttcgatttggaaacggagggggagagtaaagttgataagctctccacgcgtccgctcaagccagaggtgctcgcggaagatggtgtggtccttgacagtgaggacgaggtggactcggccgtgcagcacccggaattgccagtgaagacgttgggcttctttataatgtgtgtctatgtgtacctcatcctccccctcccccactatgtgagtggactctttctgggaattggccttggattcatgactgcagtttgcgtgatttggttttttacaccaccaagtgctcataaatatcacaagttacacaaaaatctgcgacactggaacacaagatctctggatatcaaagaacctgaaatactgaagggatggatgaatgagatttacaactatgatccagaaacctaccatgcgactttgacacattcagtctttgttcgacttgagggtggaaccttaagactttcaaagcccaataaaaatatatccaggagggccagctacaatgaacccaagccagaggtcacctacatcagccagaaaatctatgacctctcagacagcaagatttatcttgtacctaaaactttggctcgaaagcgaatctggaataaaaagtaccccatttgtatcgagcttggtcagcaagatgactttatgtctaaagctcagactgataaggagacttcagaagagaagccgccagctgagggaagtgaggaccctaagaagccaccccgccctcaggagggaacaagatctagccagcgagatcagatactctatctctttgggagaactggccgagaaaaagaggaatggtttaggagatttattctggcatctaagctaaagtcggaaatcaagaagtcatcgggtgtctctggaggtaaaccagggcttttgcctgcacacagcagacacaacagtccgtccgggcgcctgacccacagccgcagcagcagcaaaggcagtgtggaggagatcatgtcacagccaaagcagaaggagctggcaggcagcgtgcggcagaagatgcttctcgactacagcgtgtacatgggcaggtgtgtcccccaggaaagccgaagcccccagaggagccccctgcagagtgcggagagcagccccacagctgggaagaagttgccagaggttccaccctctgaggaggaagaacaggaagcctgggtgaatgccttgcttggaagaatattttgggacttcttaggagagaaatactggtctgatctggtgtctaagaagatccaaatgaaactcagcaaaataaagctcccctactttatgaatgagctcactctgacggaacttgacatgggcgtggctgtgccaaaaatcctccaggccttcaagccttacgttgatcaccaaggactctggattgatttggaaatgtcctacaatgggtcctttctgatgactctcgagaccaaaatgaatttgaccaaactaggtaaagagcctcttgttgaagccctgaaggttggagaaattggcaaagaaggttgcaggccccgggcattctgtctggcggacagcgatgaggaatcctccagcgctggctcctccgaggaagacgatgccccagagcccagcgggggagacaaacagctcctcccaggggctgaagggtacgttggaggtcatcgaacaagtaagattatgaggtttgttgataaaattaccaagtcaaaatatttccaaaaagcaacagagacagagtttattaaaaagaagatcgaagaagtctccaacacacccctgctgctcactgttgaagtacaagaatgtagaggaaccttggcggtcaacattccaccacccccgactgaccgagtatggtatggtttccgaaagccaccacatgtggagctgaaagctcggccaaaacttggagagagagaagtgactttagttcatgtgacagactggatagagaagaaactggagcaagagtttcagaaagtttttgtcatgccaaacatggatgatgtttatatcactataatgcactcagccatggaccctcgctctacttcctgcctcctgaaagacccacctgtggaggctgctgatcagccatgatgggtgatgtcagatgttccccatattgtgacatcgagctggatgtgtggggttcttggccgccatctgtactgtagcactggcctctgtgccacagctactgtttcttaaaggactgcttctgccctctgcctgccagtgcccattccactgtgaggtgtcattccctgcatctagtgacaactgtctggattgcctgctgcaaagctttgatttggcaaaggagaccatggaagaatcatggtggatccagaagttatacgtgacccacaccatggcttttaaaagtctacccatgtttgtggcagcaaatgagcacagtaagagcaaagctgaacaacttgcctcctctactcctccaaagcttttcttcaggcagccggtgcacagtggactttttcacttctatactttgtatgcggccttccacacttccagagaatgtcagtgtgcaatgtgtctggagggtggggagaggaattctgtgagccttttcatttcggtgacagaagagatgggcagagcaacttattttccacattaaattgtgcatttgggaagcaagtagccatagtacacacacaacacgctatcagcttgggtaaggacagtgggatttatgtgaacatcaggcaaagccatgagatcaaaccatcccaagcctttcaccaatgaggtacaaccacctgggggctagctaatcttgaatgttttcctgagacaggagcgtatgtgaaaacatcaaacactgcacatgacaggatgggtcctctcatacagatgggatggggttagaaagccagagccagtttttccatctggcgtttcctgtgtcctccaggtttatatgggaatcgaaacagtttgttaatctgattgggagagttccatgggcagatttcccttcctgaaggccaaaacggagaactgctctctttaattatttcaagagtcaagaccaaaagtttgctcagcatcacactacatctcaaaattaatgttgccaacttaattttgtgcatttgtgtcagaatgtttagtttacaaggttgggggctctctttgcttcgagaagtaaacctaataccatttttttattgtttaaagctgcattcaacgtcaaaattaccttgggtaacttttgataacttacatgtgtggacaaagctaatagtggttttttaaacagcaccttgcctgaacatgactttaaagaaattaatatattgaaaacatgtttgaacccttattttaattgcaccattaaaacatttgacttaaattgtttgaccattccaaaaaaaaaaaaaaaaaaaaaaaaaaaaaaaaannnnnnnnnn

SEQ ID NO: 23467 - DNA, 1805 bp, Homo sapiens
  misc_feature 1, 2, 3, 4, 5, 6, 1804, 1805: n = A,T,C or G
nnnnnnaaaaattcggctaggacaggctggtgttaccctagggcgctggccaattggcgcgctcgtctgaatggcgtttggcgcgtagcagtgactggctgcgataatagcgaggcagcagtgcagctttcagagggtccgggctcagaggggctatgattcggagggttctgccgcacggcatgggccggggcctcttgacccggaggccaggcacgcgcagaggaggcttttctctggactgggatggaaaggtgtctgagattaagaagaagatcaagtcgatcctgcctggaaggtcctgtgatctactgcaagacaccagccacctgcctcccgagcactcggatgtggtgatcgtgggaggtggggtgcttggcttgtctgtggcctattggctgaagaagctggagagcagacgaggtgctattcgagtgctagtggtggaacgggaccacacgtattcacaggcctccactgggctctcagtaggtgggatttgtcagcagttctcattgcctgagaacatccagctctccctcttttcagccagctttctacggaacatcaatgagtacctggccgtagtcgatgctcctcccctggacctccggttcaacccctcgggctacctcttgctggcttcagaaaaggatgctgcagccatggagagcaacgtgaaagtgcagaggcaggagggagccaaagtttctctgatgtctcctgatcagcttcggaacaagtttccctggataaacacagagggagtggctttggcgtcttatgggatggaggacgaaggttggtttgacccctggtgtctgctccaggggcttcggcgaaaggtccagtccttgggagtccttttctgccagggagaggtgacacgttttgtctcttcatctcaacgcatgttgaccacagatgacaaagcggtggtcttgaaaaggatccatgaagtccatgtgaagatggaccgcagcctggagtaccagcctgtggaatgcgccattgtgatcaacgcagccggagcctggtctgcgcaaatcgcagcactggctggtgttggagaggggccgcctggcaccctgcagggcaccaagctacctgtggagccgaggaaaaggtatgtgtatgtgtggcactgcccccagggaccaggcctagagactccgcttgttgcagacaccagtggagcctattttcgccgggaaggattaggtagcaactacctaggtggtcgtagccccactgagcaggaagaaccggacccggcgaacctggaagtggaccatgatttcttccaggacaaggtgtggccccatttggccctgagggtcccagcttttgagactctgaaggttcagagcgcctgggccggctattacgactacaacacctttgaccagaatggcgtggtgggcccccacccgctagttgtcaacatgtactttgctactggcttcagtggtcacgggctccagcaggcccctggcattgggcgagctgtagcagagatggtactgaagggcaggttccagaccatcgacctgagccccttcctctttacccgcttttacttgggagagaagatccaggagaacaacatcatctgagcatgtgtgctctgcactggctccactggcttgcatcctgggtgtgtcacagccttgttgtggttcattttccgatggccaggtttccctccagaattctctaaggggatggcctttgtggaggggcggcaagggggcagtgtgcggacaacgggggagccagtttggaaaccaagggggtccaaaann

SEQ ID NO: 23468 - DNA, 3228 bp, Homo sapiens; identical to SEQ ID NO: 22886
  misc_feature 1, 2, 3216, 3217, 3218, 3219, 3220, 3221, 3222, 3223, 3224,3225, 3226, 3227, 3228: n = A,T,C or G

SEQ ID NO: 23469 - DNA, 417 bp, Homo sapiens
  misc_feature 416, 417: n = A,T,C or G
actgcactggacactgctcatccctgggtgtcaggcaggtggctgcaccctaggccaggcgcagaggcctggcaggcaggcttggcatggttggccggggcgggacgtacttcggaaatttcaattcctgctgatcttgataaaactataacagaactagccgactggctggtattaatcgaccagatgctgaagtccaacattgtcactgttggggatgtagaagagatcaataagaccgtttcccgaatgaaaattacaaaggctgacttagaacagcgccatcctcagctggattatgtttttacattggcacagaatttgaaaaataaagcttccagttcagatatgagaacagcaattacagaaaaattggaaagggtcaagaaccagtgggatggcacccagcatggcgnn

SEQ ID NO: 23470 - DNA, 3983 bp, Homo sapiens; identical to SEQ ID NO: 21101

SEQ ID NO: 23471 - DNA, 719 bp, Homo sapiens
  misc_feature 718, 719: n = A,T,C or G
tatagggagtcgaccacgcgtccgaatctctctgtgagaagctgccatctccccgccacccgctcgtccccttctctttctgccaccctcctttccttcctccctcgctccactccactccctccctcttttctcagtaccctcctctttactctccgagttaactgagagccgacctgacatctccaacattttcaccctcttcccccacccccatcaccgagaatggagtcagggtttccggagagaccgaactctgctctcagcacctttcccagccgctgttgctaaactgacctcggaggacgagaggggaaggaggtgcgacgccccttacatcagtacataactaccacaccaaccacctccacttcaaagccggattttgcatcctgggggcgggacagacctcgtcccgggctgaattctctctccactcttcgagattggcacacccagaatgaagaagatgagcaacatttatgagtccgctgccaacacactgggaatctttaacagcccctgcctgaccaaagttgagctgcgtgtggcgtgcaaaggcatttctgacagagatgcccttgggagaccagacccctgtgtcatcctcaagaggcaggctcatggccagtggtttgaggaccttagcgcagaaactggatgtgaacatcccatcttctagacaacagcaaatattcattatattctgtacaactann

SEQ ID NO: 23472 - DNA, 594 bp, Homo sapiens
tgtcatatatatatttttttgaaaaagatcaacatatcaccagtcccccatggtttttctctactgagcaatatatacagcctattatatatatatatatgtctatgtatataatatatattttcaatagataactacattcaagtaatgaaacacaggatttacaatttccctccgaaggcagaggaaaagcagattcacacacagttcacagaggaagtaccatgagagcatctcgtacagaaggaccccgaaagaccaccagtccacagagaatgtgtacttcaggccctgtaggatctcaggggcgatatagtcaggggtgccgcagaaggtgctggcccggctctccccgaatatgttctctttgcacatcccaaagtcggcaatcttgatgtggccatcccggtccaacagcacattgtccagtttgaggtccctgtaaatgatgcccttgctgtgtagaaactgcagtccacacattatctcagcggcataaaacgtggcacggtagagttcaaagcggcctttgtcctggatgtggtacgcggggtattatatctgggaaatttgctaagactaaagattttcggt

SEQ ID NO: 23473 - DNA, 1811 bp, Homo sapiens; identical to SEQ ID NO: 22429
  misc_feature 1, 2, 3, 4, 5, 55, 56, 57, 58, 59, 60, 61, 62, 63, 64, 65,66, 67, 68, 69, 70, 71, 72, 73, 74, 75, 76, 77, 78, 79,80, 81, 90, 1811: n = A,T,C or G

SEQ ID NO: 23474 - DNA, 1424 bp, Homo sapiens
ctcggggggtggctggcacaaagagcccaagattaaacgcggcgcctgggctggcgaggtctgggtcgtgtggtaactctccaggtgctcctcgctggatcccggggtcccagccccgccgccgcgccccgcccagctctgtccccgcagcctcgcgggctgccgggctttgtggttcgcccgtgccgctgggcccctgctgggggtgtcgttacgagcatgtgcagacagcagcccaagccttcaggataattccttcagcagcaccactgtaacagagtgtgacgaagatccagtctctctacatgaagaccagactgattgctccagtctcagagatgaaaacaataaagagaactaccccgacgcaggggctctggtagaagagcacgcgccgccctcttgggagccgcagcagcagaatgtagaggcgaccgtgctggtggacagcgtattgcgacccagcatgggcaacttcaagtccaggaagcccaagtccatcttcaaagcggagagcgggaggagccacggagaaagtcaggagacagagcatgtggtatccagccagtcagagtgtcaggtgagagcaggaacaccagctcatgagagtccacaaaacaatgccttcaagtgccaagaaacagtgcgacttcaaccaagaatagaccagaggactgccatttcgccaaaggatgcttttgaaactcggcaggacttaaatgaggaagaagctgctcaggtgcatggagtcaaggacccggcgccagcatcaacccagagcgtgcttgccgatgggacagattctgcagacccctcaccagtccacaaagatgggcagaatgaggccgacagtgcaccagaagacctccactctgtggggaccagcaggctgctctatcacatcactgatggtgataaccccactgctgtcgccacgatgctccatcttcaggccaaagccagagattcaacttagaccccgagtcagccccatctccacccagcactcagcagtttatgatgccgcggagttcttcacgctgcagctgtggagatggcaaggagccacagaccatcacccagctcaccaagcacatccagagcctcaagcggaaaattcggaaatttgaagaaaaatttgaacaagaaaagaaataccggccttcacatggtgacaagacttctaatcctgaagtcctgaaatggatgaatgatttggctaaaggtcgtaaacagctcaaaggtaaatcccagccaaagatcttttttcctcacaaaggaagcagttaaactagtgataatgtgctccagagcattttagattcatttccacctgtgccctcttgcaccatgttttctgcttagactgtatctcccttttgaaataacgccccctgtatctctgtcaaaaaaatgtcgcgcga

SEQ ID NO: 23475 - DNA, 1632 bp, Homo sapiens; identical to SEQ ID NO: 23228

SEQ ID NO: 23476 - DNA, 3168 bp, Homo sapiens
gtggttataaatttggtcagaaacattaaaacaatggaattttattttgatgaaaaactcaagtttacaatcatttagtaaatgaagagcaaacacttcattttcctatcccataactcttaagaaaaaaaagcattagtaaataaatatctgtgaacagattaagggtaaggcagactggataataaaccacctctgacattcacactccctgcatgtgactcactctaaagggtgaaatggctctggagataactgaactggtaagatatgggcattaaatctcatcctgatcattcagataagcccaagataaatactttttgctcatcaagggcagcaaactatacaaattgtactggaggaatactttgacagaagcacttaaattatattgtgcatcacaactataaaatggcttgaacatttccatttaaccaccatttataaagtgcaactatatattactctgcattttatctgaggtgtgatgaatatcagtccaaactgaaagtaccccagctgccaatttccaccacttctgaaaagacctagctgtgtgaaaaaggaccatcccccatacaaagaaccaatttcacaaacctactggtaaacaaatacatttacaactggaacttcaaaatgctagagttgtactcatttaaaaaaaaaccattcagctacctttggtctttaaaaaagcctacactgcaatatcctaaacattgttatgtgcatctcacaatgaagaagagtggccttgcagtgcagaatgaggagagtacaacgtcactgtgaagagtagcatgctatggtttcaaggaagatcagcatcacagcattggattctgtgcatcaggatcgaggtcactgttgccagaagggggatggatagggagaatatccagctcatccacttgtggagttggatgcatgactaccagctggtcctggggaatgtctgctgcagctgctgcaagattggtgatagatttactctttacacactgaaagtctacatgccgactctttccttcttccttctcccaggacattcgaataaagggtctttggacatagttgtagatcacttctggcgcggcctccaggccttttctttactttttctttgtaggtaggataaccttctattcccaatctaatcttcttaagacccctctccttcaaaactgacttggccacatctctgttttcaatatacttgaaaaatctatataattttgtgctataaataatttgtgaatattcttctcccatctgtggtggatattcttcatcccaatcaaccacatcatcatctgtaagcaccactatatgacattcccgttccccactctgggcactagctaccatgagagggaggatcatttcttccagataaaattcaaattgtctacgagcaccatcatttgataactcatgcattagggcactgagatctctacatttaatagtgctatattcaaaagagatacaaagatagtcacatgcttctctcagttcaggaatagatatgccatcaggacaacggattattcctgttttatagtaatccagaatcgctcgaaacacagtggaaccaattccctctgccacctcatactctcctttctcattgggtcgtgtaaagttatgttctcggccagatccaaacatcctgcccaacattgtatttggctgtgcagtaaaaatggatgggtctacaacaaatctagtgttatccactattagtgtcactcgttctgacgttcttatattccgagctccttcttttgcattttcatatacaaacaccatctccccagctgtcttacagctaccatctgaacttgactgactactgtttctgctgctgttcccagcactgctaatggaaccatttggggatgctttttgaggacgcggactgcttggacgagaggaactgtgatctttttctcgttcaacatggtgctgtcgtgttggagaagtcacatttctaatacaaggagtgagctgagactccgttctttcatgagatgaatctcgtgatctgtcacttgaccttcgtctatctcttgatctctcatgtcccccactagcaccatgtagactcattttggtgtggtcaactcctcctttagcaatacgcgaggaagtacttgaatgtttataaagtttacgaggtctactatgcaatttccgatcccaattctctggatcactggagttaccatcatagggatgaggccgtcctgccatcccactccaagcttcctcacactactgctctgaaagcacacatgtagcacccataactctcgaacctgtagtcccccttcagtgcccacacaagattggggcaaaggccggggccagtgacacctccacttcctcctcagccagatccctccccccgcgtacagctatctgaggcagcccttcagaagaaaacctgtggtgccgagtgcagtcaattgatggcctcagctgcagcatctctgggacctgcctcaagatgagagctaaaaacgtggctcccagtcagtgcctgagcgtggcaggggtcctagggcctggccatttctatgcaatgtgagactcctccaactgtccatctgtccttgggagctcctgttgggctagctgcaactctcagggctgctcatcacccgaggctggctcttcttttcctccatcctctcacactgccagagttacaccatgggctgaaggctttctgtgtcttactttgctctctcccctgtgtttttcagagaggttggccctatcaaatctctgctacttctaactgtaccgtggctcctgattccaggatgacctgaagtgacacactactctccttgagcctcagtttctagatgagtaaaacgaggtttcaggagttcattgctaatacagaactgggaaatgataaatggtttctctgttattggtagtagcaagagcatcagtgtcacaaggtcattatggtcatggaagacattggtgtaagtgtgtgtgtcagagacacctgttgcttatggaatatccaagtgaccacccatgcctccagcccaggtggagccatgtgacaaattctggccaatatgctatgagcagaagtgatacattttcaattcagtctaaaaaaaaaaaaaaaaaagt

SEQ ID NO: 23477 - DNA, 3017 bp, Homo sapiens
  misc_feature 1, 2, 3, 4, 5: n = A,T,C or G
nnnnnacctcgcgggttccgacgtaggccctttgtgccagccagggatcctccaaggcgataaccactggctgccaagtatttcccaatcaaacttagagtttataaggagcaatctctcagtacggaaatacaaatgtataatcctaacgcaggaccccgaccgaaccagggaaaaggaatacatgtcccacagcagttaatagtttggacctgacaggttctacaaatagtaatttccactacatataaaggcatctgttacatgtggtaaaacttccagagaccaagtaggaagtgtggaataaaaacaataaatccaaacgcagccccaggctgggcctgttttccatgaagcccaaggcagtgatcttcatcattaaggagggaccactgtgtccacaactaaaaccttcaaccacatggtgatctgcaaagcttcattgaaaaagacaaacgttctcttcttcacacaaatcactgcagaaatctttgtaaggctgtaccttgcatagggaaatagctgtgttccgtcaaattctacagaaaagagtggaagcaagctttttaaaatgatgcccatgtgcaaagagataaattaccaggcacctgatttaccaccccaatttatcttgatcatataatcttttaacaaaaagaaaaatggcaatatctggtgacagtattaaaaagacaatgttgagattggcatcagaaaaactccaaaagtgcaccttataaaaaggacacctcactgtagaaacatctatgcacttagtaagccctactcatgcacaaacaagcagttgctgggaacttgtcgaagtttactttttcagaaagttgaagtatataaaaaaagtacaagttgtgacattcgttcaagttgctgctacatgggtattctgagctggctaccaggaaggactcctgcgtttccgagagccaggtcagcgtctctaggagccgtggtgcaggtgcatggtgcccagcacggcactgtcgtaccgctcctgcaccttcacggacttggaatgctcgaccacactgttcagttctgggatgctttcagcagtgtccccaaacccgtggtagtgtccatagtacaggttatccccaatgtcttccacccaggaaggcctactggctatgcagctacttggactcccgttcaggtgcagagaaccgcacaactcagggttagctctcagggtcttctctggctcctcagtcccactaatgcagagagaaccctggctactcggaaacggctgtcctggggctaatccactgctaattccgttagttcctgtcaagcactggccattcctgctttccatcccactgagcggggtcgtggaggggaagtccaaatgtccattgatgacacatccatttgtcaatgtattcgatacggagctactgtttttcatatctgttacaacagcaaactccctatcaacgtgcattttgtcagcatcgtcttctgtgtcgccattcgtgagtggcacggcagaatccaagctttgagcttcagttctagctttctttactccaaagtcttctgagtcttccaagcatctctttcgatttgttcccacactaatatgattaggaaatacattctgatgacccccatttaagatgccattgttatagaaatggttcagatgacaattctggaggttcaagagaaactgggcacactcttggaaaccctgggtttgtgcaatgtctgctgctgtcaggccactggcatttctcaggctgtacaacacaaaaacactgaattacaccccatccgcgtgctaacctggtctctgctcctgctgaactgactagctatctgaaggtggtatgaaagagtaaacaaattcatagcaaatcttcattaaagaagtagttaatcaatctagctctgtaactaacttctcttatatacatttgatttctaagcaagatttgggagataaactaaatatgctaaacttctaaaaaaggcatcttcctatttaacttctcaaaatcatgttttatgttagtctgaagaatctaaatttacgctaacttcagacttgaaactgaattctatattatatgcacttaattttaatacccattcctttagcgtgaataaaatcataacaaacaacatgtactgagattgtccatggcattcataactgtcttcctaaaaacaaagcaatggctcaccaacgagccagccttcatgcttacatgtgacactgtaagtggaagtttagaaggatgtcctgacattaaaaagtagcctatcatcagattccagagctgaacagctgtgtttttctgtcagattttgattgttttggccttgcttgggaaaacctgcaggagtattgtatttttggcattgtagagcatttgagtagttggttcctttaaaaaggctttgaatactgtcctaaaaactcatccctaccactcacaagaaccaaagttttacctggctaatagtactaaaaaggaaaggtctgagacctctacagtagctaaaactcagattcaagtaggaagtgatggcagagtaagtgaaagagctgaataaaatagagtaagttgaacttgtaaacctttagacactgaattaaaactgagggatcaaaagtaactccatgttgaagttcccctggaagacaagaatgtacactgctctgtgaaataaacctgtaaaaaagcagacatcctgttagctgcaggttgataaacaaacgggagaagtacttaacagcaaagacagcttccatacctgttcagcaagctacactacatccacagcaaaagcatgatgaaatcaaggccttgtgctgtgtcactcaaacaaccactccagaaccctgatgcctttcttggggttactgttaatgcaaaaaaaaaaaaaaaaaaaaaagtcaccgcatttgagagtgaaaactacagaattagggacaaataatattttcttatttataaggactgaccggacgcgtgggtcgactc

SEQ ID NO: 23478 - DNA, 2050 bp, Homo sapiens
  misc_feature 1883, 1884, 1885, 1886, 1887, 1888, 1889, 1902, 1903, 1904,1905, 1906, 1907, 1908, 1909, 1910, 1911, 1912, 1913, 1914,1915, 1916, 1917, 1918, 1919, 1920, 1921, 1922, 1923, 1924,1926, 2041, 2042, 2043, 2044, 2045, 2046, 2047, 2048: n = A,T,C or G
  misc_feature 2049, 2050: n = A,T,C or G
ccacgcgtccggaacgggggaagtcgccggaagttcggtgggctccaggcgtcgcgatggaggagagcgggtacgagtcggtgctctgtgtcaagcctgacgtccacgtctaccgcatccctccgcgggctaccaaccgtggctacagggctgcggagtggcagctggaccagccatcatggagtggccggctgaggatcactgcaaagggacagatggcctacatcaagctggaggacaggacgtcaggggagctctttgctcaggccccggtggatcagtttcctggcacagctgtggagagtgtgacggattccagcaggtacttcgtgatccgcatcgaagatggaaatgggcgacgggcgtttattggaattggcttcggggaccgaggtgatgcctttgacttcaatgttgcattgcaggaccatttcaagtgggtgaaacagcagtgtgaatttgcaaaacaagcccagaacccagaccaaggccctaaactggacctgggcttcaaggagggccagaccatcaagctcaacatcgcaaacatgaagaagaaggaaggagcagctgggaatccccgagtccggcctgccagcacaggagggctgagcctgcttccccctcccccaggggggaaaacctccaccctgatccctccccctggggagcagttggctgtggggggatccctcgtccagccagcagttgctcccagttcaggaggtgctcctgtaccctggccacagcccaatcctgccactgctgacatctggggagactttaccaaatctacaggatcaacttccagccagacccagccaggcacaggctgggtccagttctgacctgagcacggtttttcctcatgtgacttctgggaaggcgctccctcatctgggccaaaggaaggaggacgaagccctcctcagctggcctgtgtttggggcatgaatctctcctctcctccttgtctggctctgttgacaaaccgggcatgtttggcagtaaattggcaccgtgtcacatgatcacagttcagcgggaggctttccgtacccacactggctgtagccacttcagtccatctgccctccagaggaggggtttcttcctgatttttagcaggtttagaggctgcagcttgagctacaatcaggagggaaattggaaggattagcagcttttaaaaatgtttaaatattttgctttgctaatgtgctgatccgcactaactcatctttgcaaaaggaactgctccctcggcgtgccccagctggggcctctgaagggattcctcactgtgggcagctgccctgagcttcaggcagcagtgttcatctctggccagttgtctggtttccatgtattctaggccaggtaggcaacacagagccaaggcgggtgctggaagccagacggaacagtgttggggcaggaaggtggatgctgttgtcatggagctgtgggagttggcactctgtctgctggtggccctctcggctcacatgttcacagtgcagctcctggcagacttgggttttctctttggtggtttctaaagtgccttatctgcaaacaacttcttttctccttcaggaactgtgaatggctagaagaaggagctcagtaaactagaagtccagggttgcttggtttactggtttataagaaatctgaaagcacctctgacattccttttattaactcacctctcagttgaaagatttcttctttgaaaggtcaagaccgtgaactgaaaaaagtgttggcctttttgcgggaccagatttttaagataaaataaatatttttacttctgtcaaaaaaaaaaaaaaaaaaaaaaaaaaaaaaaaaaaaaaaaaaaaaaaaaaaaaaccccnnnnnnncataaactagtannnnnnnnnnnnnnnnnnnnnnntncgggggggccttttacttattttaaaaaaaaaacctcccccccccccccctgaccccgaaaaaaaaagggagggcacgggggggtgggacctcgttttttgcaccttaaaaaggnnnnnnnnnn

SEQ ID NO: 23479 - DNA, 2408 bp, Homo sapiens
  misc_feature 1, 2404, 2405, 2406, 2407, 2408: n = A,T,C or G
natggtcactctccaccgaatgggtcctaatctgcagctgattgagggagatgcaaagcagctggctggaatgatcacctttacctgcaacctggctgagaatgtgtccagcaaagttcgtcagcttgacctggccaagaaccgcctctatcaggccattcagagagctgatgacatcttggacctgaagttctgcatggatggagttcagactgctttgaggagtgaagattatgagcaggctgcagcacatattcatcgctacttgtgcctggacaagtcggtcattgagctcagccgacagggcaaagaggggagcatgattgatgccaacctgaaattgctgcaggaagctgagcaacgtctcaaagccattgtggcagagaagtttgccattgccaccaaggaaggtgatctgccccaggtggagcgcttcttcaagatcttcccactgctgggtttgcatgaggagggattaagaaagttctcggagtacctttgcaagcaggtggccagtaaagctgaggagaatctgctcatggtgctggggacagacatgagtgatcggagagctgcagtcatctttgcagatacacttactcttctgtttgaagggattgcccgcattgtggagacccaccagccaatagtggagacctattatgggccagggagactctataccctgatcaaatatctgcaggtggaatgtgacagacaggtggagaaggtggtagacaagttcatcaagcaaagggactaccaccagcagttccggcatgttcagaacaacctgatgagaaattctacaacagaaaaaatcgaaccaagagaactggaccccatcctgactgaggtcaccctgatgaatgcccgcagtgagctatacttacgcttcctcaagaagaggattagctctgattttgaggtgggagactccatggcctcagaggaagtaaagcaagagcaccagaagtgtctggacaaactcctcaataactgccttttgagctgtaccatgcaggagctaattggcttatatgttaccatggaggagtacttcatgagggagactgtcaataaggctgtggctctggacacctatgagaagggccagctgacatccagcatggtggatgatgtcttctacattgttaagaagtgcattgggcgggctctgtccagctccagcattgactgtctctgtgccatgatcaacctcgccaccacagagctggagtctgacttcagggatgttctgtgtaataagctgcggatgggctttcctgccaccaccttccaggacatccagcgcggggtgacaagtgccgtgaacatcatgcacagcagcctccagcaaggcaaatttgacacaaaaggcatcgagagtactgacgaggcgaagatgtccttcctggtgactctgaacaacgtggaagtctgcagtgaaaacatctccactctgaagaagacactggagagtgactgcaccaagctcttcagccagggcattggaggggagcaggcccaggccaagtttgacagctgcctttctgacttggccgccgtgtccaacaaattccgagacctcttgcaggaagggctgacggagctcaacagcacagccatcaagccacaggtgcagccttggatcaacagctttttctccgtctcccacaacatcgaggaggaagaattcaatgactatgaggccaacgacccttgggtacaacagttcatccttaacctggagcagcaaatggcagagttcaaggccagcctgtccccggtcatctacgacagcctaaccggcctcatgactagccttgttgccgtcgagttggagaaagtggtgctgaaatccacctttaaccggctgggtggtctgcagtttgacaaggagctgaggtcgctcattgcctaccttaccacggtgaccacctggaccatccgagacaagtttgcccggctctcccagatggccaccatcctcaatctggagcgggtgaccgagatcctcgattactggggacccaattccggcccattgacgtggcgcctcacccctgctgaagtgcgccaggtgctggccctgcggatagacttccgcagtgaagatatcaagaggctgcgcctgtagctgcctggatgagcacacctggctcatcacacttgcaggcctgttccctaaggggggccacagacaaggagcagtacgaaagcagttaggacaacgggggaaaacgtgacagcccagaacgagtacagggcgggcgccacaacacacaagccggcgccacacacgggcacgtgcctcacagcggcagacccactggcgacacacccacacagacaacagcacacataacgagaacaagcgggacacgactcgcgcaccacgcannnnn

SEQ ID NO: 23480 - DNA, 2005 bp, Homo sapiens
ggagtcgacccacgcgtccggacggctttggaatccaccagctacatccagctccctgaggcagagttgagaatggagagaatgttacctctcctggctctggggctcttggcggctgggttctgccctgctgtcctctgccaccctaacagcccacttgacgaggagaatctgacccaggagaaccaagaccgagggacacacgtggacctcggattagcctccgccaacgtggacttcgctttcagcctgtacaagcagttagtcctgaaggcccctgataagaatgtcatcttctccccactgagcatctccaccgccttggccttcccgtctctgggggcccataataccaccctgacagagattctcaaaggcctcaagttcaacctcacggagacttctgaggcagaaattcaccagagcttccagcacctcctgcgcaccctcaatcagtccagcgatgagctgcagctgagtatgggaaatgccatgtttgtcaaagagcaactcagtctgctggacaggttcacggaggatgccaagaggctgtatggctccgaggcctttgccactgactttcaggactcagctgcagctaagaagctcatcaacgactacgtgaagaatggaactagggggaaaatcacagatctgatcaaggaccttgactcgcagacaatgatggtcctggtgaattacatcttctttaaagccaaatgggagatgccctttgacccccaagatactcatcagtcaaggttctacttgagcaagaaaaagtgggtaatggtgcccatgatgagtttgcatcacctgactataccttacttccgggacgaggagctgtcctgcaccgtggtggagctgaagtacacaggcaatgccagcgcactcttcatcctccctgatcaagacaagatggaggaagtggaagccatgctgctcccagagaccctgaagcggtggagagactctctggagttcagagagataggtgagctctacctgccaaagttttccatctcgagggactataacctgaacgacatacttctccagctgggcattgaggaagccttcaccagcaaggctgacctgtcagggatcacaggggccaggaacctagcagtctcccaggtggtccataaggctgtgcttgatgtatttgaggagggcacagaagcatctgctgccacagcagtcaaaatcaccctcctttctgcattagtggagacaaggaccattgtgcgtttcaacaggcccttcctgatgatcattgtccctacagacacccagaacatcttcttcatgagcaaagtcaccaatcccaagcaagcctagagcttgccatcaagcagtggggctctcagtaaggaacttggaatgcaagctggatgcctgggtctctgggcacagcctggcccctgtgcaccgagtggccatggcatgtgtggccctgtctgcttatccttggaaggtgacagcgattccctgtgtagctctcacatgcacaggggcccatggactcttcagtctggagggtcctgggcctcctgacagcaataaataatttcgttggacacgtaaaaaaaaaaaaaaaaaggatttgccggcctgctgcgcattgcagttcgcggcgtgcggaggaaagagacgacgcgctccaagcaagcaggaacccgcccatgagtgctgcgacggagtgacacaacacgcgcccgtggcagcgtgtgcattgcgagagagcctgggtctgtcgagcgcacagtctgagcaactgcacagagcgacagcggtatgctcgcgggcgttctcgcgagtgacgacgaactgaagactggcaccgtgagacaccgagaggcgcaatgccgaagtctgagaacgcccaggaagtgagagccgagactgcgaaagctcggtagcgcggtgccagcgcgcggcctccccctaaaacgcctgcgcccttacatcaccacgcgcgaacaccgtccggctccggcgc

SEQ ID NO: 23481 - DNA, 410 bp, Homo sapiens
  misc_feature 160: n = A,T,C or G
acatgggactacaggcacgcgcctgtaatcccagctactcaagaggctgaggcacgagaatcacttgaacccaggagacggaagttgcagtgagctgagatcacaccactgcactccagcctggtgacagagcaagactccggctcttaaaaaaaaaaantataattaaatggagggagagagaataaacagaaaagaatgtggctgggaattgtgaatcagaagattataccccccaatttttttcaatccccttttctcaaataataaattagttaaatcagtttctgagttatgccactggctgatgaagagttgagaggtctctttgcagaatgatctttttgtttcgttttgtttcttcttctgcatttaaaaattaaaagattggtttgaggatgtgatgaaat

SEQ ID NO: 23482 - DNA, 1254 bp, Homo sapiens
  misc_feature 1, 2, 1254: n = A,T,C or G
nnacatcacacacggcttctcacacacgttattttacacgatcacacacatggcttctctcacacacgttattttacatgatcacacacatggcttctctctcacagacgttattacacataattacatatggcttctctctctcatacacacatgctattacacatgatcacacacatggccgtgagtaataaagccttattacatagagtttgtcaaaatgtaaataaattgatatcttttcataaactttttataaatatagacattctattttttactacaagttttccacacacacagctcaggagtgaaataactagatttaaaatggtggcaggtcacacccttcttcaaatcattagctgtgtcagatggccctgatatttctcctcgtggtacttaacacattttacaatgagataattctgggtttattccatatcctgtgtttgtctttgatttcctcaagagcggagaacaggtctgttttgttcattatggtatccccagcaagtatcatgatacctggcacctagtagatcctcaataaacatttgctaaaggaattactgagtgaataaaccatacacactgcattttgtgctgcctgtctgctcagatctatttcctttggtgctctttatcttatggggctacatttccagggttcccttgttttctggcttctaggtagatttggctaatgggagacactggtaggaagactaggggagagagagaaggaaagaagccaggatatttccctagatttctttcttctccctgaggtattactgccagtgtctatgtctccaaggtgggtgcagcaactttggcttctgggtccaagtacaccagctttcccatcacccctgcaaccataggagtggtcttggcttcctagttatgttcctatcagggttgcctcactatcttctgggcttctctgctctttcgtcaccagtggaattctttatattaaatttcctctgttttaaagacttcgagtgggttatattttccttgctggaccgagttcaaatgaaaagtctgagttgtagggaaaacatcttttttattattattatttttatttatttatttagagacaggttcttgttctgttgcctgggctagagtgcagtggtgcaatcctaattcactgtggcctcaaattcctgggctcaagtgatcctcctgccccacccttgagttgataggactacaggcacacaccaccatacctggatn

SEQ ID NO: 23483 - DNA, 719 bp, Homo sapiens
ggcggccgcccgggcaggtaccaggtgaacaaagtttaccagaaagcagttgagacaagaaaataagagctcaggatgagggaaaagaaaaagattgagagaatttgtgcccccaaccatttcctcagactctaagaaagaacacgctctctccaggcaggtctgaagctcaactctcttattgcctcacttcaggtatacctcactttacacaatagaattataactggaaagaagttggggacacatgtatttggtgattacattttaaacacattaggaaaagttgctatttgaactttttattgatttttggggggagtaaagaattattttgtgatgcaaataaatatcctttaattgatcgacttgccaaatttagatttgtgtgcatcaggctttcctttttttctttttttagagaagttcaatataagcttttcttttctttgtttctttctttctttattttgagatggagtcttgctctgtcgcccatgctggagtgcagtggcgcgatctcggctcactgcaacctccacctcctgggttcaagcgattctcttgcctcaacctcccaagcagttgggactacaggcgtgagccaccatgcccggctaatttttgtatttttagtagagacagggtttcaccatgttagccaggctggtctcaaactcctgacctcaggcaatctgcccgcctgggtctcctaaagt

SEQ ID NO: 23484 - DNA, 350 bp, Homo sapiens
acctcaaagccggaaaggtcagccccccgctgcaagttcttagattcctggaggatctgcagagtcaacattaggagtatccatccattcaccaaggccatcaggaatgtgctgaatgtgctgtaaagaagagttgtcaattgtgcacagaagataagaaatatatgatgaatagataattgaaaagagatcctccagaaagagcagaaggaagtttcttcaatgttctggcactaagatatggtgaacagacagatggaggccacaacattcaagctttattaaacttgccacagataccagtaacagcaattcaaagatgtgaatgggattaattcagggctgttgct

SEQ ID NO: 23485 - DNA, 695 bp, Homo sapiens
  misc_feature 691, 692, 693, 694, 695: n = A,T,C or G
acacaagtatatgagttttgtttaaagcactactgaagccaagataaactctggcttagcatgcccctgacggatcagtctagtaatcttatcagaaccaagattacctaaaacattaaccaaaggaaaagctccctcaccccaacctatgactgctcacatttttcagattgaatcatttcaattgtattttaaggttcattgactcttttccacctccaagctgctcctgaacacaactgattattattttttaattttgaaaacgttctcacttctagaatttccacttaagcctttgttattattgtagtttcttcttctctgctgtgatttcctatccatttattttaagggtttttggggttttgattttagtaagaattacaataactactttaaaaatccacactaattccaacatctgggtcatctcgaggtcagtctctattgattgcctttttctttgaatatgtttctttatatgtttattataatgggattgaattctgaagattgtaaaactagattttgttctgttcctctgaaaattttgataattttttgttgtatttgttgtattgtgcttgattttttttctattgtatactttacaatatattttcctccaatggttttaacatatctatttctcaaaatatttatgtttatgttaaaaattatacaaagnnnnn

SEQ ID NO: 23486 - DNA, 1393 bp, Homo sapiens
gagtcgacccacgcgtccggacgtgagccacgaagaccctgaggtcaagttcaactggtacgtggacggcgtggaggtgcataatgccaagacaaagccgcgggaggagcagtacaacagcacgtaccgtgtggtcagcgtcctcaccgtcctgcaccaggactggctgaatggcaaggagtacaagtgcaaggtctccaacaaagccctcccagcccccatcgagaaaaccatctccaaagccaaagggcagccccgagaaccacaggtgtacaccctgcccccatcccgggaggagatgaccaagaaccaggtcagcctgacctgcctggtcaaaggcttctatcccagcgacatcgccgtggagtgggagagcaatgggcagccggagaacaactacaagaccacgcctcccgtgctggactccgacggctccttcttcctctatagcaagctcaccgtggacaagagcaggtggcagcaggggaacgtcttctcatgctccgtgatgcatgaggctctgcacaaccactacacgcagaagagcctctccctgtcccagggcagtggtgggtgctttatttccatgctgggtgcctgggaagtatgtagacggggtacgtgccaagcatcctcgtgcgaccgcgagagcccggggagcgggggcttgccggccgtcgcactcatttacccggagacagggagaggctcttctgcgtgtagtggttgtgcagaccctcatgcatcacggagcatgagaagacgttcccctgctgccacctgctcttgtccacggtgagcttgctgtagaggaagaaggagccgtcggagtccagcacgggaggcgtggtcttgtagttgttctccggctgcccattgctctcccagcccccatcgagaaaaccatctccaaagccaaagggcagccccgagaaccacaggtgtgcaccctgcccccatcccgggaggagatgaccaagaaccaggtcagcctgacctgcctggtcaaaggcttctatcccagcgacatcgccgtggagtgggagagcaatgggcagccggagaacaactacaagaccacgcctcccgtgctggactccgacggctccttcttcctctatagcaagctcaccgtggacaagagcaggtggcagcaggggaacgtcttctcatgctccgtgatgcatgaggctctgcacaaccactacacgcagaagagcctctccctgtccccgggtaaatgagtgcgacggccggcaagcccccgctccccgggctctcgcggtcgcacgaggatgcttggcacgtaccccgtctacatacttcccaggcacccagcatggaaataaagcacccaccactgccctgggaaaaaaaaaaaaaaacaaaaaaa

SEQ ID NO: 23487 - DNA, 2522 bp, Homo sapiens; identical to SEQ ID NO: 21114
  misc_feature 1, 2: n = A,T,C or G

SEQ ID NO: 23488 - DNA, 447 bp, Homo sapiens; identical to SEQ ID NO: 21139

SEQ ID NO: 23489 - DNA, 1643 bp, Homo sapiens; identical to SEQ ID NO: 21150
  misc_feature 1, 2, 3, 4, 1615, 1616, 1617, 1618, 1619, 1620, 1621, 1622,1623, 1624, 1625, 1626, 1627, 1628, 1629, 1630, 1631, 1632,1633, 1634, 1635, 1636, 1637, 1638, 1639, 1640, 1641, 1642,1643: n = A,T,C or G

SEQ ID NO: 23490 - DNA, 623 bp, Homo sapiens
  misc_feature 1, 2, 3, 4, 5, 6, 7, 8, 9, 10, 11, 12, 13, 14, 458, 459,460, 461, 462, 463, 464, 465, 466, 467, 468, 469, 470, 471,472, 473, 474, 475, 476, 477, 478, 479, 480: n = A,T,C or G
nnnnnnnnnnnnnngtgaaaaaacccccccaatgtacctgggaccccaccctctaaggggaaaagcagagagaggggggagtgacagactgggggctcctcgggaaacacacaagcggcaaacctcactgaaaggcctggagcccacaaccttcggctccgggcaaatggctgagatggaggtttccttttggaacatttctttcttgctggctctgagaatcacggtggtaaagaaagtgtgggtttggttagaggaaggctgaactcttcagaacacacagactttctgtgacgcagacagaggggatggggatagaggaaagggatggtaagttgagatgttgtgtggcaatgggatttgggctaccctaaagggagaaggaagggcagagaatggctgggtcagggccagactggaagacacttcagatctgaggttggatttgctcattgctnnnnnnnnnnnnnnnnnnnnnnnggcacaaataaaatgagtttattttatattaaagttatcaaaaaacacacctgtaaaattacccacatactaggcttagagatagccttttacaaacagattattaaaaatctgcaaacttattttctcttaactattaaagt

SEQ ID NO: 23491 - DNA, 435 bp, Homo sapiens
  misc_feature 263, 264, 265, 266, 267, 268, 269, 270, 271, 272, 273, 274,275, 276, 277, 278, 279, 280, 281, 282, 283, 284, 285, 286,287, 288, 289, 290, 291, 292, 293, 294, 434, 435: n = A,T,C or G
acacgggggtgagcggaggagggtgctgcttatgcgagagcaggttttgggagctcactaaagcaggtccctgattctggtcttgaatagcggaggaggaaaagaagatgatgggggaaaagaaaagaagccatttatgcatccctccctaattcagtatccgagcatgagggagtgtcaagctagtggggaagaagagagggtttagttttgaatgaagttgggagtttttattattgcactgaactaaataggcattttannnnnnnnnnnnnnnnnnnnnnnnnnnnnnnngtccctgcccgggcggccgctcgaagctcgatggtatacaggcattcagagctcttggggtaagggtttgggaagtcagggctggtgatcaccccagtcctttgagtgaagaggttgtcactgcactccacttggcaggnn

SEQ ID NO: 23492 - DNA, 1866 bp, Homo sapiens
acagtcatggatgggcacactgtgggggtgtcctggtgcacccccagtgggtcctcacagctgcccactgcatcaggaacaaaagcgtgatcttgctgggtcggcatagcctgtttcatcctgaagacacaggccaggtatttcaggtcagccacagcttcccacacccgctctacgatatgagcctcctgaagaatcgattcctcaggccaggtgatgactccagccacgacctcatgctgctccgcctgtcagagcttgccgagctcacggatgctgtgaaggtcatggacctgcccacccaggagccagcactggggaccacctgctacgcctcaggctggggcagcattgaaccagaggagttcttgaccccaaagaaacttcagtgtgtggacctccatgttatttccaatgacgtgtgtgcgcaagttcaccctcagaaggtgaccaagttcatgctgtgtgctgggcgctggacagggggcaaaagcacctgctcgggtgattctgggggcccacttgtctgtaatggtgtgcttcaaggtatcacgtcatggggcagcgaaccatgtgccctgcccgaaaggccttccctgtacaccaaggtggtgcattaccggaagtggatcaaggacaccatcgtggccaacccctgagcacccctatcaactccctattgtagtaaacttggaaccttggaaatgaccaggccaagactcaagcctccccagttctactgacctttgtccttaggtgtgaggtccagggttgctaggaaaagaaatcagcagacacaggtgtagaccagagtgtttcttaaatggtgtaattttgtcctctctgtgtcctggggaatactggccatgcctggagacatatcactcaatttctctgaggacacagataggatggggtgtctgtgttatttgtgggatacagagatgaaagaggggtgggatccacactgagagagtggagagtgacatgtgctggacactgtccatgtagcactgagcagaagctggaggcacaacgcaccagacactcacagcaaggatggagctgaaaacataacccactctgtcctggaggcactgggaagcctagagaaggctgtgagccaaggagggagggtcttcctttggcatgggatggggatgaagtaaggagagggactggaccccctggaagctgattcactatggggggaggtgtattgaagtcctccagacaaccctcagatttgatgatttcttttcctagcaaccctggacctcacacctaaggacaaaggtcagtagaactggggaggcttgagtcttggcctggtcatttccaaggttccaagtttactacaatagggagttgataggggtgctcaggggttggccacgatggtgtccttgatccacttccggtaatgcaccaccttggtgtacagggaaggcctttcgggcagggcacatggttcactgccccatgacgtgataccttgaagcacaccattacagacaagtgggcccccagaatcacccgagcaggtgcttttgccccctgtccagcgtccagcacacagcatgaacttggtcaccttctgagggtgaacttgcgcacacacgtcattggaagtaacatggaggtccacacactgaagtttctttggggtcaagaactcctctggttcaatgctgccccagcctgaggcgtagcaggtggtccccagtgctggctcctgggtgggcaggtccatgaccttcacagcatccgtgagctcggcaggctctgacaggcggagcagcatgaggtcgtggctggagtcatcacctggtctgaggaatcgattcttcaggaggctccccgcgt

SEQ ID NO: 23493 - DNA, 1632 bp, Homo sapiens; identical to SEQ ID NO: 22203
  misc_feature 1, 2, 3, 4, 5, 6, 1620, 1621, 1622, 1623, 1624, 1625, 1626,1627, 1628, 1629, 1630, 1631, 1632: n = A,T,C or G

SEQ ID NO: 23494 - DNA, 1109 bp, Homo sapiens; identical to SEQ ID NO: 23210
  misc_feature 1, 2, 1108, 1109: n = A,T,C or G

SEQ ID NO: 23495 - DNA, 1037 bp, Homo sapiens; identical to SEQ ID NO: 22323

SEQ ID NO: 23496 - DNA, 1234 bp, Homo sapiens
  misc_feature 180: n = A,T,C or G
attatgtggtagctcccctcatataagcaccccagactacaactttttatctcggtggtatgttggtggaaattggaacggaaaaacaattttcccacgaggaaacatttatacatgattcgttttttaatcgccctccttataagatttggcctagagccaaagatttcggcataaggncactgaggcgaacaatggcggagctgggcgaagccgatgaagcggagttgcagcgcctggtggccgccgagcagcagaaggcgcagtttactgcacaggtgcatcacttcatggagttatgttgggataaatgtgtggagaagccagggaatcgcctagactctcgcactgaaaattgtctctccagctgtgtagaccgcttcattgacaccactcttgccatcaccagtcggtttgcccagattgtacagaaaggagggcagtaggccatcccccaggagaatgacagaagcaaaggacttgttactaagcagatttaagggtcagtgggggaaggctatcaacccattgtcagatcagcatcaggctgttatcaagtctgttggtgctaaaaagtaaaagatgaaatgttcaaaaaaaaaaaaaaaaaattcggagacatagtctctctcggtcgcgccggttcgggagaggaagccgccgccattgtttggcggcttcttgcaaggggattgggcgggcgggaattggccccaggttcccgtgattcaaggagggaatataggcaagaccataagagcattgtgagccaaattaacttgagaggcgcccggaagatcctttcgggatacaaggggacttggttcaccgggaagaactgttggacgtttgaaccccggaagcagaaggggcaaagggttgccggggggggccaataaggcggaaaatcgggccagggaaaaccttgcacactctcttatgtgcggaccactattcacaagaatttgttcggggcaagcgtctaggaggcgcttcgcgaccgtgtagtccggagagaacaaggttccggcccgaactggtgcctttgggaggcaatccggggggggcaaggcgcactgttgcgcagcgaaagaaccttgttattggttacagcgaagcagaggacccgcccacaaaagagtttctttgcgcctgtgccccaaagagaaaaacgcgggggcggttcttcacaaccaacaacacactccggggttttatggggggcgagaaccga

SEQ ID NO: 23497 - DNA, 1044 bp, Homo sapiens
  misc_feature 1, 2, 3, 4, 5, 6, 7, 8, 9, 10, 11, 12, 13, 14, 15, 16, 28,1044: n = A,T,C or G
nnnnnnnnnnnnnnnnagtgagccgaancacacaagtgtgctagaggcccctgggaagctgccacaccccctctgtcaacctgccccgaaggaaaggtcccgtggaaccgacggcccggtcctaaacccggaaagtcccgcggccccccaaccggccagagggaaagaccgcgtgaacgctctgcccaataagggaacaccacggcggcctcgaggccaccacgacgttgctaatcttcccggcccagagcagcattttggcctctgttccaacctcccgttcactgggcatctgctcaggggacccaaggtttatggagttgtcagcagcacccaccgccactccattgatagaagaaccacaatctgcaaggactcccaagcaggctgagcgcccacaatcccaaagtcgtgctgtcccatctcgagaagcagacaccacattcctcccccgatcaacgatggctgtatccaggatacctcctttgtgacctttgaaggtcaccacgcagctagcatcttcagctgaccatatcttcagctgggcatccattcccccactcaggaccacaaggcctgatgggaaaaacctgcaacaattcacatcaaacacatgtccttccaatactctcctgagttctccattggaagcctgccagattttcatggtcccgtcagtactagaagacacaccaagacctcctctgctggaaatgtccaggcatgttatactctttgtatgaattctggaaaaagtagtatatggtgccaaaaacttagaagatgcattttcctttggacatgaaatatgaatgcttttcttgtttatttcattcacagtaaatccttctgaagctgtaacctctgggatgccatctaggccaattccttgacaagtcaggctgccatacaaagatggtttccctgggggatgacagctcagccaggcctccccttcatccttcctgagggcttgcgcccagtcgctctgaatcctcaaaggcgccgccatctcgaccccgccgcccgcgtcggcgggggtcn

SEQ ID NO: 23498 - DNA, 906 bp, Homo sapiens
  misc_feature 1, 2, 903, 904, 905, 906: n = A,T,C or G
nnacgggcgaattggtgctccccgcggtggcggccgaggtacgcgggggcgctatggcgacacccagcctgcggggtcgtctggcgcggtttgggaacccgcggaagcctgtgctgaagcccaataaacctctcattctagctaaccgcgtcggggagcggcgccgggagaagggcgaggcgacttgcatcacggagatgtcggtgatgatggcttgctggaagcagaatgaattccgcgacgatgcgtgcagaaaagagatccagggcttcctcgattgtgccgcgagggctcaggaagcccgaaagatgagatcaatacaggaaaccctgggagagtctgggagtttacttccaaataaattgaataagttgttacagaggtttcctaacaaaccttacctcagctgaaaatggacaagtattttcaatgactgaaatatagcttctgacaactatgcagaggcattttagagacattggcattgccatgccctctttggagggtagaagaggcaaaacacttttttcaccctttggaatcatagtatgggtagaagttatgatttatcttgaaataaaatcctctgaacagaacttggccttttgtgtgattaggtactctcttcattcttgagctccctagaacctggaaatctttcctttctgattggccttaagggccgacaattccgttgtttgttttcctgcattgaggtttttaacatttgtgccctggtttgggtggacaaggaatggagagggcggcgtgaaaataagggggcgcaatgcggggcccggacgagggccgaaacaagaagggggctgcaaacacaaacacaaaaccggcgcactgaataagagcaaaataaaaaaagcgcgctgcgattatttgcttatagannnn

SEQ ID NO: 23499 - DNA, 904 bp, Homo sapiens
  misc_feature 904: n = A,T,C or G
acgcggggctgttcttgtgacagcgagtaagttctcacaaggtctgatagttttataagggacttttctcccttttgctcaatacttctccttgctgctgccatgtgaagaaggatgtgtttgcttctccttctgccatgattgtgacattcccagaacctggaggccaggctatgacacacagtcaatcaataaccacggagatctgcgatatagcccagtcggtggggccttgctgccatctgccatatgacccttccagtcccaggcttctgaagagacccggtacgtgcggtgcacttttcaactgacctctcgacgcagaacttcagccatgaaggtaacaggcatctttcttctcagtgccttggccctgttgagtctatctggtaacactggagctgactccctgggaagagatgaggccacatgttacaatgaacttaatggatgcaccaagatatatgaccctgtctgtgggactgatggaaatacttatcccaatgaatgcgtgttatgttttgaaaatcggaaacgccagacttctatcctcattcaaaaatctgggccttgctgagaaccaaggttttgaaatcccatcaggtcaccgcgaggcctgactggccttattgttgaataaatgtatctgaatatcaaaaaaaaaaaaaagggggggccgttaaattattttaaaaaaaaaccttccaaaacttccctttgaccttgaaccttaaatggaggccattggggggggaaacctggtttttggcacttaataggggttccaaataagccattcccttcccaattttcaaaaataagcctttttttccacggctttcaattgggggttggcccaacctcataagggtttttaataatgtgggaaccccggggtcccaan

SEQ ID NO: 23500 - DNA, 361 bp, Homo sapiens
  misc_feature 1: n = A,T,C or G
ngtacagtcacacaagtccccacactccgaagcgccctgtcttttaaggttctgctgtctctgtcttgaaattcttaatgccttcgagcacactgtcctgttgcacggggccctgcaaatctgtagctggtcctgggtggctgtcagggcggtgggcatggactggggatccctgagccagctgcagctcctggtcctgaacccccagggctggcagacatgacggcagagctacagaagaagctggagaagaggcgggcactggagcactgattcggacacaccagggaccagcgggctagtcccagggcatggcccagcggccagattctttttcccaggattaaaactctgaccccag

SEQ ID NO: 23501 - DNA, 1304 bp, Homo sapiens
  misc_feature 1, 2, 3, 4, 5, 6, 7, 8, 9, 10, 11, 251, 308, 594, 595, 596,597, 598, 599, 600, 601, 602, 603, 604, 605, 606, 607, 608,609, 610, 611, 612, 613, 614, 615, 616, 1299, 1300, 1301,1302, 1303, 1304: n = A,T,C or G
nnnnnnnnnnncagaggcccttataagaaaaaaaaaattccccccccccaagatgttttgggccacccatgtgttttccaacgagccaaagtataatgagaaaggtaagctcctttttccccccctcaggtcctcagtggattaatttaaaaccccccaggggccccgtcccctccttttcaaaaaggggggggtagtcggtcttttttctccttttttctaaaaaggtggggtaaatattttaccattcncccacaaggaagagaagccaagaggtcgggccagctcccccccatttttttaacgtnttgtaggcctcccatggagcggaccctttccctcttggcctcgtgagttttttgcttatcatgttcccatttcgtgccgctttccccccttaacgatgccatttggagggtaggggatctggcttcccactgtgactgggctatgggattctgactaccttgcttacagatttcatggtttgataaatttgttgtattcaaaaacttgaaatgcaggacgccattaagtgtctgtttatatttttggaatatttgtattacttacaattaattaataaaagtgggnnnnnnnnnnnnnnnnnnnnnnngttcctcggccgcccgggcaggtacgcggggggaatgtcttacgcaagctgacagtggatgtgcaattcttaaagaatgggcagattgcattcacaggaactacttttattggctatgtaggattatggactggccagagcccacacaagtttacagtttctggtgatgaacgagataaaggctggtggtgggagaatgctatcgctgccctgtttcggagacacattcccgtcagctggctgatccgcgctaccctgagtgagtcggaaaacttcgaagcagctgttggcaagttggccaagactccccttattgctgatgtttattacattgttggtggcacgtccccccgggagggggtggtcatcacgaggaacagagatggcccagcagacatttggcctctagatcctttgaatggagcgtggttccgagttgagacaaattacgaccactggaagccagcacccaaggaagatgaccggagaacatctgccatcaaggcccttaatgctacaggacaagcaaacctcagcctggaggcacttttccagtgaaagcaggccaggtgcggtggctcacgcctgtaatcccagccctttgggaggccaaggcgggtggatcacttgaggtcaggagttcaagaccagcctggccaacatggtgaagcctcgtctctacnnnnnn

SEQ ID NO: 23502 - DNA, 1615 bp, Homo sapiens
  misc_feature 1, 1615: n = A,T,C or G
nagttcaagacaacagagacaaagctaagatgaggaagttctgtacagtttaggaaatagaggctttcaaagataattcgcagtgatgtgaaactggcctcccaagccctgataacaacatggccaacgccctggccagcgccacttgcgagcgctgcaagggcggctttgcgcccgctgagaagatcgtgaacagtaatggggagctgtaccatgagcagtgtttcgtgtgcgctcagtgcttccagcagttcccagaaggactcttctatgagtttgaaggaagaaagtactgtgaacatgactttcagatgctctttgccccttgctgtcatcagtgtggtgaattcatcattggccgagttatcaaagccatgaataacagctggcatccggagtgcttccgctgtgacctctgccaggaagttctggcagatatcgggtttgtcaagaatgctgggagacacctgtgtcgcccctgtcataatcgtgagaaagccagaggccttgggaaatacatctgccagaaatgccatgctatcatcgatgagcagcctctgatattcaagaacgacccctaccatccagaccatttcaactgcgccaactgcgggaaggagctgactgccgatgcacgggagctgaaaggggagctatactgcctcccatgccatgataaaatgggggtccccatctgtggtgcttgccgacggcccatcgaagggcgcgtggtgaacgctatgggcaagcagtggcatgtggagcattttgtttgtgccaagtgtgagaaaccctttcttggacatcgccattatgagaggaaaggcctggcatattgtgaaactcactataaccagctatttggtgatgtttgcttccactgcaatcgtgttatagaaggtgatgtggtctctgctcttaataaggcctggtgcgtgaactgctttgcctgttctacctgcaacactaaattaacactcaagaataagtttgtggagtttgacatgaagccagtctgtaagaagtgctatgagaaatttccattggagctgaagaaaagacttaagaaactagctgagaccttaggaaggaaataagttcctttattttttcttttctatgcaagataagagattaccaacattacttgtcttgatctacccatatttaaagctatatctcaaagcagttgagagaagaggacctatatgaatggttttatgtcatttttttaattaaaaaagaaaaattcatataatcgtgtttaaaacacaaatgaagtcagtatttgcctttgttaacccttatccatttgttgacatgtagactgtttacaaaaaaaaaacacatggttaaatgttaaattttaattaaggcccccaaaaattaaatataactttttaaaatgaaaggagtcaccttttacatgactcaggtgaaaaaacagtataaacattaatttactttgtgttcaaaagaaaattccaactgctgttggggaaggacacagaaaagaaaaataaccacccaagaaaaacaaaaatggggggcggaagaaacagtgggggagagaggaccatcaaactagtagctagaaagtgaatatgcacattan

SEQ ID NO: 23503 - DNA, 647 bp, Homo sapiens
  misc_feature 1, 2, 3, 4: n = A,T,C or G
nnnnacacaaacagccgcgtggcccagccaggtccatccccttggcaaagtcccgctgggtcccgggtgctggggtcctgccctgttcggctgtggtgaaaacgcctccttctctctgggtccccagagaaaacccctgctctctccactctgcagcctcaattacaaagacgaacacacatacgccccacagatgtgcacacacacacacatacacacacagcaggagctgcgggaggaagccaggcagccagcggggacccgggagggtggaaacaccacaagaaccaggggctggttttcttttattgtattaaatagttaggcagacagtaggagaaatacacaaggaaaggccaggtgccccgaacccaagtccagcgcctaaaatcctgccattcatttccaagtctctcgtgggccctctccctccttctctctgctcctctttggggcacacctgtgctctatggtctgcatggaggggaccctaccctgaaggggtggcctgcccctccacacctctgggtgtttctcatcaggtggaatgagagactttacttttagtttgccccattaaccctggcttcttccgagcgcccaagcttaccacaaggctcactgtagacgtacctgcccgggcggcc

SEQ ID NO: 23504 - DNA, 1652 bp, Homo sapiens
  misc_feature 1, 1627, 1628, 1629, 1630, 1631, 1632, 1633, 1634, 1635,1636, 1637, 1638, 1639, 1640, 1641, 1642, 1643, 1644, 1645,1646, 1647, 1648, 1649, 1650, 1651, 1652: n = A,T,C or G
nacagactgctgcctcggtactagaccgagggttcccagaagctgtcttaccattgcaaaaacgttatagcaacagcctctgattacgacatgcctgagcatcaccaatatccgacctaccttcagactgtgtcaccggctggtggccggcctcatcggggcctctgtgctgcgctggtgctgtgctctcggtgaccgctctttgctctggctcactgctgacacctagcaagcgcacgagaagaagcacagagaacccaccatacaagtttattcacatgctcaaaggcatcagcatatacccagagaccctcagcaacaagaagaaaatcatcaaagtgcggagagacaaagatggtcctgggagggaaggtggacgtaggaacctgttggtggacgcagcagaggctggcctgctaagccgagacaaagatcccagggggcctagctctggatcttgtatagaccaattacccatcaaaatggactatggggaagaactaaggagccctattacaagcctgacccctggggagagcaaaaccacctctccatcatctccagaggaggatgtcatgctaggatccctcaccttctcagtggactataacttcccgaaaaaagccctggtggtgacaatccaggaggcccacgggctgccagtgatggatgaccagacccagggatctgacccctacatcaaaatgaccatccttcctgacaaacggcatcgggtgaagaccagagtgctgcggaagaccctggaccctgtgtttgacgagaccttcaccttctatggcatcccctacagccagctgcaggacctggtgctgcacttccttgtcctcagctttgaccgcttctctcgggatgatgtcattggcgaggtcatggtgccactggcaggggtggaccccagcacaggcaaggtacaactgaccagggacatcatcaaaaggaatatccagaagtgcatcagcagaggggagctccaggtgtctctgtcatatcagcctgtggcacagagaatgacagtggtggtcctcaaagccagacacttgccgaagatggatatcaccggtctctcaggtagggccccagatccttatgtcaaggtgaacgtctactacggcagaaagcgcattgccaagaagaaaacccatgtgaagaagtgcactttgaaccccatcttcaatgaatctttcatctacgacatccccactgacctcctgcctgatatcagcatcgagttcctcgttatcgacttcgatcgcaccaccaagaatgaggtggtggggaggctgatcctgggggcacacagtgtcacagccagtggtgctgaacactggagagaggtctgcgagagcccccgcaagcctgtggccaagtggcacagtctgagcgagtactaatcctgttcttctctcctctaatccccgggggccaagctggggagggatgtggaggggaaaaagatgacagagaagtggactccaaacctcattttagttgtagaagaaaatttcttacaaaacaaattccacaaagaacaccctatatgaccacagctgcagatcagttcttagcaatgatgtttttttttttgctttgcaaggcgctagaatcnnnnnnnnnnnnnnnnnnnnnnnnnn

SEQ ID NO: 23505 - DNA, 934 bp, Homo sapiens
  misc_feature 906, 907, 908, 909, 910, 911, 912, 913, 914, 915, 916, 917,918, 919, 920, 921, 922, 923, 924, 925, 926, 927, 928, 929,930, 931, 932, 933, 934: n = A,T,C or G
ttttgaaatatagttccttatagttttctcttgagtgtttggacatgagaatagataagattaaattacaatttacaagatcacttcattaggcacaggaaaagtatttaacaaaattcaacaccctttcacaataaaaaataaaaaataaaaaaccctcaacaaactaggaatagaaggaaacttcctcaacctgataaagggcatctatgaagaacccatggttagcatcatacttaatggtgaaggactggattatttccccctgagatcagaaacaagacaaggatgtctgctttggccatttctattcaacttgtactggacagtcaagaaagggcaattagggcagaaaataaaataaaagtcatctaggttggaaaggaagaagtataactaaatagagatgggagacgatatggtggttttgtgcatagtaatccaagggaaaactatagaaaatccaaaggcatgatttattaataaataaattcagcaaagttacaggatacaggattaaatatgcagaaattggttatctttcaatatagtatcaatgaataaatcaaaaatgatgttaagaaaacaatttaattttcaacaatggtcaagcttggtggcttgtgcctgtggtcccaacactttgggagtctgaggcagaaagactgctagaggccaggagacccgcctgggaaacagtgagatcccatctctacaaaaacaaacaaacaaaaaacaacaagcaaacaaaaaacagctggatgtgatgacactcatctgtcgtctcagctactcagaggctgaggtgtaaggatggcttgagccccaaagttcgaagctgcaatgagctataactgggtcactgcagtccagcctggatgacagagttagaccttgactcaaaannnnnnnnnnnnnnnnnnnnnnnnnnnnn

SEQ ID NO: 23506 - DNA, 374 bp, Homo sapiens; identical to SEQ ID NO: 21132
  misc_feature 1: n = A,T,C or G

SEQ ID NO: 23507 - DNA, 698 bp, Homo sapiens
  misc_feature 1, 2, 13, 678, 679, 680, 681, 682, 683, 684, 685, 686, 687,688, 689, 690, 691, 692, 693, 694, 695, 696, 697, 698: n = A,T,C or G
nnacccacgcgtncgttcgacgttggctgtggggaaacagcaagcggcgtggacgaccgttgctgagctggtgtggaacgtctgtgatcagattcattgggcttttgccagctctttttagattgtcctcttgagacctgtttacagaggaatggccagaggccacaggcactgcctcctgagaccatccacctgatgcgaagaaagctagaaaagcccaaccctgagaaaaatgcttgggaacacaacagcctcacaattccgagtccagcatgtgcttcggaggccagcctggaagtgactgatttattgctcactgctttggaaaatccagtaaaatatgctgaggacaatatggaacaaaaggacacagacagaattatttgttcaactaacattcttcataaaactgatcagacactccgaaggattgtatctcagacaatgaaggaagcaaaagatgaacaagtgcttcctcacaacttgaagcttctagcagaagaacttaacaagctcaaagcagagtttttggaagacctaaaacaaggaaacaaaaaatatctgtgctttcagcaaaccattgacataccagatgtcatttctttttttcattatgagaaagataatattgtacagaagtatttttcaaagcagcattaaaatttctgaactgccaannnnnnnnnnnnnnnnnnnnn

SEQ ID NO: 23508 - DNA, 1404 bp, Homo sapiens
  misc_feature 1, 2, 3, 4, 5: n = A,T,C or G
nnnnncgatcggtttcgtggtgagagagaggtgatctgtgtagagtgtggtttcttggtgctttattattattaatatcatgtagttggttcttggttggtgaagatatgtgtgtcaagtgtgtgtgtgtttcatcatgtttgttcgccagtgttattatgtaagataagttgggtgatgggggattaatcgttgagatgggttgatgtgtatttcgatattgatatgattgtgtgtcgtcgtcatgttatggtgttgtcgttagtgtttttaagagtttgttatatgtggaagctggaattttagtaatatctgcttatgagattattataatagtatagttgttgttgtaaagtttgtgttcgacaagtagatagagtgttgggaggtgggcgtttgatgagtataggtggtattaggtgtggcatgtcggtgttgtcgtcgaagctatagcgtgtggagagggtgtgggcgatatgtgttgtctggtgtggcgttccagtacgtactgttgtagtccgagttgttataacggtgttctgacgcatagaggtgcgctttgttgctgtgccgtcgggtggttgggggacacaaggatacgctcttgtggggataaccgctatgtgcgtctgatggtgcttgcactggtatcggggggccgatggcgctggcattggggggtatttttgtgtgtagccgcctgagcaagggtggaataagtcaggttccccaatggtgggtagaacggtgtagcatagggtaagtgttgtccgggactagttcttggggtaagtacccagtgggtcgcagacgtggcgcagcggtgtagtacggggttgtatagtgtgaaggtatgttaagtgggagtcagagtgtgagggtgtgtgtgggtgtggctaattcgtgggactctagtaggccggttgggtggttgcagtaggcgtcgtggaagtgtgtcgctaatggcgaagtgttatcagtaggcctttcgtatggccgtctgtgcatgacagatgtgcagccctggttgcggatgaagttctgttgatctgtcttctgcgattgcttcgacatcctgtgtgtggtgttgaaggaaaatgggtgctgcgagacggctgtgtttaaaatagtctgctccttgttggatagtctcgtccaagatacagcagatttttataaaggttttagtacgttcgtcctcgtgaaagaattggccattttcatttatcatgtaaattatccacttttatgcataacatactttccggcacgccggagccgcaaaagcctcgaccgctacgactcctctgtccgtctactgccccgcgtacgcgggggtagtggcttcgtcttcggtttttctcttccttcgctaacgcctcccggctctcgtcagcctcccgc

SEQ ID NO: 23509 - DNA, 341 bp, Homo sapiens
  misc_feature 341: n = A,T,C or G
acgcggggtggatcctgcaggaagcccaggggccttagacagcagatggtggggtgtgtgtgaggggtggtatgcgtgctgctctgagtttagggctgagtgtgcaagctaggagcagaggacaggtccaagcctggcttctcaccagtccgtctgaggtggaaaagaatccagcactctccccagcactattccgaccgtggtctcccatcccttggatgccatctcctattaggagggggagaaagaaacgcgtgccttataccaaggtgcaattaacagaacttgaacggtaatacccccacaataattcattactaaggacaaacggaggctgatan

SEQ ID NO: 23510 - DNA, 1692 bp, Homo sapiens
  misc_feature 1, 2, 3, 4, 1690, 1691, 1692: n = A,T,C or G
nnnncgcggccgcgttcgactacggctgcgagaagacgacagaagggtacggctgcgagaagacgacagaagggtacggctgcgagaagacgacagaagggtacggctgcgagaagacgacagaagggtacggctgcgagaagacgacagaagggtacggctgcgagaagacgacagaagggtacggctgcgagaagacgacagaagggggcggggggccgaggctggcgggcgcggggaaaatggcggcggcggcggcggcggctgcagctacgaacgggaccggaggaagcagcgggatggaggtggatgcagcagtagtccccagcgtgatggcctgcggagtgactgggagtgtttccgtcgctctccatccccttgtcattctcaacatctcagaccactggatccgcatgcgctcccaggaggggcggcctgtgcaggtgattggggctctgattggcaagcaggagggccgaaatatcgaggtgatgaactcctttgagctgctgtcccacaccgtggaagagaagattatcattgacaaggaatattattacaccaaggaggagcagtttaaacaggtgttcaaggagctggagtttctgggttggtataccacaggggggccacctgacccctcggacatccacgtccataagcaggtgtgtgagatcatcgagagccccctctttctgaagttgaaccctatgaccaagcacacagatcttcctgtcagcgtttttgagtctgtcattgatataatcaatggagaggccacaatgctgtttgctgagctgacctacactctggccacagaggaagcggaacgcattggtgtagaccacgtagcccgaatgacagcaacaggcagtggagagaactccactgtggctgaacacctgatagcacagcacagcgccatcaagatgctgcacagccgcgtcaagctcatcttggagtacgtcaaggcctctgaagcgggagaggtcccctttaatcatgagatcctgcgggaggcctatgctctgtgtcactgtctcccggtgctcagcacagacaagttcaagacagatttttatgatcaatgcaacgacgtggggctcatggcctacctcggcaccatcaccaaaacgtgcaacaccatgaaccagtttgtgaacaagttcaatgtcctctacgaccgacaaggcatcggcaggagaatgcgcgggctctttttctgatgagggtacttgaagggctgatggacaggggtcaggcaactatcccaaaggggagggcactacacttccttgagagaaaccgctgtcattaataaaaggggagcagcccctgagcacccctgctggtggctctgtcctctgttaggcaccacactggttggtcaacttggatgttcatcgaggctcattctggccttgctcagaagcccttctgatgctcttcagtgagggaggcactaccatttgaagtgaccccatgtcagtcacatggactggtctttagcaaagtccaaggctgcctggttccaccttagtggtctctgttctacactttaatgtcaccctcttacatcatcttaacctagccaaccaaacttattaactgttaattggctactaaaaaaagaaatcacaaaaaaaacaaaaaccgggggctataaggggggggagaaagagggtaaaannn

SEQ ID NO: 23511 - DNA, 2041 bp, Homo sapiens; identical to SEQ ID NO: 22247
  misc_feature 1, 2, 3, 2025, 2026, 2027, 2028, 2029, 2030, 2031, 2032,2033, 2034, 2035, 2036, 2037, 2038, 2039, 2040, 2041: n = A,T,C or G

SEQ ID NO: 23512 - DNA, 3069 bp, Homo sapiens
  misc_feature 1, 3067, 3068, 3069: n = A,T,C or G
nagccgtcgcggcgcgcggtgcggcctgggagctaccgaaggccggcggccgcggagccctgcgagtaggcagcgttgggcccatgcaggacgcggagaacgtggcggtgcccgaggcggccgaggagcgcgccgagcccggccagcagcagccggccgccgagccgccgccagccgaggggctgctgcggcccgcggggcccggcgctccggaggccgcggggaccgaggcctccagtgaggaggtggggatcgcggaggccgggccggagcccgaggtgaggaccgagccggcggccgaggcagaggcggcctccggcccgtccgagtcgccctcgccgccggccgccgaggagctgcccgggtcgcatgctgagccccctgtcccggcacagggcgaggccccaggagagcaggctcgggacgagcgctccgacagccgggcccaggcggtgtccgaggacgcgggaggaaacgagggcagagcggccgaggccgaaccccgggcgctggagaacggcgacgcggacgagccctccttcagcgaccccgaggacttcgtggacgacgtgagcgaggaagaattactgggagatgtactcaaagatcggccccaggaagcagatggaatcgattcggtgattgtagtggacaatgtccctcaggtgggacccgaccgacttgagaaactcaaaaatgtcatccacaagatcttttccaagtttgggaaaatcacaaatgatttttatcctgaagaggatgggaagacaaaagggtatattttcctggagtacgcgtcccctgcccacgctgtggatgctgtgaagaacgccgacggctacaagcttgacaagcagcacacattccgggtcaacctctttacggattttgacaagtatatgacgatcagtgacgagtgggatattccagagaaacagcctttcaaagacctggggaacttacgttactggcttgaagaggcagaatgcagagatcagtacagtgtgatttttgagagtggagaccgcacttccatattctggaatgacgtaaaagaccctgtctcaattgaagaaagagcgagatggacagagacgtatgtgcgttggtctcctaagggcacctacctggctacctttcatcaaagaggcattgctctatgggggggagagaaattcaagcaaattcagagattcagccaccaaggggttcagcttattgacttctcaccttgtgaaaggtacctggtgacctttagccccctgatggacacgcaggatgaccctcaggccataatcatctgggacatccttacggggcacaagaagaggggttttcactgtgagagctcagcccattggcctatttttaagtggagccatgatggcaaattctttgccagaatgaccctggatacgcttagcatctatgaaactccttctatgggtcttttggacaagaagagtttgaagatctctgggataaaagacttttcttggtctcctggtggtaacataatcgccttctgggtgcctgaagacaaagatattccagccagggtaaccctgatgcagctccctaccaggcaagagatccgagtgaggaacctgttcaatgtggtggactgcaagctccattggcagaagaacggagactacttgtgtgtgaaagtagataggactccgaaaggcacccagggtgttgtcacaaattttgaaattttccgaatgagggagaaacaggtacctgtggatgtggtcgagatgaaagaaaccatcatagcctttgcctgggaaccaaatggaagtaagtttgctgtgctgcacggagaggctccgcggatatctgtgtctttctaccacgtcaaaaacaacgggaagattgaactcatcaagatgttcgacaagcagcaggcgaacaccatcttctggagcccccaaggacagttcgtggtgttggcgggcctgaggagtatgaacggtgccttagcgtttgtggacacttcggactgcacggtcatgaacatcgcagagcactacatggcttccgacgtcgaatgggatcctactgggcgctacgtcgtcacctctgtgtcctggtggagccataaggtggacaacgcgtactggctgtggactttccagggacgcctcctgcagaagaacaacaaggaccgcttctgccagctgctgtggcggccccggcctcccacactcctgagccaggaacagatcaagcaaattaaaaaggatctgaagaaatactctaagatctttgaacagaaggatcgtttgagtcagtccaaagcctcaaaggaattggtggagagaaggcgcaccatgatggaagatttccggaagtaccggaaaatggcccaggagctctatatggagcagaaaaacgagcgcctggagttgcgaggaggggtggacactgacgagctggacagcaacgtggacgactgggaagaggagaccattgagttcttcgtcactgaagaaatcattcccctcgggaatcaggagtgacctggagcactgtgcgcagccgtgtgtgctgtggagccgaggccgtcctgcaggaagccgcgtgactcccgcctcctccctgtgctctctggctctggactgtgactgcgcctggattctgccattgcgacacatttttgtgcctttcagcccctggtgtctgcagtgggggatttaaggcacccgcttccacttctttcttgtttggagttttctgttggaaccgccggcgttggctccgaagacttagcgacgccactggcggcaccttctcctgcgcccagtgatgtttccacggtgcctgtacacagccgagcagcatttccgttgaaggacttgcatccccattgcgggcagtgctggacgtgtcccggagacccaccgggagggcgccgccatgccttgtacccccaccgtgcaggttgtggccggttttctccgcaggttgaacatggaaataaaagcaaacttgtatgaaaaaaaaaaaaaaggatttagggggggaaaaaggtaaaggccaggcctggcttttccgacannn

SEQ ID NO: 23513 - DNA, 958 bp, Homo sapiens
acgcggggactcagaagcttggaccgcatcctagccgccgactcacacaaggcaggtgggtgaggaaatccagagttgccatggagaaaattccagtgtcagcattcttgctccttgtggccctctcctacactctggccagagataccacagtcaaacctggagccaaaaaggacacaaaggactctcgacccaaactgccccagaccctctccagaggttggggtgaccaactcatctggactcagacatatgaagaagctctatataaatccaagacaagcaacaaacccttgatgattattcatcacttggatgagtgcccacacagtcaagctttaaagaaagtgtttgctgaaaataaagaaatccagaaattggcagagcagtttgtcctcctcaatctggtttatgaaacaactgacaaacacctttctcctgatggccagtatgtccccaggattatgtttgttgacccatctctgacagttagagccgatatcactggaagatattcaaatcgtctctatgcttacgaacctgcagatacagctctgtgtaagtgtgaccttcaattcggatgttgcccaagagttgaacacctctattgctgtagtgatgggactagaggctgcatggtgagtgcttgacaacatgaagaaagctctcaagttgctgaagactgaattgtaaagaaaaaaaatctccaagcccttctgtctgtcaggccttgagacttgaaaccagaagaagtgtgagaagactggctagtgtggaagcatagtgaacacactgattaggttatggtttaatgttacaacaactattttttaagaaaaacaagttttagaaatttggtttcaagtgtacatgtgtgaaaacaatattgtatactaccatagtgagccatgattttttaaaaaaaaaaaaataaatgttttgggggtgttctgttttt

SEQ ID NO: 23514 - DNA, 1242 bp, Homo sapiens
  misc_feature 1, 417, 1234, 1235, 1236, 1237, 1238, 1239, 1240, 1241, 1242: n = A,T,C or G
naattggaaactccaccgcggtggccggccgcccgggctgctacgcgggataagaggccagagccagagcgcttcgagcttcttcaaggaacttagagaagagcggcattgtgctccttctgggacccccacaggaccagagatccttgctgctgcagttcctccctcttccctaaagaacaatagggaacttttataagtggtagaatttcacagcaataaaaaaagaaaattgacgccagatcataacaagaacacaaaggctaatcctagtgttttggagagagatgtggatacacaagaatttaacctagaaaaagctcgtttagaagtgcaccggtttggtatcacgggttatggaaaaggaaaggagagaatcctggaacagaacgtgccattatgctgggcgctaagctncctaaaaagagttatgtgaattacaaggttttacaggagcaaattaaagaaaaaaaggcagcaaaggaagaagaaaagagactggcccaagaaacagatattttcaagaaaaagaagaggaaaggacaggaggacaggaaatccaaaaagaagtccgctcccagtattttgtcaaatggacggattggacaggttggaaaattcaaaaatggaacactgattctgagcccagttgatatcaagaaaataaattcttccagagtggccaaatgaagtactttgtcaaataaaacgaggatgggaacaactgagtcaactgcagcggccctggaccctgtgcgactctagatagatcgttcttaacacgcatttcacagactgctttttcattttagaaaaaaagtcaaacagaagtaacatttctagttgccgaagtgtctgcttcatggtgctgaacgtgtcaggcccagtgcagcatgaatgtgaagtgaacccactgaaaagtgatttttaatgttctccagcaaacttcactcctgtttcatgttcactggtatttggtgcatttgcttgtaatacagttttttataactttactgttttgtaaatgctagtagtttacattaaattgccttatatttttaatgatttaatgttatgatatcatgaaagaaccaagaatctagtaatttatcagttttgtggaaaagcagttttaatttttagcctaccatgtgtacaaaatctacttcataagaagttatataaataaaataggtttgtagtaaaaaaaaaagacgcgtgggtcgactccctnnnnnnnnn

SEQ ID NO: 23515 - DNA, 1015 bp, Homo sapiens
  misc_feature 1, 1014, 1015: n = A,T,C or G
ncgggtagtcgcagcagtgtgttggtgttccccctttcgtgtttgtttgttcggttcttggcgccttgctcgttgtgctgtccgtagccctgtgtctgtgcctgcctctgcgctcttgtgtgccttctgcttccggctttgtggccgccgctctgtttgtgtttcttcccggtgcgtgtcgctgtgccccctggctcccgtggtcccggtaggtgtccgtggtcatggccccatcaccagcttgcctgggttccggagttctgtgtccagtccggcgctcaccacgcctcgccttgggtttttaccattccactctacagtgccggacccctgattcccttcttgcagccagcctcagcctttcctctagccctgcttctgtcccagagtcaaccatgttccaagtttaacgtaaggacaagttatatacccccacccgtctcagccttgactgaagttttgtcccgttggtgttttcacacaaagtccagtagtcactctgtccccgttccaactacaggctctgccagtgatatagaaaacatgcagaggaagctcactcaaggtagggaaggatggctgtgcatgggcccagccctgtggagggtggtggtcttcagccactccaaggccaccagatctgccactgaagtaggaccttgcttccaatggtgacaagccctacagcagatctacaggcagaccttaacagatacagggcaattttctcttcttcgtaatttcctagttttaagttgggtgaccttttttacaacttcacaactgacagttccacagacctggggacagatctaccttctctgcttggatcagaggcagttttcttatttccttgcctcgaggtgctgtgtcatacagcagcaggaacagacggtcagacacaaggactcgaggcaatggcggcggctgtgtatggggattgactcggcacctgggacttttcctccgcagagttcttccacgtccgcgcggacgcgtgggtcgactccctann

SEQ ID NO: 23516 - DNA, 695 bp, Homo sapiens
gcgtccgggcatcctggagctgctcaagtaccaccctcgggtgctctacattgacattgacatccaccatggtgacggggttcaagaagctttctacctcactgaccgggtcatgacggtgtccttccacaaatacggaaattacttcttccctggcacaggtgacatgtatgaagtcggggcagagagtggccgctactactgtctgaacgtgcccctgcgggatggcattgatgaccagagtgcccatctttggccctctcccaggttacaagcaccttttccagccggttatcaaccaggtagtggacttctaccaacccacgtgcattgtgctccagtgtggagctgactctctgggctgtgatcgattgggctgctttaacctcagcatccgagggcatggggaatgcgttgaatatgtcaagagcttcaatatccctctactcgtgctgggtggtggtggttatactgtccgaaatgttgcccgctgctggacatatgagacatcgctgctggtagaagaggccattagtgaggagcttccctatagtgaatacttcgagtactttttttcatttcacttgcaaaattttgcagaattcctcctttctacccataaattacatatatttttcttctttagtcatggagaactccccccctcatctcttccctattatctttccctgtgt

SEQ ID NO: 23517 - DNA, 355 bp, Homo sapiens
gtggcggccgcccgggcaggtactgttgacatcagatctgctgggctggtgccactggagctgatgtggtccttgtgactcttactgcccccagcatggctctgctggctccagctggatggcccatctcctgtcagtaacctggtcccatctgttttgcagatgacccgttggcttcctgaccacctggccgcccactgctatgcgtgcgacagtgccttctggcttgccagcaggaagcaccactgcaggaattgtgggaacgtattctgctccagttgttgtaaccagaaggttccagttcccagccagcagctctttgaacccagtcgagtatgcaagtcttgctatagca

SEQ ID NO: 23518 - DNA, 1780 bp, Homo sapiens
  misc_feature 1, 1771, 1772, 1773, 1774, 1775, 1776, 1777, 1778, 1779,1780: n = A,T,C or G
ntcctagaccggccgagggacgcgtccgtgacgtagaaggtggagaccgcttcaccctgatcagggagtatcggctgcgggtgcgcaaggcgtccaggagtgacctggggctgtggagagcgacccgtggccttgtgtttcagagtttaccacctaggatgacttcagtgactagatcagagatcatagatgaaaaaggaccagtgatgtctaagactcatgatcatcaattggaatcaagtctcagtcctgtggaagtgtttgctaaaacatctgcctccctggagatgaatcaaggcgtttcagaggaaagaattcaccttggctctagccctaaaaaagggggaaattgtgatctcagccaccaggaaagacttcagtcgaagtcccttcatttgtctcctcaagaacaatctgccagttatcaagacaggaggcaatcctggcggcgagcaagtatgaaagaaacgaaccggcggaagtcgctgcatcccattcaccagggcatcacagagctcagccggtctatcagtgtcgatttagcagaaagcaaacggcttggctgtctcctgctttccagtttccagttctctattcagaaacttgaacctttcctaagggacactaagggcttcagtcttgaaagttttagagccaaagcatcttctctttctgaagaattgaaacattttgcagacggactggaaactgatggaactctacaaaaatgttttgaagattcaaatggaaaagcatcagatttttctttggaagcatctgtggctgagatgaaggaatacataacaaagttttctttagaacgtcagacttgggatcagctcttgcttcactaccagcaggaggctaaagagatattgtccagaggatcaactgaggccaaaattactgaggtcaaagtggaacctatgacatatcttgggtcttctcagaatgaagttcttaatacaaaacctgactaccagaaaatattacagaaccagagcaaagtctttgactgtatggagttggtgatggatgaactgcaaggatcagtgaaacagctgcaggcctttatggatgaaagtacccagtgcttccagaaggtgtcagtacagctcggaaagagaagcatgcaacaattagatccctcaccagctcgaaaactgttgaagcttcagctacagaacccacctgccatacatggatctggatctggatcttgtcagtgactttatgagagtttctgccacaaggtgcccaagaggagaggaatgggaagagtgccccagcacgtggtgactgcgtgatttctgctcgttgcctttgaagataactggcaggactgactgtagaacactttgacttttttcaaaaagtgatggaatttgtacatccaaatgaatattgtatagacaattttcccaggaatgtgcaaaatgcttgaaagttcaaacttcttttttgaaatgatcttcagatccagtggcccattcttttatctttatcctgtgaaggtgtctttcaggtttgaaacaatccaaaatcattaggaccagtctaggaacatttagtggcagttggatccgattgtaaggatgatactaatttctagcatggtctgagtgatttagggagaaaaagttggggtggcgcaagtcccgcgtactagcttggggatggcggggttcgggccgatgagacccggaaagggaccgttccaaacaagtcggggggggccgcccaaggggggggcgggggggacgcacccgannnnnnnnnn

SEQ ID NO: 23519 - DNA, 4386 bp, Homo sapiens
cgcccgtgtgcgcgcgccttcggggaggaggggctgtctgggctcggggcgcggcggcagtcggctctatgttcgcggtcttaacctctcctctggccgagtccttgcaagaagtgaattacccgaccctgcaaaacacttactattttggagtttaaagtatgtcatcatggcaaagtttcggagaaggacttgcatcattttggcactttttattctatttattttctctctgatgatgggtttaaaaatgctgagaccaaatacagctacttttggagctccttttggacttgaccttcttccagaacttcatcaacgaactattcatttggggaaaaattttgatttccaaaagagtgacagaatcaacagtgaaacaaataccaagaatttaaaaagtgttgaaatcactatgaaaccttccaaagcctctgaacttaacttggatgaactaccacctctgaacaattatctacatgtattttattacagttggtatggaaatccacaatttgatggtaaatatatacattggaatcatccagtgttagagcattgggaccctagaatagccaagaattatccacaagggagacacaaccctccagatgacattggctccagcttttatcctgaattgggaagttacagttctcgggatccttctgtcatagaaactcacatgagacaaatgcgctcagcttcaattggtgtactagccctctcttggtacccacctgatgtaaatgatgaaaatggagaacctactgataacttggtacccactattttggataaagctcataaatataacctaaaggttacttttcacatagaaccatatagcaatcgagatgatcaaaacatgtacaaaaatgtcaagtatattatagacaaatatggaaatcatccggccttttacaggtacaagacgaagactggcaatgctcttcctatgttttatgtctatgattcctatattaccaagcctgaaaaatgggccaatctgttaaccacctcagggtctcggagtattcgcaattctccttatgatggactgtttattgcccttctggtagaagaaaaacataagtatgatattcttcaaagtggttttgatggaatttacacatattttgccacaaatggctttacttatggctcatcacatcagaattgggctagcctaaaattattttgtgataaatacaacttaatatttatcccaagtgtgggcccaggatacatagataccagcatccgtccatggaacacgcaaaacactcggaaccgaatcaatgggaagtattatgaaattggtctgagtgccgcacttcagacacgccccagcttaatttctatcacctcttttaatgagtggcatgaaggaactcagattgaaaaagctgttcccaaaagaaccagtaatacagtgtacctagattaccgtcctcataaaccaggtctttacctagaactgactcgcaagtggtctgaaaaatacagtaaggaaagagcaacttatgcattagatcgccagctgcctgtttcttaatgcattgattaaagtttaatagttatcaaaatcacctaatttttaaaaatagctttcgttttgagttctggaaagaaaactgtcaaaatcagtatatactattagttatatttaaaaatatttttttaaattctttacagataatattatacttgttacccttcacaataccacatgagaaaatatctgagacaaaatgtatacaaatatattccttatggcataatttattgcatttctgactgaaatcaaaattcttatttgatggcaattgaattttcattttacaatagataaatgcttgtgttacctaaagcacttagcacacagttaaattatatttacatcctagacccaaataaataggattgtgtgtatatttgggatatctattgaagaaaaaaagaaaaccccttaaagataatgtacatgcttcatgtcatgtctttaaaataatttaatcaactttattgtcttagtatttagactctggataactctacaataatgaggaaattcttaagaataacaaaatcactgtaccttcctctcaattttgctgtgaacctgaaatggctttaaattaatactcttattttttatttaatttaattacataaattaaaccttaccatgaccaaattgtgttaggaaggcctgctatctacagcacagtgtgtcatttgcagatttgtggttacctataccacgctaggtgttttgacatgtttagtgtttctgctttacagtgctgaattccatattttagaagctatgaaagtccttttatgaaaaagttactgattgcttctcagttattaggaaaacagttgtttcacaattattatgtagatatgatgcccaaatatcatttttagtatatcttgtcgatctttaagttgttactattgtgttattcatgtctttaaatcagataccaaatattttttaggaaagaaaaatgttattactgtcattaggttgtcttttaatactttaagttattttgacgaaaagtaatagagaaaatttacttagcatttttagattctagagacatggaaatgaaaattattttatgtctagagtaggtcctgaagtttggctttacattaagtttagcactgtatcagaatgaagaaactaatattttacataaaaactaatactttcaattttttatatagtaatatccccattttgtaaatgttagacttttatcatacctgtaagttaaaatacttgttatcaataacttgtcatattgtgacaaattgatcacttgtgtacgaaaaataaatctccttaaaaactaaataaaatgcactgtattcttacagttaatgtttataactatagtaaaaaattaatatatatcctattacataaatgttatttcttaggtgttccattaagaagagcaatagaataatgctaaaaaataatgcctataaatcttcagagtataaagacatccattcagaaacaaaaattagcactaaattttttataaaatagaccagatgacaaaatttattttatttttaaacagtggttttgacacaaattatgttattgaaaagcattattaatgtttaatttatttaaaattttggaatttgccatttctcagagaatgatcaggccttaggaaattaatacagtagtagtaatcattttctaggggaaaataaaagaataaatcactatactgatattttgatataagcaagcacttacatggtaatcactatatagatccaacctgtggattttcttcttatgtccatttaactagaatatattattttaggtataatttacaaatgtcacacctaataatcttttataatataccatatttcattaaagttttgttagagaagtatctaccacagaggagtttttgtcattgtgtacgttgtgtatttgaacccaccatgacagaaagtaaattttaggaaatagttatgagattaagggaaaatctataaaaacaaggttagcatattctcaacacagataccaccactttctttttcccattatagacatggtgaatccacacagcatacttcatctctgagctttgttgtgattcctcaacacattaccctaaccagccagcagtaacagatttcagagtaagataaagcagattctgtcttcattgcaaaaagttattctcaatggaagaatggcatctgatctcataattactagtttatattaatatagtttttttctccctttttaataaaataattacagtcatccctcagtgtctgtgggggattggttccagttacccctatagataccaaaatctgcagatgctcaagtccctgatataaactggcatagtagttgcatataatctatgcacatcctcctgtatacattaagtcatctctagattatttataacacttaatacaatgtaaatgctatgtagttgttataccatactggttagtgaataattacatgaaaaaaaagagtctgtcatcttcagagtttcagtcggcaatttcttggccatggatgtgaactacgattagtgagccactgcttaagaataatctatattccgtatcttagagaggaacttccgaacttccccggtttttcactggcttcatttgttgccacggcttaatggttgttaacacgaatacgccagaaacttttctcaccaacgtcggccgacggtaccaaagggaaacacgagcacagagcgtaaaacaggcgccacgcggcgcacacaacgctggcaacaaacagcctctaaatattgcatcaaacatagcgcgcccatgtccacatca

SEQ ID NO: 23520 - DNA, 1696 bp, Homo sapiens
  misc_feature 1, 1694, 1695, 1696: n = A,T,C or G
ncgtccggctggggccaagtgcattgtgtctggcggcggcgcgcgagcccaccggcggctgcggcggggcgggaagccatggagccgcgggcgctcgtcacggcgctcagcctcggcctcagcctgtgctccctggggctgctcgtcacggccatcttcaccgaccactggtacgagaccgacccccggcgccacaaggagagctgcgagcgcagccgcgcgggcgccgaccccccggaccagaagaaccgcctgatgccgctgtcgcacctgccgctgcgggactcgcccccgctggggcgccggctgctcccgggcggcccggggcgcgccgaccccgagtcctggcgctcgctcctggggctcggcgggctggacgccgagtgcggccggcccctcttcgccacctactcgggcctctggaggaagtgctacttcctgggcatcgaccgggacatcgacaccctcatcctgaaaggtattgcgcagcgatgcacggccatcaagtaccacttttctcagcccatccgcttgcgaaacattccttttaatttaaccaagaccatacagcaagatgagtggcacctgcttcatttaagaagaatcactgctggcttcctcggcatggccgtagccgtccttctctgcggctgcattgtggccacagtcagtttcttctgggaggagagcttgacccagcacgtggctggactcctgttcctcatgacagggatattttgcaccatttccctctgtacttatgccgccagtatctcgtatgatttgaaccggctcccaaagctaatttatagcctgcctgctgatgtggaacatggttacagctggtccatcttttgcgcctggtgcagtttaggctttattgtggcagctggaggtctctgcatcgcttatccgtttattagccggaccaagattgcacagctaaagtctggcagagactccacggtatgactgtcctcactgggcctgtccacagtgcgagcgactcctgaggggaacagcgcggagttcaggagtccaagcacaaagcggtcttttacattccaacctgttgcctgccagccctttctggattactgatagaaaatcatgcaaaacctcccaacctttctaaggacaagactactgtggattcaagtgctttaatgactatttatgcgttgactgtgagaatagggagcagtgccatgggacatttctaggtgtagagaaagaagaaactgcaatggaaaaatttgtatgatttccatttatttcagaaagtttgtatgtaacaattacccgagagtcatttctacttgcaaaaggattcgtaacaaagcgagtataattttcttgtcattgtatcatgcttgttaaattttaatgcagcatcttcagaacttgtcctgatggtgtcttattgtgtcagcaccaaatatttgtgcattatttgtggacgttccttgtcacaggaagattcttcttctgttgccttattgtttttttttttttaagtctcttctctgtctttgtactggaatcgaaatcataagataaacagatcaaacgtgcttaagagctaactcgtgacactatgcagtattgtttgaagacctgttgttcaacctctgtctctttatgttaactggatttctgcattaaatgactgcccccttgttagcgcgtgcggnnn

SEQ ID NO: 23521 - DNA, 1782 bp, Homo sapiens; identical to SEQ ID NO: 21380
  misc_feature 1766, 1767, 1768, 1769, 1770, 1771, 1772, 1773, 1774, 1775,1776, 1777, 1778, 1779, 1780, 1781, 1782: n = A,T,C or G

SEQ ID NO: 23522 - DNA, 1113 bp, Homo sapiens
  misc_feature 1, 2, 1112, 1113: n = A,T,C or G
nnagggacatgatttaaactatggcaggtatcagcccacctcccaattcactgtggattcatgatccacagaaaaatagaaaacctggaccccgcagtccaagcaaagccacacagacagggcacataaaggtttggtgactcaaaaaaaagaagcaatgaagtgcattatccacagtcatttaagcagactccacttacaggcacacacacatacacacacacacgaaaccacacaatgtttcacacacacacacacagacttccaacatttacaacactcccacagaaacacacagcgtgggaactcctaaggctgcctggtactgcaggacatttgagtgtgggagagagcccctctccccgccccgccctggggaacacaggcgtgatgtacctataaatcacagtggggcaagtttcaaaatgactcacaactacaatgcctaggcaggcttgaagaatcctacagatttctttgcatcctttgggatttcagaatttatttctggaattgtgcttgatgtttctacagactctcacatctgccctctcttgggatcatgggactgtcctgtctgtcttacagagaagacaagtgggagtccatgggcaacaaaactgtatagaggtgcccttcttctccaattcacagggacttggcattaggcaacaatgacattaattgtcactctactgaaaggtcacagtcaggcctggtgctgtgagactagcgcatgcacatttgtgaggcaggctccgccatcagtcagtctgagctgtcagcctgcctatgcagtaaaaaatggtacaggcagggcaagcctggtatcaagaaaaaggcagcctggaaaaacccagagcaggacactaaaattctcaaactcagggcgcctttagacagtttttgtggttgggtcttgctggaggaggaagggttttgagactctgaggtggtcacagcaaactgttcttctgacttcattcccaaaagatgttctttgcgacagtctggtaccatagggattgcaatatagtatggtgtgttaagggttctttgttgatagacccgcgttaattaattctagaagtactctcgatggggggcccggnn

SEQ ID NO: 23523 - DNA, 1113 bp, Homo sapiens; identical to SEQ ID NO: 23522
  misc_feature 1, 2, 1112, 1113: n = A,T,C or G

SEQ ID NO: 23524 - DNA, 1113 bp, Homo sapiens; identical to SEQ ID NO: 23522
  misc_feature 1, 2, 1112, 1113: n = A,T,C or G

SEQ ID NO: 23525 - DNA, 1113 bp, Homo sapiens; identical to SEQ ID NO: 23522
  misc_feature 1, 2, 1112, 1113: n = A,T,C or G

SEQ ID NO: 23526 - DNA, 2608 bp, Homo sapiens; identical to SEQ ID NO: 21241
  misc_feature 1, 2, 3, 4, 5, 6, 7, 8, 9, 10, 11, 12, 13, 14, 15, 16, 17,18, 19, 20, 21, 22, 2607, 2608: n = A,T,C or G

SEQ ID NO: 23527 - DNA, 1113 bp, Homo sapiens; identical to SEQ ID NO: 23522
  misc_feature 1, 2, 1112, 1113: n = A,T,C or G

SEQ ID NO: 23528 - DNA, 1113 bp, Homo sapiens; identical to SEQ ID NO: 23522
  misc_feature 1, 2, 1112, 1113: n = A,T,C or G

SEQ ID NO: 23529 - DNA, 1113 bp, Homo sapiens; identical to SEQ ID NO: 23522
  misc_feature 1, 2, 1112, 1113: n = A,T,C or G

SEQ ID NO: 23530 - DNA, 869 bp, Homo sapiens; identical to SEQ ID NO: 21180
  misc_feature 1, 2, 3, 820, 821, 822, 846, 867, 868, 869: n = A,T,C or G

SEQ ID NO: 23531 - DNA, 545 bp, Homo sapiens; identical to SEQ ID NO: 21184
  misc_feature 1, 2, 37, 542, 543, 544, 545: n = A,T,C or G

SEQ ID NO: 23532 - DNA, 535 bp, Homo sapiens
  misc_feature 535: n = A,T,C or G
aagtagattgtttctgctaggcaatataatctgctaatgtgacagtttccctgtaacaatgtgtagcaaaactctgcaggattaatgagaagaatgtattgcctttgaagcagcaccacttgagtaaaaattcctcaaatgtgctctatgttatgctagtgtaagtatagcaccggaggatatttcttgggcctactttgcaagcctctgagaggtgctgtgcagctccgaccatgaactgctctcctaattgaagagggtcccaggaaggggaagggcactatggcctccattctacccagggagattgggtgaatatctggcatgtaattaagtgctagctcaggtcgggctgtttctggcatatagggtagccagcggtcaggggagcctggagtggggttgcagtggactggggaggcccccagtgtcacagatctcccagggactgcgtgctcctcgaggaaggggcctgctgcgatgggtgaggaccttaggagctgcccgggtgactcctggaaggagtgactgcatn

SEQ ID NO: 23533 - DNA, 565 bp, Homo sapiens; identical to SEQ ID NO: 21169
  misc_feature 563, 564, 565: n = A,T,C or G

SEQ ID NO: 23534 - DNA, 650 bp, Homo sapiens; identical to SEQ ID NO: 21165

SEQ ID NO: 23535 - DNA, 450 bp, Homo sapiens
  misc_feature 1, 446, 447, 448, 449, 450: n = A,T,C or G
nagcacaaaaatctgggttttatttattcatttgtaaactcaagccagttctctattccactttttccaattatttgcttttgagagtctcaggattatccttccttcctctccttccacattttctcccctgtcccttctcctggccatgcttctctagtcccgacggtcttgtttagatcacaatgcggtttgtagattttccttcactctctctttcagaaaaaaatgccaaaatggtgttttaagaagcttttattgagccaactgaacttcaacaaagcaaacgaaaacataaagtagggaaaggaaccctcttcaacaaatggtgttgggataattggcaagccacatgtaggagaattaaactggatcctcatctctcaccttatacacaaatcaactcaaaatgccccgcgttaatttattctagaagtactctcgannnnn

SEQ ID NO: 23536 - DNA, 450 bp, Homo sapiens; identical to SEQ ID NO: 23535
  misc_feature 1, 446, 447, 448, 449, 450: n = A,T,C or G

SEQ ID NO: 23537 - DNA, 434 bp, Homo sapiens; identical to SEQ ID NO: 21248

SEQ ID NO: 23538 - DNA, 956 bp, Homo sapiens
  misc_feature 951, 952, 953, 954, 955, 956: n = A,T,C or G
ggagctccacacgcggtggcggccgctttttttggggttttttttttttaaaaaacttttaatttctgatcgagtcacagaaggatttgttgagtagcttcagcacttcttcctttgtcatttttttctgtctgataagtcatgccatggacgttacccatttttatcccagaggcctcttacgttgacttgaaaagacggactatgtctttcagagatcttgtgggtatcacatcaatcttgacaaattttctaccctccaagtcatgatcctaagaacagcttgcctcccatttctccggtttgtgctattatgaaggccttattgtttcagccttcttcaatcttgagggttgttgtcactgtatgggtggttcagaaataagtaggtcctgttactatgaagggggtcacagcttttgttggcatagctaaactttgtggctcatggaacagtatgaatgcagaatgtagctttctccacttgtggactgctttgcatagctgccagaggcctccagagaagaccttcagggctttgtggtctttatctgtagcacggatactaaaatttgtgggttcataggtcagctggatacagggcattttttgtgacaatttctggcattttttgaacaagacaaaattcttttacgaggtatattgcattgtacttggtacggctgagggaagtctgttgcccagctcttgcaatgcagacacatgccctgatatccagaattctgtaggataacatcacagattgtaatgctatcaggtgaaattataattttatagaattactttatttataggcagtggaggagacagaataatgtaactgcaactcatgtcttttttttctttttttttctttttttttgaggcagagcctcaccctgttgcccaggctggagtgcagtggcataatcttggctcacggcaacctcnnnnnn

SEQ ID NO: 23539 - DNA, 584 bp, Homo sapiens
  misc_feature 575, 576, 577, 578, 579, 580, 581, 582, 583, 584: n = A,T,C or G
aggagaaacataatgaagaatctgtgagtaaaaagaatattcaggcaacccttcatcaaaaagacctagattgtcaacagcttcagtcaagattgtctgcatctgaaacctcactgcatagaatacatgtagaactaagtgaaaaaggagaagctactcaaaagctcaaagaagaattatctgaggtagagaccaagtacaaagaagacgactgttttccacttccatttaaacatttttagccacttcatttctatttattgaacaggtcaaatttgtcttgttatttgtgagtacagtacatttaaaaaacatccttatcggttatttttttttttcagtcggagtttgacgtataaattgtttatgcttttggtgtaatctcttaataaactggttcttcaaaaatcatcctataaagtgagttttcatgaagttaacgggattttggtgtgatgtgttttgcaaatacttattaccgagaccaggtagatcgtcacctcggctcccgggcagagttcgcgtgcgtccgcaccggattccccgcgttaattaattctagaagtactctcgannnnnnnnnn

SEQ ID NO: 23540 - DNA, 569 bp, Homo sapiens; identical to SEQ ID NO: 21176
  misc_feature 563, 564, 565, 566, 567, 568, 569: n = A,T,C or G

SEQ ID NO: 23541 - DNA, 869 bp, Homo sapiens; identical to SEQ ID NO: 21180
  misc_feature 1, 2, 3, 820, 821, 822, 846, 867, 868, 869: n = A,T,C or G

SEQ ID NO: 23542 - DNA, 869 bp, Homo sapiens; identical to SEQ ID NO: 21180
  misc_feature 1, 2, 3, 820, 821, 822, 846, 867, 868, 869: n = A,T,C or G

SEQ ID NO: 23543 - DNA, 650 bp, Homo sapiens; identical to SEQ ID NO: 21165

SEQ ID NO: 23544 - DNA, 575 bp, Homo sapiens; identical to SEQ ID NO: 21190
  misc_feature 1, 2, 575: n = A,T,C or G

SEQ ID NO: 23545 - DNA, 535 bp, Homo sapiens; identical to SEQ ID NO: 23532
  misc_feature 535: n = A,T,C or G

SEQ ID NO: 23546 - DNA, 557 bp, Homo sapiens; identical to SEQ ID NO: 21209
  misc_feature 556, 557: n = A,T,C or G

SEQ ID NO: 23547 - DNA, 434 bp, Homo sapiens; identical to SEQ ID NO: 21248

SEQ ID NO: 23548 - DNA, 499 bp, Homo sapiens; identical to SEQ ID NO: 21187
  misc_feature 1, 2, 3, 8, 12, 13, 15, 24, 25, 28, 31, 497, 498, 499: n = A,T,C or G

SEQ ID NO: 23549 - DNA, 587 bp, Homo sapiens; identical to SEQ ID NO: 21164
  misc_feature 1, 581, 582, 583, 584, 585, 586, 587: n = A,T,C or G

SEQ ID NO: 23550 - DNA, 434 bp, Homo sapiens; identical to SEQ ID NO: 21248

SEQ ID NO: 23551 - DNA, 869 bp, Homo sapiens; identical to SEQ ID NO: 21180
  misc_feature 1, 2, 3, 820, 821, 822, 846, 867, 868, 869: n = A,T,C or G

SEQ ID NO: 23552 - DNA, 434 bp, Homo sapiens; identical to SEQ ID NO: 21248

SEQ ID NO: 23553 - DNA, 434 bp, Homo sapiens; identical to SEQ ID NO: 21248

SEQ ID NO: 23554 - DNA, 545 bp, Homo sapiens; identical to SEQ ID NO: 21184
  misc_feature 1, 2, 37, 542, 543, 544, 545: n = A,T,C or G

SEQ ID NO: 23555 - DNA, 545 bp, Homo sapiens; identical to SEQ ID NO: 21184
  misc_feature 1, 2, 37, 542, 543, 544, 545: n = A,T,C or G

SEQ ID NO: 23556 - DNA, 561 bp, Homo sapiens
  misc_feature 561: n = A,T,C or G
attaattaacgcgggtccaggtctctgagtccattctttgggtttggacaggtaggtttgtttctcacaataccaggtataataccagtagaatgtttcatataatttaacaagttcattataaaatgtacttgaaattgcaaagagccacaaaaaaaacccagacaatattgatgaagaaaagacgaagtcagaggacctatactacaagatatcaatataaattataaaggtaccataattaaaactgtggaactggagtaaacatggacaagtagaccaatgtagttaaaaacaattctgaaaaagacccacgcatatatagatgcttgatttattaccatgttgctactataaacaagggaaaactgtttttttaaaataaattatgctgagtcaggccaggcacagtggctcgcgcctgcaatcccagcactttgggaagccaaggttggctgatcacttgaggccaggagttcaagaccagcctgacaaacatggcaaaacccctatctttactaaaattatgaacattagactggctcggtggcacacgcctgn

SEQ ID NO: 23557 - DNA, 587 bp, Homo sapiens; identical to SEQ ID NO: 21164
  misc_feature 1, 581, 582, 583, 584, 585, 586, 587: n = A,T,C or G

SEQ ID NO: 23558 - DNA, 499 bp, Homo sapiens; identical to SEQ ID NO: 21187
  misc_feature 1, 2, 3, 8, 12, 13, 15, 24, 25, 28, 31, 497, 498, 499: n = A,T,C or G

SEQ ID NO: 23559 - DNA, 650 bp, Homo sapiens; identical to SEQ ID NO: 21165

SEQ ID NO: 23560 - DNA, 1798 bp, Homo sapiens
  misc_feature 1, 2, 3, 4, 5, 6, 7, 8, 9, 10, 11, 12, 1796, 1797, 1798: n = A,T,C or G
nnnnnnnnnnnncggaatacttctagaattaattaacgcgggataatatataacatatgtgacatgtaattaataacatagtcatataatatatatttaatataggtattatacatacaacgtattatatataatatataatatatattacatatgttataaaatataatatatattatatgtcgcattttatatatacaattatatattattatatgttgttttatactatatataacatagacataatatatatattatgcataatgggtattatatataacagatatattatatataatatatataatgtataatttatatttaatacgtatattaaccgtataatatattctatatatgatatataacatatattatatatgtcataaattataatatatactatatgtcatattgtataaatataaaacttatatattatcaattattatattttatacaatatatataacataagatgcaggatgtaaaacaatattatacataggttatatatattatatatatgatactgtatattattatatacataatgtatacgtatgtttgtgggtgccctttttcccatctcataacttgttttaagaagcgcagcctaataacgtgtgggcttgggattcagttcttgaaacaaaactctgagccttcaatgacctttcggtctatgtaaaagcactcctgtcttcctggcagcagttggacctcacaatgtggattgtgccctcacccagcaatgtttatgccctatcgccatggtgacggaattaggggtctcctgctcttcgtcctaaggaccactgtctgtgctgtgtctttcaaaggtcagaagagattgaacctttgtgtttttattttccctgtgtttgctttttctcatggggaacctgtgttgctgctttgaaggtatattcatactggcctttcaaatgccaactcttcaaattactagttaaggctttcaaaatatgttatttaaaaaattatcctctgtattttccatatgcagttataagtaggtttcatggttatgttttattcctcagtttatacattctgatttgttgccagagagacactagcccactgatggacggacagacgtgggcagggtccgtgtcactaaaccacccaccactgccacagctgcctacaacagacacatcagatgacactccgggcaaataaatgattttcactgaggacttactggttttaataataggtcctggtgtagagaagtccctcaactattgtgcaatgagttttgagaagcgggtaagctgtatgtttgtggtttgtttcataaattcatctacaggaagacaatattgactgaatgaagctttcatttcaaagagctaaaatatgctttgtgttttatatgtggatactactttaaactaagatattcattgtatcatagcttgtgatgtattctgctcatggcttttaagtaacttgtgccatgatccactggcactctagttggcttacgaaggtccttacccaccctactggtacgtctcattatgcctcacggcgggtgagtggcttcctttgtgaactacgtagtgcatgcagtgcgatgtttggagtaagctttaccggaactcaggagtgtcgagaatcatgaacgcgaatagcaacaggtgcaaagtgtggtacaaagatcaggatacgggagggaagtagccaaacagagggggtacacagctagacgggcacccacgctggctctgtcctccctactaccttgtggagcgacagacacnnn

SEQ ID NO: 23561 - DNA, 1007 bp, Homo sapiens
  misc_feature 1, 2, 3, 4, 1005, 1006, 1007: n = A,T,C or G
nnnncataagagacagttggtatgaatctctttattaaaatttctctcctttggttggtcttagccctgtaccaggcccatttcctcttctgttacagtcttcctaatggacaaaccatgcctgttgctattcctgcatcaattacaagttctaatgtgcatgttccagctgcagtcccagtaagaaagttagactatttaaatctctatcgcaaaactgatctttgtagtcagaaaataaagttggctgcttgactggcttatgaaattgaatttaacataatattgattagcagttgatagtatttatttgttatcattgtaatagcatataccattcaaggtatagctattttttctcttctccccaaaaccttaattttttttttatactgagatcttcttattcaacccatatcaatttgactggacttgtagcattcaaatattaacacagatttcaaattttagaaagatatttgtactagaatacttgtcaggtaactctgtggtatttctattagtatggaaattgtttataaagacacactctgaatttttgtggtcaagtagggtttgtagaatctttgatagcccagcatgttaaaatgtaaatgttctagaaaaataatctttcactttccctgtgaaaagaccccgcaaaaagttttttgaggggtgtgttaaatatataaattttgaaagacgtagacaaaatagttaactatctacttatgatatttaatagtttggccaggcatggcaactcatgcctgttgtaatcccagcgtattgggcggctgaggtaggaggattgtgtgagcccaggcgtttgagactgcagtgagctatggatcctgcctggatgacagggcaagaccccaagtcaaaaaaaaaaagtaatagtttaatgaacatttaaaaacacattgtttggaataatgtgtgttagcttctggcttgtctttacattcaaatttcatcctgagaaccatttttgagcannn

SEQ ID NO: 23562 - DNA, 869 bp, Homo sapiens; identical to SEQ ID NO: 21180
  misc_feature 1, 2, 3, 820, 821, 822, 846, 867, 868, 869: n = A,T,C or G

SEQ ID NO: 23563 - DNA, 434 bp, Homo sapiens; identical to SEQ ID NO: 21248

SEQ ID NO: 23564 - DNA, 1359 bp, Homo sapiens
  misc_feature 1, 2, 3, 4, 5, 6, 7, 8, 9, 10, 11, 12, 13, 14, 15, 16, 17,18, 19, 20, 21, 22, 23, 194, 1359: n = A,T,C or G
nnnnnnnnnnnnnnnnnnnnnnnatcttcgggggagacaaccaccaccagcgagcagcgttgaaaagacagcccacccatatccaatggaccaatcctgggaagaccaaagagactgtggcctacccacacaggagaaaacaggggtcacaagcacaaaccccaagagcgtcatactccaaaataatgcccgcngctaacagaacccgggtacaaaaatataagcccgttaagaaggatcaaggctccgcacgccaaaaataatcgggaggagtccctatagcccctgaagcccccgaaagttcctgtctgtagggtgaaataaagaaaatcggcaggctccctctaagagaatgagacactaacctcacatgggagacaaaataagaaccggaagtgggagaaagaaaaaagaaaatgggaattaagggacaagaaagaggaagtggaattaagggacaaggggagaaaagcttaggcgaatcaacggattgcaatctatcatctgctaggaatgaacaagacaacatcaaatgaggagctgtcagctggaccatacaaaaagctaaatgtacacaaaaggtttttttttttttccttttaaatctaccatactgcttcagttcatttccaatgcaacaatctactcaacaccaaaaatggtcatatctatcataaatacagaaagtcagtttttaaaacttattttttttaagctacaagtcctcaacactctttgtgtgtgtgggttattattttttttttttttgaaagtgggagtgcttaacttttccccttgaaattggcttcagcagaaaagctatccttaaaaatccccagaaagctaaagcagttcacattgtttttcttgaatactttctgcccatttttaagttaacaaaacaaaaaatcttttctggaacaaaaaaaaaaaaaactgaaaaaacaataatatataaaacaatgattctgaaaacaaagtgtgagcgattgacctgagaataaaaagacattacatttctttttttcttttagcaagccattggtatctgaatgctaagatagcaagaaatttaaaactgtaacaaggtggactgctttcccatacagtgcatgccgggctcctctgtgctatcagcgtggggcgtttattgaaaaggggcaaatatacaaggggtttaagctccaaagacattagggaggccctgcggacttctgtttcccagaccaatagtaccttcaaaaggacacaatgtaacagggttagggctttttttttttttttaatattaaaagaaaagaaaaagacaagaatgtaaaatcaccggcatagataggtatatgggaaaacaacccacgn

SEQ ID NO: 23565 - DNA, 313 bp, Homo sapiens; identical to SEQ ID NO: 21174
  misc_feature 1, 311, 312, 313: n = A,T,C or G

SEQ ID NO: 23566 - DNA, 650 bp, Homo sapiens; identical to SEQ ID NO: 21165

SEQ ID NO: 23567 - DNA, 557 bp, Homo sapiens; identical to SEQ ID NO: 21209
  misc_feature 556, 557: n = A,T,C or G

SEQ ID NO: 23568 - DNA, 869 bp, Homo sapiens; identical to SEQ ID NO: 21180
  misc_feature 1, 2, 3, 820, 821, 822, 846, 867, 868, 869: n = A,T,C or G

SEQ ID NO: 23569 - DNA, 869 bp, Homo sapiens; identical to SEQ ID NO: 21180
  misc_feature 1, 2, 3, 820, 821, 822, 846, 867, 868, 869: n = A,T,C or G

SEQ ID NO: 23570 - DNA, 557 bp, Homo sapiens; identical to SEQ ID NO: 21209
  misc_feature 556, 557: n = A,T,C or G

SEQ ID NO: 23571 - DNA, 587 bp, Homo sapiens; identical to SEQ ID NO: 21164
  misc_feature 1, 581, 582, 583, 584, 585, 586, 587: n = A,T,C or G

SEQ ID NO: 23572 - DNA, 587 bp, Homo sapiens; identical to SEQ ID NO: 21164
  misc_feature 1, 581, 582, 583, 584, 585, 586, 587: n = A,T,C or G

SEQ ID NO: 23573 - DNA, 575 bp, Homo sapiens; identical to SEQ ID NO: 21190
  misc_feature 1, 2, 575: n = A,T,C or G

SEQ ID NO: 23574 - DNA, 313 bp, Homo sapiens; identical to SEQ ID NO: 21174
  misc_feature 1, 311, 312, 313: n = A,T,C or G

SEQ ID NO: 23575 - DNA, 311 bp, Homo sapiens
  misc_feature 1, 2: n = A,T,C or G
nnacgcaaataacgtgccttttattgggcactggctctctttgagcccggagtcccgcccccgccctctctcgaagaactggccagactttttgcaaacgccttgaagggtagaattagcagcgagctcttgaaactgcctctggagatggaactcagcggaattctcgaaaagaagagggacattaaaaagacgggtgcatgcactgatttccaagcgcagtttgtccatgttagtcttgtacatgcttgactccagtcagccaccgtaggccccgccttaattaattctagaagtactctcgagggggg

SEQ ID NO: 23576 - DNA, 545 bp, Homo sapiens; identical to SEQ ID NO: 21184
  misc_feature 1, 2, 37, 542, 543, 544, 545: n = A,T,C or G

SEQ ID NO: 23577 - DNA, 530 bp, Homo sapiens
  misc_feature 525, 526, 527, 528, 529, 530: n = A,T,C or G
aggagtagagaaatgactaattttttcattggtgagtaatatgctacaaagactcgtagaatcatatacttttggacctggaaagtagcttaaggaccatctgattaaaattttaagttttattgatgaagaaattaagctcaagaaaggctgttacttgtccaagatcacagaagtattaactattgaagcttgagaaaacagccagttctctgctcaaatttcagctgaaactacattgtataataaaataactcaacataacattacaacagaatagtttaaactctttctagtcagtggcaacttagggtagggaagatccaaagggatttttaaacaagtttgttgaaattatgtaagaaaattaacttcatcagtgaattgagatttagtaagcgttcttgagctgctaaattaacacttcaatttttatatgctacagggctattaattatgtatctgatcttaattacttatggtcaaaatatttttaaagcaccaagttccccatgttttaagaannnnnn

SEQ ID NO: 23578 - DNA, 869 bp, Homo sapiens; identical to SEQ ID NO: 21180
  misc_feature 1, 2, 3, 820, 821, 822, 846, 867, 868, 869: n = A,T,C or G

SEQ ID NO: 23579 - DNA, 869 bp, Homo sapiens; identical to SEQ ID NO: 21180
  misc_feature 1, 2, 3, 820, 821, 822, 846, 867, 868, 869: n = A,T,C or G

SEQ ID NO: 23580 - DNA, 545 bp, Homo sapiens; identical to SEQ ID NO: 21184
  misc_feature 1, 2, 37, 542, 543, 544, 545: n = A,T,C or G

SEQ ID NO: 23581 - DNA, 869 bp, Homo sapiens; identical to SEQ ID NO: 21180
  misc_feature 1, 2, 3, 820, 821, 822, 846, 867, 868, 869: n = A,T,C or G

SEQ ID NO: 23582 - DNA, 869 bp, Homo sapiens; identical to SEQ ID NO: 21180
  misc_feature 1, 2, 3, 820, 821, 822, 846, 867, 868, 869: n = A,T,C or G

SEQ ID NO: 23583 - DNA, 545 bp, Homo sapiens; identical to SEQ ID NO: 21184
  misc_feature 1, 2, 37, 542, 543, 544, 545: n = A,T,C or G

SEQ ID NO: 23584 - DNA, 569 bp, Homo sapiens; identical to SEQ ID NO: 21176
  misc_feature 563, 564, 565, 566, 567, 568, 569: n = A,T,C or G

SEQ ID NO: 23585 - DNA, 869 bp, Homo sapiens; identical to SEQ ID NO: 21180
  misc_feature 1, 2, 3, 820, 821, 822, 846, 867, 868, 869: n = A,T,C or G

SEQ ID NO: 23586 - DNA, 530 bp, Homo sapiens; identical to SEQ ID NO: 23577
  misc_feature 525, 526, 527, 528, 529, 530: n = A,T,C or G

SEQ ID NO: 23587 - DNA, 869 bp, Homo sapiens; identical to SEQ ID NO: 21180
  misc_feature 1, 2, 3, 820, 821, 822, 846, 867, 868, 869: n = A,T,C or G

SEQ ID NO: 23588 - DNA, 869 bp, Homo sapiens; identical to SEQ ID NO: 21180
  misc_feature 1, 2, 3, 820, 821, 822, 846, 867, 868, 869: n = A,T,C or G

SEQ ID NO: 23589 - DNA, 869 bp, Homo sapiens; identical to SEQ ID NO: 21180
  misc_feature 1, 2, 3, 820, 821, 822, 846, 867, 868, 869: n = A,T,C or G

SEQ ID NO: 23590 - DNA, 587 bp, Homo sapiens; identical to SEQ ID NO: 21164
  misc_feature 1, 581, 582, 583, 584, 585, 586, 587: n = A,T,C or G

SEQ ID NO: 23591 - DNA, 869 bp, Homo sapiens; identical to SEQ ID NO: 21180
  misc_feature 1, 2, 3, 820, 821, 822, 846, 867, 868, 869: n = A,T,C or G

SEQ ID NO: 23592 - DNA, 530 bp, Homo sapiens; identical to SEQ ID NO: 23577
  misc_feature 525, 526, 527, 528, 529, 530: n = A,T,C or G

SEQ ID NO: 23593 - DNA, 557 bp, Homo sapiens; identical to SEQ ID NO: 21209
  misc_feature 556, 557: n = A,T,C or G

SEQ ID NO: 23594 - DNA, 869 bp, Homo sapiens; identical to SEQ ID NO: 21180
  misc_feature 1, 2, 3, 820, 821, 822, 846, 867, 868, 869: n = A,T,C or G

SEQ ID NO: 23595 - DNA, 545 bp, Homo sapiens; identical to SEQ ID NO: 21184
  misc_feature 1, 2, 37, 542, 543, 544, 545: n = A,T,C or G

SEQ ID NO: 23596 - DNA, 575 bp, Homo sapiens; identical to SEQ ID NO: 21190
  misc_feature 1, 2, 575: n = A,T,C or G

SEQ ID NO: 23597 - DNA, 313 bp, Homo sapiens; identical to SEQ ID NO: 21174
  misc_feature 1, 311, 312, 313: n = A,T,C or G

SEQ ID NO: 23598 - DNA, 662 bp, Homo sapiens
  misc_feature 584, 655, 656, 657, 658, 659, 660, 661, 662: n = A,T,C or G
gggaagatgaagaaatttcactcaagtattttgttactttaagattcaatgctggacactagaccagctataacattttcagatagagtgacttcatgcgtgaaatgatcacatacaatgaagaggttttaaaaaatacagatgacataacttgttcagttgaagaaaattaaaatactgatataaactaaatcattctcctcttcattttagggggatttttctctgcaattgtactgatttatgactagaaagctgaagactgatttgagcctctttagcaatactctatttcaccatttatcttccaaagaattatggctattttatttcttccaatgaagctggaaaattataatatgccagcagatcagtagaaatgtaaaaatattagtagttacccttttagatccaacttacctgtagtgaaatagcagcaatgcattctctatttgaggacaaaacataaaaaccctggcttcataaacatagagtattaaaaaatctcagaagtttaatgtgtagacatttgctaatatttctgtatgtctcagcactcagtctgaattataaaaacagaaaanaaatttagaaaacaaattggaaagcatttttaaatcatatccttaaaaatcatattttacctgagactacnnnnnnnn

SEQ ID NO: 23599 - DNA, 557 bp, Homo sapiens; identical to SEQ ID NO: 21209
  misc_feature 556, 557: n = A,T,C or G

SEQ ID NO: 23600 - DNA, 292 bp, Homo sapiens
  misc_feature 1, 2, 3, 4, 5, 6, 7, 8, 9, 10, 11, 12: n = A,T,C or G
nnnnnnnnnnnncatttcaggtttttatctttatatcacaggggcacaaacgttcattattccttggaagcaaatatcattttatctaagcaacagtaacatctgaaatacccttttttccccatggagctacatctctgttccagattattaagtgtaaaaccagcaatccacatcattttttatcctggataacatagtcttatctaatattttccctgggggatataattggaagggaagaatttcattaacatttaagctccccgcgttaattaattctacaagtact

SEQ ID NO: 23601 - DNA, 492 bp, Homo sapiens; identical to SEQ ID NO: 21256
  misc_feature 492: n = A,T,C or G

SEQ ID NO: 23602 - DNA, 650 bp, Homo sapiens; identical to SEQ ID NO: 21165

SEQ ID NO: 23603 - DNA, 762 bp, Homo sapiens
  misc_feature 1, 762: n = A,T,C or G
nttctgttccccttctgataatacagtttaagaatataacaaatagatatttaattccccttaaatatgtgtggatattttctgaatggtctaagcatctcttactgtgagtcatttctgcaaatgaacaaactcattcattatgaagtaattcttactagtgtctctctgaaaatgacttttttttttttaactttaatctcttacctccaaattccaaaggtacatattacagctcttatgaatgtcctgaagcatgctaggggagttattttgctgccttagcccttgggattagaattttgtatagtagatatttaatgaatgtttatagggcttatgattaaacttggtaaataagctataaaaatgtaagaaattctttggggagatagagagtcttttcttctgctatgtttttctccctttattccccgttgaattcagatggaaatatttcttgtctttttctttatgacacttatgaggttgctttatttccagcaaaggtcagtgaccttgcggcatctgcatataagtcagtataaacagtgctgcctgtgacattgagtagtatgtccttgtacctatccaataaagatgccgagttcatcttgtttaaacctgtgagggtgaggtacagaggctcattcgaatgttggcgggtgacttcaagtattctttgcctcatttaccattaaccatttcctgtagacatttagaactgttggtataaaccgcgttataaattctagaagtacn

SEQ ID NO: 23604 - DNA, 869 bp, Homo sapiens; identical to SEQ ID NO: 21180
  misc_feature 1, 2, 3, 820, 821, 822, 846, 867, 868, 869: n = A,T,C or G

SEQ ID NO: 23605 - DNA, 1047 bp, Homo sapiens
agtacttctagaattaattaacgcggggcacttgatgaagaagacgcggccatcccggcacaccccgtaggaccaatgctcaggccaaaggtgtccaaactatacagacccacagaatctaacaacagatgtctcaatattcctcgtcctagaactctcagaggatccagaactacagccggtcctcgctgggctgttcctgtccatgtgcctggtcatggtgctggggaacctgctcatcatcctggccgtcagccctgactcccacctccacacccccatgtacttcttcctctccaacctgtccttgcctgacatggtttcacctccaccatggtccccaagatgattgtggacatccaatctcacagcagtcatctcctatgcgggctgcctgactcagatgtctctttttgccatttttggaggcatggaagaaagacatgctcctgagtgtgatggccctatgaccggtttgtagccatctgtcaccctctatattattcagccatcatgaacccatgtttctgtggctttctagttctgttgtcttgttgtctcagtcttttagactcccagctgcacaatttgattgccttgcaaattacctgcttcaaggatgtggaaattcctaatttcttctgtgacccttctcaactcccccaccatgcgtgttgtgacaccttcaccaataacatagtcatgtatttccctgctgccgtatttggttttcttcccatctcggggatccttttctcttactgtaaaattgtttcctccattctgagggtttcatcatcaggtgggaagtataaaccttcaccacctgtgggtctcacctgtcagttgtttgctgattttatggaacaggcgttggagggtacctcggttcagatgtgtcatcttccccgagaaagcgtgcagtggcctcagtgatgtacacggtggtcacccccatgctgaaccccttcatctacagcctgagaaacagggatatgaaaagtgtcctgcggcggccgcacagcagcgcagtctaatctcaatatc

SEQ ID NO: 23606 - DNA, 650 bp, Homo sapiens; identical to SEQ ID NO: 21165

SEQ ID NO: 23607 - DNA, 650 bp, Homo sapiens; identical to SEQ ID NO: 21165

SEQ ID NO: 23608 - DNA, 1709 bp, Homo sapiens
  misc_feature 1, 761, 1708, 1709: n = A,T,C or G
nccattcacaaagcatgcccagctgcagggcctgagatccagacccccaaaagagttctttcaccttctcaggtgaccattgtcgaaaaagctgacagctccagcgtgctgcccagccccctgtccatcagcaccaaaagcaaaatgacattcctgtttgccaacctgaaagaccgtgatttcttggtgcagaggatctctgacttcctccagaaaacaccatccaagcagccaggcagtatcgggagcaggaaagccagtgttgtggaccctagcacagaggtgagaagccccttgggagcagcagggtcgagttgggcccaggaagagccagggcatccatcagcctccccgctggagcctgaccccatggttccggctgtgggcctccgcctaggggtggatgtgtcagagctggcaagagacccctagcccagacccacactgcccagcaacatcacagcctctttgcacccccagccacacacccggtactcctcactcctgctgggcccattgcccatgaggaaccttctctggctgtcctttctgcattgctgctgcactcagagcaaagccacactgtggaggcctgtacacttcggctttgttcccatgaccttccctgccaggcgttcaggctgaagttcttgacggtagaactgcagtatcactattgtaccagcaaacttaacaagaattccttaatatcaccaaatattgtattcacacttccccgtgtgcaagtgtacttttcacgntttgattatttgaactgaggcagacgaaagtcacacatgtcactcttggttgataggtctcttaaatctgtttaatctacgggcttctgctccacctagctctcgtttattcttccacaatatttttttgaaggaatcggtcacttgtgccatagagtctctcatcgtctggttttgctgattgcatccgctgcaggcgtttagcaagctcctgtgtctcttgtttaagttggttgagcggtgagaccgagagccgtgatcacattcaggctcagctgattttggttctggcaggtccgcctgtgggcaggcttgaggtgctgtttattcccaacaagagatgtctggcaaccagccacctctctatgctactgtcagtcattgagaatatgcctggatccagcggccagtggccagcggcatgctcattccattcctcctttcgtctgggagctgaaattctcccaaagagggaagctgaccccaggcacagttcatagaggaaaggtggaatacatgttttactctttcctcttactcaccagttgtcaaaataatgatgagttggttttctagtgtcttccacatgtgaccagtgagttttttggtttactttttattgtaattatgaacgtatggatttaagcaacttgatgtgtgtctttccactggaatcactatgcttattctgtctgtggccagaggggctcatctggtctagccctgagagtccctgggcacgacactggtcgtctttgattccttgctttctggtgtgacaagatggatgtgctgctgctgtcgttgagtctgaatttgcaaaaacatttggccattagaagagtccatatgcaaattcacagatccagcttctctagaaaagtcagtgcccagccctaaaggccccatcccattgggcagcgggcgtgggagcttgggctgtgcgnn

SEQ ID NO: 23609 - DNA, 563 bp, Homo sapiens
  misc_feature 1, 2, 563: n = A,T,C or G
nngactgtgtttcaataaaactttatttacaaaaacaggtagtgggctggattggccaacttctgatgaatagcatttctttataaattctgaacatgagtactttaaaaaaatgtagcaaatatcttctactattatgtggttcatcttttccacctagtgtatcatatttttgatgaacagaatttcctgttttgatttttttaaaatagtaaacaagatttgctgatccttaatacctgcctgggtttatttcccatcttgtcttcagtatgatctaggccttctggaagttgaatgggggagcgtctaacaaatagctacctaatacctagacagatgacatcatctccgtgtgcaggtaggacattagatggtttctctagggaaacacagagaaaagtattgagagcaaggagtgctgttctgtgaggccgctgcttaccctatgtctgagcagtgctgcctaccaacacccaagaccctcaaggtccccagggaaggagtatttctcccacatagacactgggagtacttaccaggtttgatgggctgcctgttcn

SEQ ID NO: 23610 - DNA, 561 bp, Homo sapiens; identical to SEQ ID NO: 23556
  misc_feature 561: n = A,T,C or G

SEQ ID NO: 23611 - DNA, 390 bp, Homo sapiens; identical to SEQ ID NO: 21211

SEQ ID NO: 23612 - DNA, 2477 bp, Homo sapiens
  misc_feature 1, 2477: n = A,T,C or G
naccacgcgtccgcatagacagactggctattggtaatccagtcctgggagatgatcaggaggcagtactcaatcctactttcttctctacagcttcccatgggctaaagaatttacatgtctgcccacagcaaatgtactcaggcttctacactaacataagcccacggaaatgaaacagaaagggacagttcatatgtttctgaatagatccagttgaatagtctcattcaatttgagactgttgaacaactgttgttgttctacatacatttaaagtcagggcacatgcgtcactgcttatttttcttacttgacatattccctgcatttccatgtctgcctgtcctttagataaacagtaaaagtttcccatgtgccagtatttctcaaatggtttacatcagaatcacctggaggacttttaagctagattgtttggtcccatcccagggattctgaatcaacaggtttgcgatgggtccagatagtttacttttccaagtttactaacaagtttgccaagttcccccagtttattaccattagaccatacctttttgtccaatcatttaaaacaaatttttatataataagttttatttgtatgtaataaattttattatataaaaataagttttaatatatattatataaaaagttttaataaatacctaatatattatttaatatgataaaacttatattaaatgaaattttatgctgttctcttgtcaatctgtcttttgttatcttgctggtgtgcctgtcatgtgagggactgcaatctgatatgcctattttccacagtcaaagcaattacaagagaattgttacaattacccagttatgtcaagagatttttttttaattcactaaggtagagataaggagaatgtattaaaataggatattttaattataaatgcatgactggggagggggtattgtttttgaataaaatatgaggttatttgccatgacaaaaaaaaaaagaagtaggaaaatcccatggaaatttatgttccttctaacttttaaaactacctaaaaaatataattgatttaaattatatctcaatattccccattcttttatatccccttaaataggtacccatgaagagattatgaactacttgaaggtggagactgtacggtggtgtgttggagctggcttgtaatgtcttatgagtgacaatcgttagtttgaggaattttgtgagacagttgtcaaattgttgctagcttgaaatctgcggcaattggagtatttacaccatagaaatgctataagtgaagacctacctttcccttaagagctagttgttaaacctttaccagcataccactggaccttgtctaaaatttctttgtgttcccagtgtcttgcccagtagatacaagataaatattgccagaatcagatatcaggaagtagtaagaaaaggagttaatatgcaaactaaatcactcgctcaattgaataattgagatcttctgttcatttgttccttggaccttaatcatttgcattttggagaaaattttttctgctttaaaagtctgtaatttcagtttttgtgtcggggagagggaaaaactatttgtctgtagttgctttttgtgacaaagtgaatacccactgggctaagtttcatatctaaagcttgtcactaagaattttcatttttaggggtcaaaaacctattttgaaaatagtgttgtgtgaatgctgtaagtgttgtacatgtctctggtttcagaattaaaagaattcagagttaccttgtgagataaatgttctttgcttcatattcacagtttcacctccatttaaatttatggggaagaataaatgtttcctgactcagaaacaattttgcctccatatttcagtgcaaatatattttgaagttacttttaaatatttatttaaaacctctgtttctgtaactgtatgttaaacgtattcttctgtaatgagaatagactggaacatgtgagggaaaaatattaaaaaaaagatggcagtcatctagacatgtaaaatgccaagaatgtcttagaattgcacaatttagaatttatagagcctttaatcaccttgtctagcaccttgtattagtccattttcatgctgctgataaagacatacctgagattgggcaatttacaaaagaaagaggtttaatggacttacagttccacatgactaaggaggcctcacaatcatggtggaaggcaaagaggagcaagtcacatcttacatggatggcagcagacaaggagagagagcttgtgcagggaaactcccatttttaaaaccatcagatctcatgaggcttactatcacgagaacagcatgggaaagacctgcccccgtgattaaattatttcccaccaggcccctcccacaacatggaataatgggagatacaagatatttggtgaacacagagccaaccatatcaccn

SEQ ID NO: 23613 - DNA, 640 bp, Homo sapiens
caaatgagttggtttaatttcaggtgatacaaagtttagggtagaacaaggaccaaagaacagactctggcaagattctgagctggttttactttaaattcacagttatggtaggaatgacttagtgaaaacaactaaagagatgatgagccactgtaagatttttctttttttacaaaagtgttgtcttggagctgttgtacatttaagaataaacttaattccagctatacgtggcaaaaagtaagctgttccttgtgcctgaggagatggtgaccctttatttcatctgtatttaaacctctctattccctgccataacatcttttgccacgtatagctggaattaagtgttgtcttggagctgttgtacatttaagaataaacttttgtaaaaaaagaaaaatcttacagtggctcatcatctctttagttgttttcactaagtcgttcctaccataactgtgaatttaaagtaaaaccagctcagaatcttgccagagtctgttctttggtccttgttctaccctaaactttgtatcacctgaaattaaaccaactcatttgaaaggaaaaaaaaaaaaaaaaaaaaaaaaaaaaaaaaaaaaaaaaaaaaaaaaaaaaaaaaaaaaaaaaaaaa

SEQ ID NO: 23614 - DNA, 385 bp, Homo sapiens
attaattaacgcgggggagggaggtcacggcgtaaaggtgcagctgccgccaccgccgcttctgcaaggtctcagggacgggctgcagccatgtcctattgccggcaggaagggaaggatcgaatcatatttgtaaccaaagaagatcatgaaactccaagcagtgcagaattggtggctgatgaccccaacgatccatacgaggagcatggattgatactgccaaatggaaacattaactggaactgcccatgccttgggggaatggccagcggtccctgtggagaacagttaagtcagccttttcctgcttccactatagcacggagggagatcaaggggtcagactgtgtagaccagttccgggccatgcaggaatgcatgc

SEQ ID NO: 23615 - DNA, 2849 bp, Homo sapiens
  misc_feature 1, 2664: n = A,T,C or G
ngacgcatggtacttgcgcaaagacgacgcgcaggctgcgaaaacttaagggccggaccgcaggctgtgctcgcttccggaagtggcttctgcgacaacatgcttgcggacctcggcttaatcggaaccataggcgaggatgacgaggtgccggtggagcccgagtctgactccggggacgaggaagaggaggggcccattgtgctgggcagacgacaaaaagctttggggaagaaccgcagtgctgatttcaaccctgatttcgttttcactgagaaggaggggacgtacgatggcagctgggccctggctgatgtcatgagccaactcaagaagaagagggcagccactacattagatgagaagattgagaaagttcgaaagaaaaggaaaacagaggataaagaagccaagtctgggaagttggaaaaggagaaagaagcaaaggaaggctctgaaccaaaggagcaggaagaccttcaagagaatgatgaggaaggctcagaagatgaagcctcggagactgactactcatcagctgatgagaacatcctcaccaaagcagatacactcaaagtaaaggatcggaagaagaagaagaagaaaggacaggaagcaggaggattttttgaagatgcatctcagtacgatgaaaacctctcgttccaggacatgaacctttcccgccctcttctgaaggccattacagccatgggcttcaagcagcccaccccgatccagaaggcgtgcatacctgtgggtctattggggaaggacatctgtgcctgtgcagccactgggacaggtaaaactgccgcctttgccctgcctgttttggagcgtctgatttataaaccccgccaggctccagtcacccgcgtgctggtgctagtgcccacccgagagctgggcatccaggtgcactctgtcaccagacagctggcccagttctgcaacatcaccacctgcctggctgtgggcggcttggatgtgaagtctcaggaagcagctcttcgggcagcgcctgacatcctcatcgccaccccaggccggctcatcgatcacctccacaactgcccttccttccacctgagcagcatcgaggtgctcatcctggacgaggctgacaggatgctggatgagtactttgaggagcagatgaaggagatcatccgaatgtgttcccaccaccgccagaccatgctcttctcggccaccatgacagacgaggtgaaagatctggcttctgtctccttgaagaatcctgtccggatatttgtgaacagcaacacagatgtggctccctttctgcggcaggagttcatccggatccggcctaatcgtgaaggagaccgggaagccatcgtggcagctttgttgacgaggaccttcactgaccatgtgatgctgttcacgcaaaccaagaagcaggcccaccgcatgcacatcctcctggggctcatggggctgcaggtgggtgagctccatggcaacttgtcacagacgcagcggctggaggccctccggcgttttaaggatgaacagattgacatcctcgtggccactgatgtggcagcccgtggacttgacattgagggggtcaaaacggtaatcaacttcacaatgcctaataccatcaaacattatgtccaccgggtggggcgaacagcacgtgctggcagggctgggcgctcagtctctctggtgggagaagatgagcggaagatgctgaaggagattgtaaaagctgccaaggcccctgtgaaggccaggatacttccccaagatgtcatcctcaaattccgggacaagattgagaaaatggagaaagatgtgtatgcagttctgcagctagaggcggaggaaaaagagatgcagcagtcagaagcccagatcaatacagcaaagcggctcctggagaaggggaaggaggcagtggtccaagagcccgagaggagctggttccagaccaaagaagagaggaagaaggagaaaattgccaaagctctgcaggaatttgacttggccttaagaggaaagaagaaaaggaagaagtttatgaaggatgccaaaaaaaagggggagatgacagcagaggaaaggtctcagtttgaaatcctcaaggcgcagatgtttgctgaacggctagcgaagaggaatcgcagagccaagcgggcccgagcaatgcccgaggaggagccagtgagaggtcctgccaagaagcaaaagcaggggaagaaatctgtatttgatgaagaactcaccaacacaagcaagaaggccctgaaacagtatcgagctggcccttcctttgaagaaaggaaacagttgggcttgccccaccagagacgaggaggaaactttaaatctaaatccagatacaagaggaggaagtagctgtcgtggcctgaagaaattcatgggggcagcccttaaatcccttccctgtgggaagtcatcctggctggtctgtcttttctccatttgtttaaaaaaaaaacaaaaacaaaaaacaacactttggtgtggtggtatggtacgtagctattttcctaagcatgtctgtcaatctcccttcttgctgattagctttcatatgactatattaaatggaagtatttttgggaaaagagaaaaaaaaaaaaaaaaaaaaaaaaaaaaaantaggggggcgcccgcacttttttaaaaaaaaaaacccccccccccccccccaaaaccggaaaaaaaaaaaaaaaccccagtggggggaaaaatgttttttggccccttaaagggggaaaaaaaaaaccccccccccccaaaatttccaaaaaaaaaacttttttccccgggtttttttggggggg

SEQ ID NO: 23616 - DNA, 650 bp, Homo sapiens; identical to SEQ ID NO: 21165

SEQ ID NO: 23617 - DNA, 869 bp, Homo sapiens; identical to SEQ ID NO: 21180
  misc_feature 1, 2, 3, 820, 821, 822, 846, 867, 868, 869: n = A,T,C or G

SEQ ID NO: 23618 - DNA, 527 bp, Homo sapiens; identical to SEQ ID NO: 21254
  misc_feature 1, 2, 3, 521, 522, 523, 524, 525, 526, 527: n = A,T,C or G

SEQ ID NO: 23619 - DNA, 313 bp, Homo sapiens; identical to SEQ ID NO: 21174
  misc_feature 1, 311, 312, 313: n = A,T,C or G

SEQ ID NO: 23620 - DNA, 1677 bp, Homo sapiens
ctcggagacacgcggcggtgtcctgtgttggccatggccgactacctgattagtgggggcacgtcctacgtgccagacgacggactcacagcacagcagctcttcaactgcggagacggcctcacctacaaaccaggtggacctgacttctgctctgaccaagaaaatcactcttaagaccccactggtttcctctcccatggacacagtcacagaggctgggatggccatagcaatggcgcttacaggcggtattggcttcatccaccacaactgtacacctgaattccaggccaatgaagttcggaaagtgaagaaatatgaacagggattcatcacagaccctgtggtcctcagccccaaggatcgcgtgcgggatgtttttgaggccaaggcccggcatggtttctgcggtatcccaatcacagacacaggccggatggggagccgcttggtgggcatcatctcctccagggacattgattttctcaaagaggaggaacatgactgtttcttggaagagataatgacaaagagggaagacttggtggtagcccctgcaggcatcacactgaaggaggcaaatgaaattctgcagcgcagcaagaagggaaagttgcccattgtaaatgaagatgatgagcttgtggccatcattgcccggacagacctgaagaagaatcgggactacccactagcctccaaagatgccaagaaacagctgctgtgtggggcagccattggcactcatgaggatgacaagtataggctggacttgctcgcccaggctggtgtggatgtagtggttttggactcttcccagggaaattccatcttccagatcaatatgatcaagtacatcaaagacaaataccctaatctccaagtcattggaggcaatgtggtcactgctgcccaggccaagaacctcattgatgcaggtgtggatgccctgcgggtgggcatgggaagtggctccatctgcattacgcaggaagtgctggcctgtgggcggccccaagcaacagcagtgtacaaggtgtcagagtatgcacggcgctttggtgttccggtcattgctgatggaggaatccaaaatgtgggtcatattgcgaaagccttggcccttggggcctccacagtcatgatgggctctctcctggctgccaccactgaggcccctggtgaatacttcttttccgatgggatccggctaaagaaatatcgcggtatgggttctctcgatgccatggacaagcacctcagcagccagaacagatatttcagtgaagctgacaaaatcaaagtggcccagggagtgtctggtgctgtgcaggacaaagggtcaatccacaaatttgtcccttacctgattgctggcatccaacactcatgccaggacattggtgccaagagcttgacccaagtccgagccatgatgtactctggggagcttaagtttgagaagagaacgtcctcagcccaggtggaaggtggcgtccattagcctccattcgtatggagaagcgggctttctgaaaagggatccagcacaacctcctcggtttttttttcactaacacgtttcgcaacgacacaccaacatcgacacacaccccacacactcaccaccacccatgcacacactccggacacacactcacccccacatcgcca

SEQ ID NO: 23621 - DNA, 1717 bp, Homo sapiens
cgtccggttggagccgctgccgtcgccatgacccgtgagcaccgagcccccttctccttgcccttttctttccgttcaccctaaacaccaccggcgaggcgccggctttgaccttccgtagcttccctagcaaggcgtttctctgggcgcgctctgtagccaccctcacactcggtgcccggaaatcgagccctttgcccacggctacttcacgggaccaccctcccgggttaggcataggccctcccggatcttccgcggtgtaaggagaaggccagcgcccctgtgataggcccagagcccccactccacaagccagcccatcccccacggagacccaaaccgtccacacacaccttgccagctgtttgggccccacgccgccccaaaacacgcctccagctggccccttgggacctcccttctctagtccgtattttgacctggcccgtggcagattcgccactcccccctaccccaagcagcctgggcctcgatgggccgttgtcggggccccggagattgaagtggtgttggatcctgctgctggccgcgctggggtagaagggtcgccggtgtgtgggcagagcggcccccgcgtctcacctttaattttctttccttaggcggtaaccagcgtgagctcgcccgccagaagaatatgaaaaagcagagcgactcggttaagggaaagcgccgagatgacgggctttctgctgccgcccgcaagcagaggtagccccagggaggggagggaaagggacggtggagacctgggttagaccaagggttatagaaggaaagagagctacctcagggcttgaatgtggactagtcgtgaggagcagagtgcattgcttcctctagggttttatttcctccccaccctccaaattgttagctcacagccttacaggaaaggacgggggcgggcgcctgccctcagtctgatttctgagcgtccctgggtctgaccttaagggcaagggcagggagcttcacatttcaaatacagttgtggttacggcagcccagtacttttggccctccttgctgttcggttctcctcccttctcccaacctcctcactggtgttgctgggtgtggtcctcaatacagaatagagacccttgggcctgtgtcaccagacttctgaccccttgggcaacagccagatggagactggtcgccttttgagcctcagctctcttcctcttgttctcctagggtgggagtacagcagccaaacgctgaacttagtcccatccacttccatcttatcctttgtgcccttcatccccctgcatcttgtcctttttgccctctggtacctcccagtgccccatcatctctacccccagggactcggagatcatgcagcagaagcagaaaaaggcaaacgagaagaaggaggaacccaagtagctttgtggcttcgtgtccaaccctcttgcccttcgcctgtgtgcctggagccagtcccaccacgctcgcgtttcctcctgtagtgctcacaggtcccagcaccgatggcattccctttgccctgagtctgcagcgggtcccttttgtgcttccttcccctcaggtagcctctctccccctgggccactcccgggggtgagggggttaccccttcccagtgttttttattcctgtggggctcaccccaaagtattaaaagtagctttgtaattccaaaaaaaaaaaaaagggc

SEQ ID NO: 23622 - DNA, 575 bp, Homo sapiens; identical to SEQ ID NO: 21190
  misc_feature 1, 2, 575: n = A,T,C or G

SEQ ID NO: 23623 - DNA, 4742 bp, Homo sapiens; identical to SEQ ID NO: 21009
  misc_feature 1, 4740, 4741, 4742: n = A,T,C or G

SEQ ID NO: 23624 - DNA, 2653 bp, Homo sapiens
  misc_feature 1, 2, 2642, 2643, 2644, 2645, 2646, 2647, 2648, 2649, 2650,2651, 2652, 2653: n = A,T,C or G
nncgtccgatgcagccaagatgatgctgatcgtgaacatggtccaagggagcttcatggccactattgccgaggggctgaccctggcccaggtgacaggccagtcccagcagacactcttggacatcctcaatcagggacagttggccagcatcttcctggaccagaagtgccaaaatatcctgcaaggaaactttaagcctgatttctacctgaaatacattcagaaggatctccgcttagccattgcgctgggtgatgcggtcaaccatccgactcccatggcagctgcagcaaatgaggtgtacaaaagagccaaggcgctggaccagtctgacaacgatatgtccgccgtgtaccgagcctacatacactaagctgtcgacaccccgccctcacccctccaatcccccctctgaccccctcttcctcacatggggtcgggggcctgggagttcattctggaccagcccacctatctccatttccttttatacagactttgagacttgccatcagcacagcacacagcagcacccttcccctgaggccggtggggaggggacaagtgtcagcaggattggcgtgtgggaaagctcttgagctgggcactggccccccggacgaggtggctgtgtgttcacacacacacacacacacacacacacacacacacacacaggctctcgccccaggatagaagctgcccagaaactgctgcctggctttttttcttccgagcttgtcttatctcaaaccccttccagtcaaggaactagaatcagcaacgagagttggaagccttcccacagcttcccccagagcgaagaggctgtagtcatgtccccatcccccactggattccctacaaggagaggccttgggcccagatgagccagtacagactccagacagaggggcccttggggccctccaacctcaggtgatgagctgagaaagatgttcacgtctaagcgtccagtgtgcacccagcgctccatagacgcctttgtgaactgaaaagagactggcagagtcccgagaagatggggccctggctttccagggagtgcagcaagcagccggcctgcaggtgagcatggaggcccggccctcaccgcctcgaagccatgccccagatgccactgccacagcgggcgctcgctcctccctaggctgttttagtatttggatttgcattccatcccttgggagggagtcctcagggccactagtgatgagccaagaggagtgggggttgggggcgctcctttctgtttccgttaggccacagactcttcacctggctctgaagagccactcttacctcggtcccctcccagtggtcccaccttctccaccctgccctgccaagtcccctgcatgcccaccgctctccatcctccctcctctccctcttcctcccgtggagacagtatttctttctgtctgtccctttggcccagacccagcctgaccaacgatgagcatttcttaggctcagctcttgatacggaaacgagtgtcttcactccagccagcatcatggtcttcggtgcttcccgggcccggggtctgtcgggagggaagagaactgggcctgacctacctgaactgactggccctccgaggtgggtctgggacatcctagaggccctacatttgtccttggataggggaccggggggggcttggaatgttgcaaaaaaaaaagttacccaagggatgtcagttttttatccctctgcatgggttggattttccaaaatcataatttgcagaaggaaggccagcatttacgatgcaatatgtaattatatatagggtggccacactagggcggggtccttcccccctcacagctttggcccctttcagagattagaaactgggttagaggattgcagaagacgagtggggggagggcagggaagatgcctgtcgggtttttagcacagttcatttcactgggattttgaagcatttctgtctgaacacaaagcctgttctagtcctggcggaacacactgggggtgggggcgggggaagatgcggtaatgaaaccggttagtcaattttgtcttaatattgttgacaattctgtaaagttcctttttatgaatatttctgtttaagctatttcacctttcttttgaaatccttcccttttaaggagaaaatgtgacacttgtgaaaaagcttgtaagaaagcccctcccttttttctttaaacctttaaatgacaaatctaggtaattaaggttgtgaatttttatttttgctttgtttttaatgaacatttgtctttcagaataggattgtgtgataatgtttaaatggcaaaaacaaaacatgattttgtgcaattaacaaagctactgcaagaaaaataaaacacttcttggtaacaacgtatgtatttatatattatatatttatatataatatatattatatatttagcattgctgagctttttagatgcctattgtgtatcttttaaaggttttgaccattttgttatgagtaattacatatatattacattcactatattaaaattgtacttttttactatgtgtctcattggttcatagtctttattttgtcctttgaataaacattaaaagatttctaaacttnnnnnnnnnnnn

SEQ ID NO: 23625 - DNA, 570 bp, Homo sapiens
  misc_feature 150, 151, 152, 153, 154, 155, 156, 157, 158, 159, 160, 161,162, 163, 164, 165, 166, 167, 168, 169, 170, 171, 172, 173,569, 570: n = A,T,C or G
agatagggtttcactcctgtcacccaggctggagtgcagtggcacgatcttggctcactgcagcctccgtctcccacacttaagcgattctcctgtctcaacctcctgagtagctgggactacaggcacatgccactacatctggctaannnnnnnnnnnnnnnnnnnnnnnngaaaagacagggttttggcatgttgcctaggctagtctcaaactcctgagctcaagtgatctgcccaccttagcctcccaaagtgctgggattacaggtatgagacaccacacctggcctcaagtgctttttgacaggactgaacttcacatctactcatctcaatttcattcatcctcctacctagttattcatcctccttacctagttactcattccatctgccatcatagctttggttttagggaaaggggatttcacagttcttttgttccatcaacaaacaatatttactcttgaatggctcaaatttttctcacctttttataagcaggaattcccccttaaattgtctcagcccgtctttaagtcatgctgcctcaaaaatggagtacnn

SEQ ID NO: 23626 - DNA, 535 bp, Homo sapiens
  misc_feature 531, 532, 533, 534, 535: n = A,T,C or G
agggaatctcactctgtcgcccacgctgcagtgcagcagcatgatgtcggctcactgcaacctccacctctcgggttcaagtgattctcctgcctcagcctcctgagtagctggtattataggcgtgcgccaccacaccctgctaatttttgtatttttagtaaagatggggtttcaccatgttggtcagtctggtctcgaactcccgaccttgtgatctacctgccccatcctcccaaagtgctgggattataggcctgagccaccgcaccggtctctccttctcttttaagctctggtcccaaactgctacccgcttccccagccaggcctccccctgagcagacacactgaccaagagaagcctccacctactgcctggacatgcaaaccctgccgcagcccaaggccttggagagctagagttatgcttccggccaacgctgaacccttcttagcttagaccggggtaacttggggatcttttgaaaggaaaggattcttagatgctcaagaaaattccagtttgannnnn

SEQ ID NO: 23627 - DNA, 557 bp, Homo sapiens; identical to SEQ ID NO: 21245
  misc_feature 1, 2, 3, 4, 5, 6: n = A,T,C or G

SEQ ID NO: 23628 - DNA, 440 bp, Homo sapiens
  misc_feature 436, 437, 438, 439, 440: n = A,T,C or G
attaattaacggcgggggataaagttaaggtgtagagtatttattaggttatttggcttgtttgtttgtttatgcaaatcatgttaggttgttatcagcttaaaataatgggttataagatagtatgttctggcctcatggtaacctcaaaccaaaatacatacaatggatacacgaaagataaaaagcaagaaactaaatcatgtcttcagagaaaatcatcttcactaaaaggaagacagaaaggaaagaaataaggaagagaagatcacaaaacaactggaaaagaaataacaaaacggcaggagtaaatccttatttatgaacaataatatggaatgtaaatcaactaaatctccaatcaaaacacagactggctgaatgaatttaaaaaaaaaaaacataatctgttgcctccaagaaacacacttaaccnnnnn

SEQ ID NO: 23629 - DNA, 545 bp, Homo sapiens; identical to SEQ ID NO: 21184
  misc_feature 1, 2, 37, 542, 543, 544, 545: n = A,T,C or G

SEQ ID NO: 23630 - DNA, 545 bp, Homo sapiens; identical to SEQ ID NO: 21184
  misc_feature 1, 2, 37, 542, 543, 544, 545: n = A,T,C or G

SEQ ID NO: 23631 - DNA, 1389 bp, Homo sapiens
cgccgaggcaggcgcgcggcgggcaagcctgggagggggcgggtccgcgcgggcttcggaggagcccgccctgccagaggagagggaggtcacggcgtaaaggtgcagctgccgccaccgccgcttctgcaaggtctcagggacgggctgcagccatgtcctattgccggcaggaagggaaggatcgaatcatatttgtaaccaaagaagatcatgaaactccaagcagtgcagaattggtggctgatgaccccaacgatccatacgaggagcatggattgatactgccaaatggaaacattaactggaactgcccatgccttgggggaatggccagcggtccctgtggagaacagtttaagtcagccttttcctgcttccactatagcacggaggagatcaaggggtcagactgtgtagaccagttccgggccatgcaggaatgcatgcagaaatacccagacctctatccccaagaggatgaggatgaggaagaggaaagagagaagaagccagcagaacaagcagaagaaacagctcccattgaggccactgcaaccaaagaagaggagggatcaagttaatgaaggccacaaggcactgggcaccagtccttttggagtggaccttttgcaaaaggccttgtcatcaccttccaagaaagtttccttctgttgtcctgtgcattataatatacaaaataacttattttgatgatcagaggtcttgaggtcttgacatcttgacatatacactgaaaaaaatgggggttgtatgtatgtgtgtcctacccaaacctgtggccgccacttttgaattctcagattgccctgaattttgccacttttaaataatgtgctgaataagctcagcaactaaaaaccattacccaagaacgtttcttgtgagtgagctgatttattctgattcattatattccttttggtagattttataccccttggggaaataatacaacaaaaacatctcttaaaaatgctgggatggggccatatctactagcagaggccagatggtcagatatgatttctgcaaacccatcttgaccttgagtatgtgaaggggtactgtactttattcctgatacattttggtttccatgtaggtgttgagctcctggttttctgtgtttggatgatgaagatttggacccttccattcataatccctttctaagtgaagggagaggctggcttggctgttccttgttattccgaaagccctggtttggggcccatgttcacactggctctcagtctagtcaggtgcaatgttcttgagaggtggggacctaattattaccagagtagcagcaagagaggaaacgttgtgaattaagtattcaattaaaaggaaacatgatttcta

SEQ ID NO: 23632 - DNA, 650 bp, Homo sapiens; identical to SEQ ID NO: 21165

SEQ ID NO: 23633 - DNA, 1044 bp, Homo sapiens
ctatggagtcttgccatattgcccaggctggtcttgaactcctgggctcaagcgatcctcctgcctcagtcccctaaagtgctgggattacaggcgtgagccaccacactcggccgaggttcatttttctcatgtgaaagacttgacattcatctctgcccacactttgatcatatcagaaaacaacctgtgcagccgctttctgattgctgaagccgcttcattcttcctcagcaggacccatgtctcggacataggaatccggccgctgcatcttcaccttttttcccgtactggtatctatccaggtgtcggacccgtagatcatagtgataggcacatcttttcgaatcaagtgaattcgctccagcatagggcgccgggcccagccaaaggactccatcatggctttgaatgctgtctcaccactgggattctgtgcgttgcagtggtaaatatactctgatatggtatcatcttcaaagaagtctgcaaacttgcgtttgaagtccggccggaatcgctgcaccagaccaggccctatcagggtacttgattgagtaagaagtggccaggaatcctcccaaactgtgccccaggaggatcatgctggggatccccatggtctcccgccatgtctctatcgatgtcacaaactcatcctcagccccctccgggtcccttgggaatgctggccttgagcttcgcccgaagccaagcagatcgaaggtgtgcagtgtgcggcgggcactcagtgagtccatgttgaggatccagagacccacgccgcccccaaaaccatgcaccatcaccaagggggtgcggtcgttttgctcggggctcacagtcaccgtccagatcttattctggtttgggagggatacttatctggccaggaacttattctggagacactggaggatcctggcttccacattcttcagctgagacatggaagtggggcgccacgtgggcagccagctactcagccagccttgagactgctgctccacccacgcgtccgcccacgcgtccgcggacgcg

SEQ ID NO: 23634 - DNA, 313 bp, Homo sapiens; identical to SEQ ID NO: 21174
  misc_feature 1, 311, 312, 313: n = A,T,C or G

SEQ ID NO: 23635 - DNA, 650 bp, Homo sapiens; identical to SEQ ID NO: 21165

SEQ ID NO: 23636 - DNA, 545 bp, Homo sapiens; identical to SEQ ID NO: 21184
  misc_feature 1, 2, 37, 542, 543, 544, 545: n = A,T,C or G

SEQ ID NO: 23637 - DNA, 814 bp, Homo sapiens
  misc_feature 1: n = A,T,C or G
ngtgctgcaaggcgattaagttgggtaacgccagggttttcccagtcacgacgttgtaaaacgacggccagtgaattgtaatacgactcactatagggcgaattgggtaccgggccccccctcgagtttttttttttttttttagtgtttgtagcgccactttactgccaatagctgacattgccctgggttaggggagaataaatataatctgtggcatcagacaggtattgccgaggcgaagagtggactgggctttcgtgggcacttaccctgggaagggggtatgaggtggctggagaagtgttcatggagagtgtctctctcctgcccccaaggccgcggaatcttctattctttctttgtacccaaagggcaaagtggaggccagggtctctttgctaagaagctaagtaggggaaagaggcagggggagctcccagcaggaccaaagggagaccaaggtttggaccccagaacagagcaggaacccagagtcctgtgcagtcacaggatgaccgcagggagggcggctgttggtgatcttttctagggtttctccattactggctcttcggatggcctcaatgagatctttctcatagggaaagcccccattctccagcttggagaacaccagctgtccatttatctctatctcaaaggcacccagcaggtgttctgcgagcctcacctgtgcccccgaggcgcgactcgatctcgatgcccggatgctgctccttcaccgcactggccagctccaggtaggtcgcacgaagccccccgcgttgattaattctagaagtactataat

SEQ ID NO: 23638 - DNA, 440 bp, Homo sapiens; identical to SEQ ID NO: 23628
  misc_feature 436, 437, 438, 439, 440: n = A,T,C or G

SEQ ID NO: 23639 - DNA, 650 bp, Homo sapiens; identical to SEQ ID NO: 21165

SEQ ID NO: 23640 - DNA, 313 bp, Homo sapiens; identical to SEQ ID NO: 21174
  misc_feature 1, 311, 312, 313: n = A,T,C or G

SEQ ID NO: 23641 - DNA, 650 bp, Homo sapiens; identical to SEQ ID NO: 21165

SEQ ID NO: 23642 - DNA, 2407 bp, Homo sapiens; identical to SEQ ID NO: 21308
  misc_feature 1, 2383, 2384, 2385, 2386, 2387, 2388, 2389, 2390, 2391,2392, 2393, 2394, 2395, 2396, 2397, 2398, 2399, 2400, 2401,2402, 2403, 2404, 2405, 2406, 2407: n = A,T,C or G

SEQ ID NO: 23643 - DNA, 1044 bp, Homo sapiens; identical to SEQ ID NO: 23633

SEQ ID NO: 23644 - DNA, 1072 bp, Homo sapiens
  misc_feature 403, 414, 425, 460, 513, 1061, 1062, 1063, 1064, 1065, 1066,1067, 1068, 1069, 1070, 1071, 1072: n = A,T,C or G
attaattaaggcggggggatggtaaaatgtcacttgcgagtaacaggatccataggcagaacctgtggagcaagaaagtttgctaataaaattttgtttaccctaacataggttcttcatggagagcagtacttagagttatataaaccacttcccagagcaggaaaattaaaatgtgaagcagttgttgctgatgtcctagataaaggatccggtgtagtgattattatggatgtctattcttattctgagaaggaacttatatgcaccaatcagtctctcttctttctggttgctcttggaggctttggtggaaacggacatcagacaaagtcaaagtagctgtagcatacctaatagacctcctgatgctgtactacagatacacctctcttaatcaggntgctttgtacngcctcagtgangactggatcccttacacattgatcctaacttgctnagtctagcaggttttgacaagcccatataacatggattatgtacatttggatnttctgcaggcggtgtgttacagcagtttgcagataatgatgtgtcaagattcaaggcagttaaggctcgttttgcaaaaccagtatatccaggacaaactctacaaactgagatgtggaaggcattctttagtggcaggctgaaggccagagggaacatcatgctgagccagaaacttcagatgattcttaaagactacgccaagctctgaagggcacactacactattaataaaaatggaatcattaaatactctcttcacccaaatatgcttgattattctgcaaaagtgattagaactaagatgcaggggaaattgcttaacattttcagatatcagataactgcagattttcattttctactaatttttcatgtatcattatttttacaaggaactatatataagctagcacataattatccttctgttcttagatctgtatcttcataataaaaaaattttgcccaagtcctgtttccttagaatttgtgatagcattgataagttgaaaggaaaattaaatcaataaaggcctttgataccnnnnnnnnnnnn

SEQ ID NO: 23645 - DNA, 650 bp, Homo sapiens; identical to SEQ ID NO: 21165

SEQ ID NO: 23646 - DNA, 545 bp, Homo sapiens; identical to SEQ ID NO: 21184
  misc_feature 1, 2, 37, 542, 543, 544, 545: n = A,T,C or G

SEQ ID NO: 23647 - DNA, 544 bp, Homo sapiens
  misc_feature 1, 2, 3, 4, 5, 6, 7, 8: n = A,T,C or G
nnnnnnnnctgttctccaggaccgcatggaagaaggactcaataggaagcagggtgtaggagtagaactgtttcatcttggtcaccagatcgtctgtggagaaggtgacatattctacaaacctccggttcagcaggaaccagtccgaaccgccatccacggcaatgcccttctgggatccgtcgatctcccaggcgccacatgtgagcgtcgcactccaggaagagccgatccaggccctgcttccgaatgaaccttgcattgtcccggccgtgtgacttcaagaaattcatatctcggtatcgggagagaaacgccaccaactggtcatttgtcctgatggggtagtcggccgcactcaggttgatgaagaagtcccagggccagtcggtcatctccaggaggtcccgcatgctctgcaggtaggtggacaggaggctggctcctccaatgacttcaagccgcaggacttccaccgcttccaccagacagcccggcctaccttctttgcccgcgtcccgcgttaattaattctagaagtact

SEQ ID NO: 23648 - DNA, 539 bp, Homo sapiens
  misc_feature 1, 2, 3, 4, 129, 130, 131, 132, 133, 134, 135, 136, 137,138, 139, 140, 141, 142, 143, 144, 145, 146, 147, 148, 149,150, 151, 152, 153, 154, 155, 156, 157, 158, 159, 160: n = A,T,C or G
nnnngcctatagtcccagctactcgggaggctgacgcagaattgggttgaacccagaaggcagaggttgcagtgagccgagatcatgacactgcactccagcctgggcgacagagcaagactgtgtctnnnnnnnnnnnnnnnnnnnnnnnnnnnnnnnnggcgaacaagagacacacacagaccacagcctggttgttaagactgggggtgggcgcacaaggcagtggtaattgggccgggggttctttctagggtgatggaaattcgaaaatggaatctgaggatagctgcctatatccgtaaatatgtgaatatgctgaaaaaccattgactcgtgcactttaaatgactggatttgtatggtacataaaactgtatctcgataacaccttctcaaaaagaataaatgcagtggctcacacctgtaatcccagcactttgggaagcaaaggagggccaatcacctgagatcaggagttcgagaccagcctgaccaacatggtgaaaccccatctcgactaaaaatacaaaagtagc

SEQ ID NO: 23649 - DNA, 2505 bp, Homo sapiens; identical to SEQ ID NO: 21198
  misc_feature 1, 2, 3, 4, 5, 2505: n = A,T,C or G

SEQ ID NO: 23650 - DNA, 544 bp, Homo sapiens; identical to SEQ ID NO: 23647
  misc_feature 1, 2, 3, 4, 5, 6, 7, 8: n = A,T,C or G

SEQ ID NO: 23651 - DNA, 313 bp, Homo sapiens; identical to SEQ ID NO: 21174
  misc_feature 1, 311, 312, 313: n = A,T,C or G

SEQ ID NO: 23652 - DNA, 650 bp, Homo sapiens; identical to SEQ ID NO: 21165

SEQ ID NO: 23653 - DNA, 587 bp, Homo sapiens; identical to SEQ ID NO: 21164
  misc_feature 1, 581, 582, 583, 584, 585, 586, 587: n = A,T,C or G

SEQ ID NO: 23654 - DNA, 1113 bp, Homo sapiens; identical to SEQ ID NO: 23522
  misc_feature 1, 2, 1112, 1113: n = A,T,C or G

SEQ ID NO: 23655 - DNA, 771 bp, Homo sapiens; identical to SEQ ID NO: 21166
  misc_feature 1, 2, 3, 754, 770, 771: n = A,T,C or G

SEQ ID NO: 23656 - DNA, 869 bp, Homo sapiens; identical to SEQ ID NO: 21180
  misc_feature 1, 2, 3, 820, 821, 822, 846, 867, 868, 869: n = A,T,C or G

SEQ ID NO: 23657 - DNA, 569 bp, Homo sapiens; identical to SEQ ID NO: 21176
  misc_feature 563, 564, 565, 566, 567, 568, 569: n = A,T,C or G

SEQ ID NO: 23658 - DNA, 650 bp, Homo sapiens; identical to SEQ ID NO: 21165

SEQ ID NO: 23659 - DNA, 313 bp, Homo sapiens; identical to SEQ ID NO: 21174
  misc_feature 1, 311, 312, 313: n = A,T,C or G

SEQ ID NO: 23660 - DNA, 869 bp, Homo sapiens; identical to SEQ ID NO: 21180
  misc_feature 1, 2, 3, 820, 821, 822, 846, 867, 868, 869: n = A,T,C or G

SEQ ID NO: 23661 - DNA, 563 bp, Homo sapiens; identical to SEQ ID NO: 23609
  misc_feature 1, 2, 563: n = A,T,C or G

SEQ ID NO: 23662 - DNA, 329 bp, Homo sapiens
  misc_feature 329: n = A,T,C or G
ccccaagagaagatgccattttcatcacaacatgtttacatactcaaggtaggaacttcaacactttgctccttctgaccatacccatttacataaacatatgcagggctcccctggcctgccggcagctatccacaccagaaagaggaaaaggtagactggtaagactcaggctttcaagttatttcaaaaccaatagcaaagtaagacctgaggtacatatagtttgaatttaggcttttgaatgccttttaagaaagttttgaaatcaaattaatacaagcacgtgggcaaaacatgtatgtgtgctgtttttggccattgttgcn

SEQ ID NO: 23663 - DNA, 869 bp, Homo sapiens; identical to SEQ ID NO: 21180
  misc_feature 1, 2, 3, 820, 821, 822, 846, 867, 868, 869: n = A,T,C or G

SEQ ID NO: 23664 - DNA, 2822 bp, Homo sapiens; identical to SEQ ID NO: 22232
  misc_feature 1, 2777, 2778, 2779, 2780, 2781, 2782, 2783, 2784, 2785,2786, 2787, 2788, 2789, 2790, 2791, 2792, 2793, 2794, 2795,2796, 2797, 2798, 2799, 2800, 2801, 2802, 2803, 2804, 2805,2806, 2807, 2808, 2809, 2810, 2811, 2812, 2813, 2814: n = A,T,C or G
  misc_feature 2815, 2816, 2817, 2818, 2819, 2820, 2821, 2822: n = A,T,C or G

SEQ ID NO: 23665 - DNA, 440 bp, Homo sapiens; identical to SEQ ID NO: 23628
  misc_feature 436, 437, 438, 439, 440: n = A,T,C or G

SEQ ID NO: 23666 - DNA, 557 bp, Homo sapiens; identical to SEQ ID NO: 21209
  misc_feature 556, 557: n = A,T,C or G

SEQ ID NO: 23667 - DNA, 545 bp, Homo sapiens; identical to SEQ ID NO: 21184
  misc_feature 1, 2, 37, 542, 543, 544, 545: n = A,T,C or G

SEQ ID NO: 23668 - DNA, 1866 bp, Homo sapiens; identical to SEQ ID NO: 21250
  misc_feature 1, 2, 168, 1861, 1862, 1863, 1864, 1865, 1866: n = A,T,C or G

SEQ ID NO: 23669 - DNA, 650 bp, Homo sapiens; identical to SEQ ID NO: 21165

SEQ ID NO: 23670 - DNA, 313 bp, Homo sapiens; identical to SEQ ID NO: 21174
  misc_feature 1, 311, 312, 313: n = A,T,C or G

SEQ ID NO: 23671 - DNA, 499 bp, Homo sapiens; identical to SEQ ID NO: 21187
  misc_feature 1, 2, 3, 8, 12, 13, 15, 24, 25, 28, 31, 497, 498, 499: n = A,T,C or G

SEQ ID NO: 23672 - DNA, 1717 bp, Homo sapiens; identical to SEQ ID NO: 23621

SEQ ID NO: 23673 - DNA, 6616 bp, Homo sapiens
  misc_feature 1, 2: n = A,T,C or G
nnggtttatcaacttgacgagaatcatttcaaaattttaggaaaaaaatttatgtctcagtaaaactttgtttagaattaggtttttcagtagcaaggataaggtgaagggattaaaaatgtacgtaaaattagtagtcaatgaattctggaatgcagtctgtataatcctattcagagattatgctatttactgaatatagctttggttgtgtttaaatctgcactagtattaggtgctccttaaaagttgaaaatatatagccaataaggtataaagaagaattgacagataaatctaaacagtttctttgtatagtactaacttctgaaatgttcagtggtggcatttgataaagtaagttgtaatatgatcacattgaggaatgttatataattattaaactcaatttttataaaaggcatcattttataaaagtatcataagaaagtgccaatgtttcaatgaataaattgaggcaacatgataccaacttagtgaaaaatatacaagaccagaaggaagtaacctaaaatattactagtgattgcctctgggtaataggatatgggctttttgtctttctatatttttcattttcccactgccgtgttcctggtacctcagtgaaatgaagtgctcagttcttttaacagttgtcagtttttaaaacaaatatagtcttctggaaatgttttagggtagcatttttccatttttatggtttttaagccatctcttggaatttgaataaattatttgaactggcataaatatttgcaatcccattgagaacaccaaaacaaaaagtaaaaagcagaaacctaaatttttctaaattttttttaatatctagaagttgtatctcaaagtttttgtaattttcttcattgtcagattttattttttactgtcaaatatccaatgacagaggccacctcttttaaaatagaaactttaaatggaaatatacattatactaagtcttatattttatagccttgaaagtttctattcatgtaattaagctttttctgatttttagaggaacagaaagaaagtgaaaagatgaaaagtgaggagcagcctatggatttagaaaaccgttctacagccaatgttctagaagagactactgtgaaaaaagaaaaagaagatgaaaaggaacttgtgaaactgccagtcatagtgaagctagaaaaacctttgccagaaaatgaagaaaaaaagattatcaaagaagaaagtgattccttcaaggaaaatgtcaaacccattaaagttgaggtgaaggaatgtagagcagatcctaaagataccaaaagtagcatggagaagccagtggcacaggagcctgaaaggatcgaatttggtggcaatattaaatcttctcacgaaattactgagaaatctactgaagaaactgagaaacttaaaaatgaccagcaggccaagataccactaaaaaaacgagaaattaaactgagtgatgattttgacagtccagtcaagggacctttgtgtaaatcagttactccaacaaaagagtttttgaaagatgaaataaaacaagaggaagagacttgtaaaaggatctctacaatcactgctttgggtcatgaagggaaacagctggtaaatggagaagttagtgatgaaagggtagctccaaattttaagacagaaccaatagagacaaagttttatgagacaaaggaagagagctatagcccctctaaggacagaaatatcatcacggagggaaatggaacagagtccttaaattctgtcataacaagtatgaaaacaggtgagcttgagaaagaaacagcccctttgaggaaagatgcagatagttcaatatcagtcttagagatccatagtcaaaaagcacaaatagaggaacccgatcctccagaaatggaaacttctcttgattcttctgagatggcaaaagatctctcttcaaaaactgctttatcttccaccgagtcgtgtaccatgaaaggtgaagagaagtctcccaaaactaagaaggataagcgcccaccaatcctagaatgtcttgaaaagttagagaagtccaaaaagacttttcttgataaggacgcacaaagattgagtccaataccagaagaagttccaaagagtactctagagtcagaaaagcctggctctcctgaggcagctgaaacttctccaccatctaatatcattgaccactgtgagaaactagcctcagaaaaagaagtggtagaatgccagagtacaagtactgttggtggccagtctgtgaaaaaagtagacctagaaaccctaaaagaggattctgagttcacaaaggtagaaatggataatctggacaatgcccagacctctggcatagaggagccttctgagacaaagggttctatgcaaaaaagcaaattcaaatataagttggttcctgaagaagaaaccactgcctcagaaaatacagagataacctctgaaaggcagaaagagggcatcaaattaacaatcaggatatcaagtcggaaaaagaagcccgattctccccccaaagttctagaaccagaaaacaagcaagagaagacagaaaaggaagaggagaaaacaaatgtgggtcgtactttaagaagatctccaagaatatctagacccactgcaaaagtggctgagatcagagatcagaaagctgataaaaaaagaggggaaggagaagatgaggtggaagaagagtcaacagctttgcaaaaaactgacaaaaaggaaattttgaaaaaatcagagaaagatacaaattctaaagtaaaaaacccaaaggcaaagttcgatggactggttctcggacacgtggcagatggaaatattccagcaatgatgaaagtgaagggtctggcagtgaaaaatcatctgcagcttcagaagaggaggaagaaaaggaaagtgaagaagccatcctagcagatgatgatgaaccatgcaaaaaatgtggccttccaaaccatcctgagctaattcttctgtgtgactcttgcgatagtggataccatactgcctgccttcgccctcctctgatgatcatcccagatggagaatggttctgcccaccttgccaacataaactgctctgtgaaaaattagaggaacagttgcaggatttggatgttgccttaaagaagaaagagcgtgccgaacgaagaaaagaacgcttggtgtatgttggtatcagtattgaaaacatcattcctccacaagagccagacttttctgaagatcaagaagaaaagaaaaaagattcaaaaaaatccaaagcaaacttgcttgaaaggaggtcaacaagaacaaggaaatgtataagctacagatttgatgagtttgatgaagcaattgatgaagctattgaagatgacatcaaagaagccgatggaggaggagttggccgaggaaaagatatctccaccatcacaggtcatcgtgggaaagacatctctactattttggatgaagaaagaaaagaaaataaacgaccccagagggcagctgctgctcgaaggaagaaacgccggcgattaaatgatctggacagtgatagcaacctggatgaagaagagagcgaggatgaattcaagatcagtgatggatctcaagatgagtttgttgtgtctgatgaaaacccagatgaaagtgaagaagatccgccatctaatgatgacagtgacactgacttttgtagccgtagactgaggcgacacccctctcggccaatgaggcagagcaggcgtttgcgaagaaagaccccaaagaaaaaatattccgatgatgatgaagaggaggaatctgaggagaatagtagagactctgaaagtgacttcagtgatgattttagtgatgattttgtagaaactcggcgaaggcggtcaaggagaaatcagaaaagacaaattaactacaaagaagactcagaaagtgacggttcccagaagagtttgcgacgtggtaaagaaataaggcgagtacacaagcgaagactttccagctcagagagtgaagagagctatttgtccaagaactctgaagatgatgagctagctaaagaatcaaagcggtcagttcgaaagcggggccgaagcacagacgagtattcagaagcagatgaggaggaggaggaagaggaaggcaaaccatcccgcaaacggctacaccggattgagacggatgaggaggagagttgtgacaatgctcatggagatgcaaatcagcctgcccgtgacagccagcctagggtcctgccctcagaacaagagagcaccaagaagccctaccggatagaaagtgatgaggaagaggactttgaaaatgtaggcaaagtggggagcccattggactatagcttagtggacttaccttcaaccaatggacagagccctggcaaagccattgagaacttgattggcaagcctactgagaagtctcagacccccaaggacaacagcacagccagtgcaagcctagcctccaatgggacaagtggtgggcaggaggcaggagcaccagaagaggaggaagatgagcttttgagagtgactgaccttgttgattatgtctgtaacagtgaacagttataagactttttttccatttttgtgctaatttattccacggtagctctcacaccagcgggccagttattaaaagctgtttaatttttcctagaaaactccactacagaatgacttttagaagaaaaatttcaacaaatcctgaagtctttctgtgaagtgaccagttctgaactttgaagataaataattgctgtaaattccttttgattttctttttccaggttcatggtccttggtaatttcattcatggaaaaaaatcttattataataacaacaaagatttgtatatttttgactttatatttcctgagctctcctgactttgtgaaaaagggtggatgaaaatgcattccgaatctgtgagggcccaaaacagaatttaggggtgggtgaaagcacttgtgctttagctttttcatattaaatatatattatatttaaacattcatggcatagatgatgatttacagacaatttaaaagttcaagtctgtactgttacagtttgagaattgtagataacatcatacataagtcatttagtaacagcctttgtgaaatgaacttgtttactattggagataaccacacttaataaagaagagacagtgaaagtaccatcataattaacctaaatttttgttatagcagagtttcttgtttaaaaaaaaataaaatcatctgaaaagcatttgtacagtaaaatgtataatgaagctttgccaaccagactgtgctagcaacaaatttttttaaataagctttatgcagtggtaataaggtggcctcaaatatattgtgtctgatggagagttattagtgaaatgaatgtggtctttcttaaggcctgggtggactgtaaactttgccaatagtataactcttgtcttctggccacttgatgtttaaatatctgaaatatcattttgaaaaaaatacatctatatataacatacatgaagagatgctaagctgacagtgatattttagcacatttgaagactgggaagagattttcaggtgaattttaactggtctattcttgcccttagtatctacttcaaattgaagtctacaaacaaagcagttccttgggaggtttttagttgagtttagcgtgtgtgtgttgtggggtgtgtgccgtgtgcgtgtgtgtgtgtgttgggaattcctatctgcctggatatattagcaaagttgaatgttttggccttggccataactttctttaaatccttattgtctaccccacatgagttgtggaaccggcgaaaaagggggcccttacactcaccatttcccaaacatctcaacactttaaagaaaagccctttgacgcaagaaaaaagggtttgtaactaactaaatacctaacatgtaattgacactaaaatatgaactttgtcttatttagtttctgttatagctgtaaaatttcaggcagagccataacattgtacagagtgtagcacttgtgattaaacctagcctgttaaatcctgaaaccttcaaccattacttctgtgaatactttagccctgggatttgggtttttctgttccggtgttgtgtctgttgccggcaatggacacaccatatctgctgctggcccaaggaacgtcattaatttttctttccaaattaagtattatgtgctagtcagtgtatagtaaagcacttctcttttttattactaaaaagctggcattagatttgcattataaatacctctctaggaactttatactccttttccttcttcaacaggtattgcccttaaatcttatcttttggccttgaaagtttatagctattgtttttcagttgttcgttgttttgttttgtttcactttagttctgtagtacctgcccattaatatttttgctttgattctagcaatgtgtatgtatctgtataaaaaataaaataatgaaagcaacctaaaaataggatgcaccaatagcaaaaaaaaaaaaaaaaaaaagtg

SEQ ID NO: 23674 - DNA, 430 bp, Homo sapiens
  misc_feature 428, 429, 430: n = A,T,C or G
ggagagaagcattcatgcaggctgcagagaaagcacttgctagagaaattttcataactataagggagcaaaaaactaatagccaagaccatgggataaagacctggaaagcatttatcctatttattcatttgttgctcatttattttttgtttattttattggaatataagctctataaaataaaatggacctgctgctcttgcgtatcactgtatgtcaagaagttatcatacagtatgaggcagagtgggcactaaacaaatgtttattttgatgaggaaaagatggataaattgatgacaaaggtgtgacatatttcttgtacaaaaaaaaaagaacaccttggggcactaaaagtatagaaaaattgctaagaagccagaagggggaatttaattaaaattaattaattctagaagtactcnnn

SEQ ID NO: 23675 - DNA, 869 bp, Homo sapiens; identical to SEQ ID NO: 21180
  misc_feature 1, 2, 3, 820, 821, 822, 846, 867, 868, 869: n = A,T,C or G

SEQ ID NO: 23676 - DNA, 1026 bp, Homo sapiens
ggcgatgtcgcgtgccatgtgctgttttagccctttacgtgtaagatacaccacagcctgtgagtaagcatttgctttgtagattaggaaaccaaggaacatgcagtaaataactggcctagagtcacacagttaagctggaagttggaccttggcatgtgactccaaagccctgcctgaagcgctgctcctcccctccttgcaagcagagacctgccacacagagcccacagaggtctgaagaaggcaggatttcctgttcgtagctcaggagagcagacagtggtgttaagcaggaaaagcacattagaattccagtttacttacagtgctctccacaccaggaaggaaatgccccaaatatgaacatggcttccactaagataaatggccccaatctaggggattcccatttgcatcagaaaaactgttaatctagagatcagagtttttacctgctacatctttcatattttctttccttaggttaaaaagatcaagtggcatgagcagccttttggggaaaattggtgccaagaagcagaaaatgagcacccttgagaagtccaaactggactgggagagcttcaaggaggaagaggggattggtgaagaactggccatccataatcgagggaaagaggggtacattgaacggaaagccttcctcgaccgagtggatcacaggcagtttgaaattgagcgagatctcaggctgagcaaaatgaaaccttgatgttacgggctaaatcaagagcagcttaatcctgtttacaatgtgagctttttgtgcgtctgtgaaatgttttacagtgtttctcatcatctgtttcccagcaaggtctttttttttctacattgaagttctgtctatgtatcttaatcacaaatggtttcattcactttacttttaaaaatttgtccttaaatgaataaataaaataaaagttggtcctgtgagaggataatgaagactaaaaaaaaacagccttggacaatagaacagcacgtacctcggccgccacc

SEQ ID NO: 23677 - DNA, 650 bp, Homo sapiens; identical to SEQ ID NO: 21165

SEQ ID NO: 23678 - DNA, 1183 bp, Homo sapiens
  misc_feature 1001, 1002, 1182, 1183: n = A,T,C or G
ccggcaagagacccatctggaaaggttcctggaatgggttagggaccccttaccgggtaaaacggtcccgttgaatgccagaaaaaaacccagggccaccgtctctttctagtgaattccctagcctaatcttatctcttaaagacctctcttttcaggatggtgcactctcagcctcgtgccgaattcggcacgagctcgcttccggctgcgccggatgctgtttcctttccgctcccaggggcgttgggaacggttgtaggacgtggctctttattcgtgagttttccatttacctccgctgaacctagagcttcagacgccctatggcgtccgcctcgacccaaccggcggccttgagcgctgagcaagcaaaggtggtcctcgcggaggtgatccaggcgttctccgccccggagaatgcagtgcgcatggacgaggctcgggataacgcctgcaacgacatgggtaagatgctgcaattcgtgctgcccgtggccacgcagatccagcaggaggttatcaaagcctatggcttcagctgcgacggggaaggtgtccttaagtttgctcgcttggtcaagtcctacgaagcccaggatcctgagatcgccagcctgtcaggcaagctgaaggcgctgtttctgccgcccatgaccctgccaccccatgggcctgctgctggtggcagcgtggccgcctcctgagagttggccctcccttgtgccactgccaggggaggaaaggccttgatgttccagacaataataaatgcgcctgtgacttaaaaaaaaaaaaaaaaaaaaaaaaaaaaaaaaaaaccgggggctttttttcgggggggggaaaaaggggttttgaaggggccccggggccaaaggtgtttcccggaccctttttttgccccaagggggggaaatcggcggggggcccccaaaaggagggcggaataaaatccgagaaaacgcgggttacccgcgtagtgtcgtctccgacaaacnnccacgagacacacagcaacgccgacacaaccagcgcgacacacaaagaaagaaagcgacgacacgcagatacaaggaacaacacacatcaaacaacacaggcgacacagacagctcacacacgacacacaacacaaagaacacgaaaccaacacacatcgagacacaacacagcgaagann

SEQ ID NO: 23679 - DNA, 488 bp, Homo sapiens; identical to SEQ ID NO: 21185
  misc_feature 1, 2, 3, 4, 5, 6: n = A,T,C or G

SEQ ID NO: 23680 - DNA, 507 bp, Homo sapiens
  misc_feature 1, 503, 504, 505, 506, 507: n = A,T,C or G
nctgtatttcttattaaaatgattggtctaagaccaaagatcttgtccctgttgttctctattgtattccttgttcctaaaaggttcctgggacatacagttcaaaaatatatatctgatgtacgaatgactgaataagtgaatgtgaccataacgcagaaattccctaagaaatgctttgtcctgataggtctccagtctctgcagaggacaaagagaaatattctaaggtcccaaaaagtctttcctggtgtgccacataagacctcctattcagttcagtgtaatatttcccacataccagacaatctttctttaggattccacagaaatttgagcaggcaactagtcctatcctccgctttccccaccctcatcaccaaatttacaactcccacaatcatagttaccatttaccaattgcttcctgtaacccaggcactgtactatgccctgcatatatgttatctaactctgtgtaacaacccttgataggtaaccannnnn

SEQ ID NO: 23681 - DNA, 662 bp, Homo sapiens; identical to SEQ ID NO: 23598
  misc_feature 584, 655, 656, 657, 658, 659, 660, 661, 662: n = A,T,C or G

SEQ ID NO: 23682 - DNA, 489 bp, Homo sapiens
  misc_feature 1, 2, 3, 4, 5, 6: n = A,T,C or G
nnnnnncgttatacccggccccgtgatttttcccccttttgtttttttttttttttttttttttttttttttttttttttttttttttttttttttttttttttttttttttttttttttttttttttttttttttttttttttttttttttactggatctgtatttttaatgattgctttcctttaatcttaaagagataagtggactaacgtggataaagggctccatcttggacaacttgatcagtcttttcttctgtgctgagcagggcctgccaagagcaggaaattcaacgccatttacaaagctttcttgtcttactctcaaagaaagccatcactgttcacatcattcaagaggctgtcaagctcacacctctctgaaataagtgttagctttttgggctgccttcccccagttgctctgtgctccaaacagatgcctgtgtttagtccccccgcgttaattaattctagaagtactcttt

SEQ ID NO: 23683 - DNA, 569 bp, Homo sapiens; identical to SEQ ID NO: 21176
  misc_feature 563, 564, 565, 566, 567, 568, 569: n = A,T,C or G

SEQ ID NO: 23684 - DNA, 545 bp, Homo sapiens; identical to SEQ ID NO: 21184
  misc_feature 1, 2, 37, 542, 543, 544, 545: n = A,T,C or G

SEQ ID NO: 23685 - DNA, 552 bp, Homo sapiens
  misc_feature 543, 544, 545, 546, 547, 548, 549, 550, 551, 552: n = A,T,C or G
agacggagtctcgctctgtcacccggggctggagtgcagtggcgtgatctcagctcactgccagctccgccttccgggttcatgccattctcttgcctcagcctcccgagtagctggggctacaggcgcctgccaccacgcccggctaattttttgtatttttagtagagacgagatttcaccgtgttagcaggatggtctcaatctcctgacctcgtgatccacccgcctcggcctcccaaagtgctgggattacaggcgtgagccaccgcgtccggcctggaccctcttagttaataattttaaagcaaaactgtgggcgattttgctgtgcattaagagaattgctataaagatgatatctgggacttagctggagaaacttgattgttagggcccttggtgcttagaaaaatttatttatatgtgattcaaattagagtattaattataaacatgaaagtgattcagtgaaatctcttcactaaaaaagtattttgataaacgttttcttgctgttgtaggaggaaactgttctttgannnnnnnnnn

SEQ ID NO: 23686 - DNA, 527 bp, Homo sapiens; identical to SEQ ID NO: 21254
  misc_feature 1, 2, 3, 521, 522, 523, 524, 525, 526, 527: n = A,T,C or G

SEQ ID NO: 23687 - DNA, 557 bp, Homo sapiens; identical to SEQ ID NO: 21245
  misc_feature 1, 2, 3, 4, 5, 6: n = A,T,C or G

SEQ ID NO: 23688 - DNA, 587 bp, Homo sapiens
  misc_feature 583, 584, 585, 586, 587: n = A,T,C or G
acggagtcttgctctgttgcccagactagagcacagtggtgcgatcttggctcactgcaacctccgcctcccaggttcaagcgattctcctgcctcagcctcatgagtagctgggatgacaggcgcccaccaccacgccgtctaatttttgtatttttagtagagactgggtttcaccatcttggccaggctggtctcgaactcctgacctcaggtgatccgcctgcctcggcctctcaaagtgctgggattacaggcgtgagccactgtgcatggccagcttgacaaactttctaattgactggctcctgtgcattgctcatccttctctctcatttgttagtggctaggaaaaagaaagaagtttgttatctgagaaatgtgagtccttttaaagtctcaggataacagaggcatttaaaatgcaacagcagtctcttctcactcttcctggcactaaataatgacctcttgaagccacttgctatatgggctttacactgactgaagccaagtaaccataaaatgccatatgctggacaccataacccataccctatagttcagcaatctatagccaaannnnn

SEQ ID NO: 23689 - DNA, 569 bp, Homo sapiens; identical to SEQ ID NO: 21176
  misc_feature 563, 564, 565, 566, 567, 568, 569: n = A,T,C or G

SEQ ID NO: 23690 - DNA, 569 bp, Homo sapiens; identical to SEQ ID NO: 21176
  misc_feature 563, 564, 565, 566, 567, 568, 569: n = A,T,C or G

SEQ ID NO: 23691 - DNA, 869 bp, Homo sapiens; identical to SEQ ID NO: 21180
  misc_feature 1, 2, 3, 820, 821, 822, 846, 867, 868, 869: n = A,T,C or G

SEQ ID NO: 23692 - DNA, 1007 bp, Homo sapiens; identical to SEQ ID NO: 23561
  misc_feature 1, 2, 3, 4, 1005, 1006, 1007: n = A,T,C or G

SEQ ID NO: 23693 - DNA, 1866 bp, Homo sapiens; identical to SEQ ID NO: 21250
  misc_feature 1, 2, 168, 1861, 1862, 1863, 1864, 1865, 1866: n = A,T,C or G

SEQ ID NO: 23694 - DNA, 869 bp, Homo sapiens; identical to SEQ ID NO: 21180
  misc_feature 1, 2, 3, 820, 821, 822, 846, 867, 868, 869: n = A,T,C or G

SEQ ID NO: 23695 - DNA, 650 bp, Homo sapiens; identical to SEQ ID NO: 21165

SEQ ID NO: 23696 - DNA, 1346 bp, Homo sapiens
  misc_feature 40: n = A,T,C or G
tgatccagtcaaaaacgtggagtgcgtcataggtcatgcnccgctcagatggcgttcccactgagtcaccccaacctctgtagtcaaaggtgaccacatggtaaccaagggaactcagcaccttgtaaagctccacgcggtggtcgcctcctcagactccaatggtcacgtcttcctctggctgcaggtagtagttacacgtgtgattcaaaccttgatcctgtggttttttcaaatcaatgaaatagggaactcttacgaaattcaagaaaatcagtttggcctgtattccaggacatagtttgatgagaaatggaatggcaatgtacaaccccaaaacacagaaaagtatcttcctcaggcgcaaccacacgccctttcgcctgcccagcgcccgcttcattcccgcgtcggctgcgcagcgcggctcagctcgtgccgaattcggcacgagataaaaatgaaggtggtgaactaagcagcctcaggctttagaagtgagtccctggcatcggtgaggccacccacacagccattccctgtacatcaggagggtggtctcactctgtacctatcacccaggttctcgggaccggaagtcaggtgggagactgggctccccgaagccagagcggcagagaggccagaactccaaagcccctgcagccccggctgacaggaagcgccagctgtcaccccagtccaagagctccagcaaggtcacgagcgtgcccggcaaagcctcggatcccggcgccgccagcaccaaatcagggaaggccagcacgctgtctcggcgggaggagctgctgaaacagctgaaggccgtggaggatgctattgcacgcaagcgggccaagatccccgggaaagcataggccgtgccccgaccggactggacgcatttttatacatagggtaagcgcagccattttggattttgcagttaatgtcttattttggctgtgattctttttaaaaagtaaaaaagaaaaaaaagtttctcagctggaaaagaagccacacaggaaatgacaacgacgctgaatcccagcctccctccccagagcagaagtcccgcaggacagacagacacagacagcgctagtgaccagcacggttctcatgtaaattacaagccccagccgccagccccgccttctcttcctcctcctccgtcttcttccctggccctggtcaggcctgtggagccccagctctgggtccctagcccgggtccaggcagccaggctccctcctgagctgagaaacggaacctcgcgaaccactggtggcacatccttctcctcccccgcccctgatcacccgcccccggatcagaaata

SEQ ID NO: 23697 - DNA, 650 bp, Homo sapiens; identical to SEQ ID NO: 21165

SEQ ID NO: 23698 - DNA, 499 bp, Homo sapiens; identical to SEQ ID NO: 21187
  misc_feature 1, 2, 3, 8, 12, 13, 15, 24, 25, 28, 31, 497, 498, 499: n = A,T,C or G

SEQ ID NO: 23699 - DNA, 1215 bp, Homo sapiens
  misc_feature 1213, 1214, 1215: n = A,T,C or G
tatagggagtcgacccacgcgtccggccgccaccggctctacctgacggcttccagttccggcctccaaggggcgggcagaagttggaaacatgcggctgtcggtcgctgcagcgatctcccatggccgcgtatttcgccgtatgggcctcggtcccgagtcccgcatccatctgttgcggaacttgctcacagggctggtgcggcacgaacgcatcgaggcaccatgggcgcgtgtggacgaaatgaggggctacgcggagaagctcatcgactatgggaagctgggagacactaacgaacgagccatgcgcatggctgacttctggctcacagagaaggatttgatcccaaagctgtttcaagtactggcccctcggtacaaagatcaaactgggggctacacaagaatgctgcagatcccaaatcggagtttggatcgggccaagatggcagtgatcgagtataaagggaattgcctcccacccctgcctctgcctcgcagagacagccaccttacactcctaaaccagctgctgcagggtttgcggcaggacctcaggcaaagccaggaagcaagcaaccacagctcccacacagctcaaacaccagggatttaactggatctgaagagtctgcagcccttaatcagtacccatgatcacaggcctttggagcacttttactctctgagaagaactggagctagagatgtaaaatggacagtcttgatggggttgagaaccttctggggagccagatgaccctctctttgcacaatagataaaagtctttatatgaatatatataaatttattaatgaccactaggcgaccaagaaaccaacaaagccatgcgcaggcccgtcgcgccgacacaagcccctctcacccatcttaggccgaccgtcacccaaccgcgatcgacacaccgcgatcaaagaggacacacagaagcacgcgagctcatcaacacgggggcgcaccaccacaaacaaaaacgccggcagaccaaccctccgagcgaaccccacacggcaccgccagactaacagcccagacagacacaggcatcacaacacccgagacggagagacagccaccacacagtcgcacagctatggacaagaagcaagcacgccctcaaccgacagccacggacacacctcatacccgaccaaaagcagaccgtcgacatggacagagacgtcgacnnn

SEQ ID NO: 23700 - DNA, 650 bp, Homo sapiens; identical to SEQ ID NO: 21165

SEQ ID NO: 23701 - DNA, 835 bp, Homo sapiens
  misc_feature 1, 2, 3, 4, 5, 6, 7, 8, 9, 10, 11, 12, 13, 834, 835: n = A,T,C or G
nnnnnnnnnnnnncgaaagtcttctagaattaattacggcgcccggggcgcggcgcactgcgcaggcggccgggactccgctcagtttccggtgcggcgaacaccaaagtccgggaacttaagcattttcggtttctagggttgttacgaagctgcaggagcgagatggaggtggacgcaccgggtgttgatggtcgagatggtctccgggagcggcgaggctttagcgagggagggaggcagaacttcgatgtgaggcctcagtctggggcaaatgggcttcccaaacactcctactggttggacctctggcttttcatccttttcgatgtggtggtgtttctctttgtgtattttttgccatgacttgttcgctgatatctaaattaagaagttggttcttgagtgaattctgaaaatggctacaaacttcttgaataaagaagacaggactctcaatagaagaatttcacatctccaagggacccttcctttcattttacactttgttactaatttgcagaactctattaattgggtaggatttcacccattcctagctaagttcttaaaattaaaccctttggttcgtgtttaaaaactttcaaacatctgatggctttacaggggctgaatataaaagcatttgtacttaaaggtcttgtgtattcattaagaaatatagtaatgtcttttaatgttttaagagttgatcagggtttactatgatgcaagtaataggatgattaataagggaaggtttttatgaattcaaaagtcaattattcaaaagcagggaaagattttgagagagggaacaaagtattcttagann

SEQ ID NO: 23702 - DNA, 535 bp, Homo sapiens; identical to SEQ ID NO: 23532
  misc_feature 535: n = A,T,C or G

SEQ ID NO: 23703 - DNA, 650 bp, Homo sapiens; identical to SEQ ID NO: 21165

SEQ ID NO: 23704 - DNA, 704 bp, Homo sapiens
  misc_feature 701, 702, 703, 704: n = A,T,C or G
tttttttttttttttggagaatagtactgtcatcagtttatactttaataccacatctaacaatgtttatgatagggttgatcacttccatgaaggcatcacaagccttgctgtgtgaagggcatctgaatacattttaatattttatatctgttcttcacaccttagcccctcactctggagaaaatagtacattttctttcttaaaatatggtacacttaagcctcaaatgtggatcttttctttgaaagtaaaactgaacaggtccttctgcccacctgcagtccccaaggaaagaacacatgttacgttcattgccaataataggtccttcagtacttgttgaatgaagaatacttgtgtttttccactggccaaccaaggtggatcctgaaagtggaacccggagttctctaataactaaattagtgtttttagtagctcattttgaatccctaagctgtgacttcaactctgaaaggctggctaactctgggaggttaccttcacttaattaagtacagcatttcttccaaagcgcatgcagtgctttatgtaaattctctctcctggatttgtgtgacgtagcagggttagaatggtgagacagatgcctggttctggagtcataagactggctttgccacctagcatctgtgtggtcttaggccagccatacttttgattttattttgaggannnn

SEQ ID NO: 23705 - DNA, 2216 bp, Homo sapiens
  misc_feature 2212, 2213, 2214, 2215, 2216: n = A,T,C or G
tatagggagtcgacccacgcgtccgcaaactatatattttttagttcctttgagataactaatttctaattatatatgtttcaaaaaccatatcctgtattttttttaagaattgttttataaataggtcataagatacaaggtctgcattagaagacccactcttactaggttccctaaggatctgccatagattttttttttttttttttttttttaggtagtttaaagcaagcactgataccagtgggagttggtcttgatctaggagattctgttaagcatccaaaaacaatgcctaatttcagttcttaggttatggcttgtgactccagataaaagatggagaatacctcatgtactgtgacttgaaaatgaattcttaaaattcttaggctctctccatgtatctttcttaaggaaaagtttctgagtgtgatctctcttttgccatagtatcaagtggagggtagttcagaaaagttaataggaaatcttttgtgacagcagactataatagaagtttgagtaatattttaataaatttatataattcaaatgataaaaatgtatcaatgttatccaatgatttttattaaaaaattaccttattattagaactgtgcctattacataaaaagtgctcatgtatttgaattttaaataatttatttaaatcaagaccaccataagtcattaataatttaataattgttttaaatcagtggttttcaaccctcacttcatattagaatcatctgaggacttttaatatggaatccacctcataacaattaagtctaaatttctggaagatggagccatgcttgtttttccaaaagctctttgagtgattctaatttgtagtcagagttgaagaccactgctctaaattagtgcaggaaaatgcttttatttctcccatgttaacttttaaaactagtaatgtacccagttaagttttgatggtttaaattccactaaagaacatattcttctaataactagcatttattacatgaaatttaagagtttaagttccatcaaactagcccttgtgtaagattattatttcttctctataacttcaaaatagatatttcattcaaactgttcaggtgagaaaacataatggatttttttttttttcctctggagctgcctgttcagtgagatggaggaggtgggcacatttaaggtcagttcactaacctatggttcagagttctgatcatatggaagtttggaaaagagagcttatcacaggtttgtatgctggtgaatggatagttttaattctcactgtctcaaaagagaatcagctctccagcagttctagaaaagctttgacaatccccaaggggcagtgttaccttactccttcactgcttcttagaaggtagaattaagtttctggaattgcacctacatgttttcttattaacattcagaattgggaatattaatttttccagtgagtagttttctgaaattggtaacttggagagtaaaataacgtattttgcttttcaattttgtgtttgtttacttttatgtaaaaatttgatatgtgaattacacagttctaataaaacctcatgccttttcattacatctaatttgaactctcaacttcatgttacagaatgctttaaagatgctttaatgaaaagtattaagaaaatatatagatttgtatgtcagtttatacttcagaaatccatatatttgtcatatttatttttttagaaacctcctaattggataactagatggtatttaaaatgaatgcccaaaaatatcttgtacctttgtccaaaagtttatctgttggaagccgccagccattcatgtagagagtttataagaaaataatttaaaattgtatgcattttatattactatggtatctgtgtaccatatttctaagtattcattattaaattggtacttcttaaaaccataaaataaagaacagacgcaacaaggaaaggacaacagcaacagaccaccggaagacagcaactcacagaactagacaacgagaacagggggggcgcggcacgcacagacaaactgacagacgcactaggcacgcgcagaatcaaaaagaagaagtgggcgaccggtaggaagaagagggcgcaaacggactgaccaaaaaagcgggagcaccataaacaaggggatggagagaggaataggggagagnnnnn

SEQ ID NO: 23706 - DNA, 1214 bp, Homo sapiens; identical to SEQ ID NO: 20119

SEQ ID NO: 23707 - DNA, 920 bp, Homo sapiens; identical to SEQ ID NO: 20829
  misc_feature 1, 2, 3, 4, 5, 6, 7, 8, 9, 10, 915, 916, 917, 918, 919, 920: n = A,T,C or G

SEQ ID NO: 23708 - DNA, 971 bp, Homo sapiens
  misc_feature 1, 2, 3, 4: n = A,T,C or G
nnnnaaagattattattttaaactgctctgttaaataatggtgctaaattatttgtagtaaattagaatccaggattgagataatccattatctcaattatgatctcaataggcagtaaatgtctgtttaccctatatgtaaataatgaattatctcaatcctacagagacttttgctttgagaaacagatttattttgataaaacatcaatttgacataaaccccaatttccctttggggtcaaagaaaccaaaaaatacatatccataattgtttatagttcaaaaccagtttggactaaacaaaattacctgacataaaaactcagctccgcaactataacagttaatgtaacctccatacctacaaaaaatgaaagcagtaatgtttattacagttcacacattggcacttgaaatgaaaacatttatcccatcatggaaaatacgtgctacatagagttgagaagagaagcaattattttaatttctgttgtacctcagaggggactttaggaggtaatttatctttcactgagtatggctctttgtatagataatgtgtgcacacgtatatttaggttatgtacatatgtataagtacacatataccgtatttagctcagtttggtattttatagaggtatatttggtattagagtttaaattgtctcaaggagcttttagaccttgatttttttcatgtcataaaatgagctacgagaccctttaactgagtagtaatgaaggtagccagttttatataaatagcatttattattttatgatcattttatttagtttgttatgtgcagatgttttccccactagaatttaagtggtatgaatggagggatcttgtttgtcttgcacagcattgtattcccactaactctcaataaatacttactggttcaatgaatgaatggacagataagcaagtgtgctaacaagtaagcttttaggattgt

SEQ ID NO: 23709 - DNA, 444 bp, Homo sapiens; identical to SEQ ID NO: 20254
  misc_feature 1, 2, 3, 268, 322, 419, 443, 444: n = A,T,C or G

SEQ ID NO: 23710 - DNA, 1214 bp, Homo sapiens; identical to SEQ ID NO: 20119

SEQ ID NO: 23711 - DNA, 527 bp, Homo sapiens
  misc_feature 1, 526, 527: n = A,T,C or G
naggtacttcattcccatgggctattcagttatactgaagagcagtgctgatcatcacttctccactttacaggatattctcttgtccccaaagtgaatctgtttaacttggcacaagggagtggacagggtcattgtgggctgccccaggagagacatattggtgggcacaacattcaatgccacaatgaaatggaaggctaagacaaagaagggtgggatccttgggagcaaagacactggccaagaaatacaccaaatttgaccaaaacctgaatggagtgctgtggctctggaagtgctggaaaggaaggggctcaacttcaccaaacactgacaatgtgccaagtccagtgctaggcacatgaagccgtggcagggagattacttactgatcctcaagtcacatggggaagttgagtggcagagtataagtgtggagctgatctctctatgtcgatgtccattccactgcttagcattgcttcccaaatccaacctgtgtgaaaaattaagttcacagtann

SEQ ID NO: 23712 - DNA, 1214 bp, Homo sapiens; identical to SEQ ID NO: 20119

SEQ ID NO: 23713 - DNA, 2963 bp, Homo sapiens
  misc_feature 1, 2, 3, 4, 2865, 2866, 2867, 2869, 2870, 2872, 2873, 2878,2888, 2891, 2894, 2904, 2906, 2907, 2908, 2912, 2913, 2915,2917, 2922, 2924, 2928, 2936, 2938, 2940, 2942, 2944, 2947,2951, 2953, 2956, 2958, 2959, 2960, 2961, 2962, 2963: n = A,T,C or G
nnnncgcggccgcgtcgacgctgcgagaagacgacagaagggggttcttggaaggcggtgctctgagaagccggactacgcggcagcggctcttcaaagcggagccgggagtttttgctacagttttcgccaccatgagtcgcagctataatgatgagctgcagttcttggagaagatcaataaaaactgctggaggatcaagaagggcttcgtgcccaacatgcaggttgaaggtgttttctatgtgaatgatgctctggagaaattgatgtttgaggaattaaggaatgcctgtcgaggtggtggtgttggtggcttcctgccagccatgaaacagattggcaatgtggcagccctgcctggaattgttcatcgatctattgggcttcctgatgtccattcaggatatgggtttgctattgggaacatggcagcctttgatatgaatgaccctgaagcagtagtatccccaggtggtgtcgggtttgacatcaactgtggtgtccgcttgctaagaaccaatttagatgaaagtgatgtccagcctgtgaaggagcaacttgcccaagctatgtttgaccacattcctgttggggtggggtcaaaaggtgtcatcccaatgaatgccaaagacttggaggaggccttggagatgggggtggactggtccttaagagaagggtatgcctgggctgaagacaaggagcactgcgaggagtacggaaggatgctgcaggctgacccaataaagttctgcaggggcgaagaaaagaggccttcctcagttggggaccctgggagcagcatactcattgaaaatctcatccagcacgtggacctcgtgccggacggcggtgctctgagaagccggactacgcggcagcggctcttcaaagcggagccgggagtttttgctacagttttcgccaccatgagtcgcagctataatgatgagctgcagttcttggagaagatcaataaaaactgctggaggatcaagaagggcttcgtgcccaacatgcaggttgaaggtgttttctatgtgaatgatgctctggagaaattgatgtttgaggaattaaggaatgcctgtcgaggtggtggtgttggtggcttcctgccagccatgaaacagattggcaatgtggcagccctgcctggaattgttcatcgatctattgggcttcctgatgtccattcaggatatgggtttgctattgggaacatggcagcctttgatatgaatgaccctgaagcagtagtatccccaggtggtgtcgggtttgacatcaactgtggtgtccgcttgctaagaaccaatttagatgaaagtgatgtccagcctgtgaaggagcaacttgcccaagctatgtttgaccacattcctgttggggtggggtcaaaaggtgtcatcccaatgaatgccaaagacttggaggaggccttggagatgggggtggactggtccttaagagaagggtatgcctgggctgaagacaaggagcactgcgaggagtacggaaggatgctgcaggctgaccccaataaagtttctgcaagggcgaagaaaagaggccttcctcagttggggaccctgggagcaggcaaccattatgcagaaatccaggttgtggatgagattttcaatgagtatgctgctaaaaaaatgggcatcgaccataagggacaggtgtgtgtgatgatccacagtggaagcagaggcttgggccaccaagtagccacagatgcgctggtagctatggagaaggccatgaagagagacaagattatagtcaatgatcggcagttggcttgtgctcgaatcgcttccccagagggtcaagactatctgaagggaatggcagctgctgggaactatgcctgggtcaaccgctcttccatgaccttcttaacccgtcaggctttcgccaaggtcttcaacacaacccctgatgacttggacctacatgtgatctatgatgtttctcacaacattgccaaagtggagcagcatgtggtggacggaaaggaacggacactgttagtacacaggaagggatccacccgcgctttccctcctcaccatcccctcattgctgttgattaccaactcactggacagccagtgctcattggtggcaccatgggaacctgtagttatgttcttactggcactgaacagggcatgactgagacctttggaacaacctgtcatggagcgggccgtgcattgtcccgagcaaaatctcgacgtaatttagatttccaggatgtcttagacaaattggcagatatgggaattgcgatccgtgttgcctcacccaaactggttatggaagaggctcctgagtcctataagaatgtgacagatgtggtaaatacctgccatgatgctggaatcagcaagaaagccattaaactgagaccaattgctgtgatcaaaggatagaaccttggacagcagggctgcctgacaccaccaaccctctctgaagtggaagtggactgacatgctcttctgacatcagactcaaggcgggacaagttgcaaagtgtgcagctgtaactgctcacgccaaaatggctgatggggaggctgctgctttcaggggcccgtgcttgtaaaataaccttccaggaagaggcacattgcccacctttggaaagggaggaatatgccttctccttggttgttccacagagttttaggaaaatctgttagggatgggtagatgtcaaactgccttacgcagtcatactgatctttagccatcagattgatcttcttcacaccaagctctgtttacattccgagaggtgtcatgaagaaagttctgttcaataaggttttggaatgtcaacannngnncnnccccntccccccttnctnctncttccccccncnnncccnncntncccgncncggnttctcccnancncncntcncccncnctncnnnnnn

SEQ ID NO: 23714 - DNA, 769 bp, Homo sapiens
  misc_feature 1, 2, 52, 63, 94, 769: n = A,T,C or G
nnatgggaccattgctgtacccattcatactggttgctgaagggtactgtanttagactgttnaaggcgtgaagctgaaagagtatccccgcgnagagatgctgcttgtgttgcggatgtacccttgattatttccttgtgttgactctgagatgctgaccccaagctggctgccataggagttgattcccatcatgccactgtgcgctggggagctagagagggctggaagctggctgggattcctggggacgctgtagagagcttcagcaatgtctgcggctcgcttcaaaatgatgtcctggttattgtgtggtgtgccataaagagcttccactagatctgcagctcttttcaacagcatctccttagctagtctctcaggatctccaggatgcctagggatgaccttctgcagtctctggaagccatagtctatggtgggttcatttaatgctgtgtaaatgaaccttcctggggctcctttgcagaactgtttagatttataagataatgtcacctctaccacgcctgggatgtgccggggaggagtctgtactctgatggcatgaggggttattagctcgctccatacaagcatagtcccaaacaccacttggagaccatcaaagaagttgtccccgatgatgatgaccatggctcctcctgtggtccagccttcactcgggctaatggctttgatgcagggggtagcttccgatggatcgagtcttcttgctctccgtccatgcttggagttgttatgaan

SEQ ID NO: 23715 - DNA, 1214 bp, Homo sapiens; identical to SEQ ID NO: 20119

SEQ ID NO: 23716 - DNA, 793 bp, Homo sapiens
  misc_feature 1, 2, 3: n = A,T,C or G
nnnaccacaacctctgcctcctgggttcaagtgatcctcctacctcagcctcctgagtagctgggattacaggcacctgccaccacacctggttaattttttgtattgttagtagagatggggtttcactatgttggtcagggtggtctcgaactcctgattacaagtgattcacctgccttggcctcccgagccttagcccttttgattccctgacatcaaatgctactcctcttggatagttatactgtgagaagttggtgacgggcaaaacgggagcccaggccagtgtcagaaactcacccagagtcgcagggacaaagctgttgtgtgggttcttccctgtgagaatcttaaggatggaaatggtgagcacagaccttggcatttaaggaccgacaatgctgagatgttgtggtgggtccttgagtagggctcaagtgtccttccagggtggtggtcccagggaattgggccagaaacaaggccacccagtctcagctctgttgttcctggggggccctgtggctccaggagctcgtgaacatggcgaaccccacttccccatcccctttctgccttctcttctgttctcttgacagtctctgttttctacccactggggtcagcaaatcagccccttttaccggtttccacaaaaatccacaaaaagcactgtgaggacttggggatttcttgaagatttgggttgaggtatttcaggagggccttgcctcgcccctttccactccatcttcctctctgctccccacttctctggaataagaggtat

SEQ ID NO: 23717 - DNA, 1253 bp, Homo sapiens
accatgctggagttttgcaaaagcttcccaggtgattttaatgagtgtcaagagttgagaatcctgcccaagacttactaaggggtggcaaaaccagcccatttttaaccctcactttgaaacccttcccactattatcaaaagattggggacgggaacaagggagggcatcactgggagaggtttgttctctgccttgttgggaataagcgaaccgggatttctgtctctctgcacattgatctcccttcctcggaacacccctcttccactgtgtctatgggtgaattctcaggcatttttcaaggtggaactcagtgtcaccctttcagaaagtccttccctaccttataggcagaatcgcctcacccctggtaaagcgaccagtccactgtgaggcttgttatccccgtgtattccatctcatggggtcttcaccttatgtgtgcgtcctcgtttagaccacagctacctgaacataagcagggccgtgtcctatgtgtcttttattcttcaagcctagcatagtccctctataaaaagtgctcaataaatgcttattgtgatagaaaattcataatgtgactaaaatatgaattaataaatgcttaagactaccagctatgaagaaaggattgagtcttgttctgattaggtagtatacaacagaccattccaaatgcagtggctttatacaacaatggactatcatcctccccagcctgtgggttgactgggttcagttcctatgtggttcctgcctggagtctggttacagtcagctggaggcccaggaagggatcatctaaagactcaactgggatgggcgtgaaaaatggcctcttcccccacatgcgtgggccacagtcgcaatggctggaagaactgaggcctgaataggtggccatccacatgtgactcatttaggagtcctcacaccatgacagtctcagggtagccatacttcttacatgacagtggttttcctcaaacaagcattcctgaagacccaggccacactgcaaggcttcctatgacccgctcagaagtcacacggcatcacttctgcagcatgctggtggtcaaaagcaagtcacagagcagggcaggttcaggaggaggagacttcacaaggacatggacccatgtccaatcagaaacctgctgggattctccagaggaatcctttttcttccgtctgagttcagcaaacttcctgcttcctctacccagcgcagcgagcccctctctgt

SEQ ID NO: 23718 - DNA, 435 bp, Homo sapiens
acagaggaggagggcgccaaagctgagagaggcaacccctcaaatattaaaaaggaagaaatggcgtgataggctagcacattttatggaaagccatgtcttaattaaatgttttccctacaaatgttctctgtatcaaggaacctggcacatagggaatgcatgaaacctgatttataatcagattcagtctacttaagtaataacctatatctagatgatagattgtcaactgtgctactttagccatcatcacatacccagcgtttctatccttagtgacacagctgggccagaggcaaggcctgcattcatgcatgcagattattttactgtaaaaaagaacactgtgttttgaactttaattgcacaaatagacacagcaatgacattctcttctagtaactagtaacagcccattattcctcacatagt

SEQ ID NO: 23719 - DNA, 743 bp, Homo sapiens
  misc_feature 1, 740, 741, 742, 743: n = A,T,C or G
nactaaatgttaggtttcttgaacccagcatgtttttttctctcttcttatcagcagaacacacgttgttctctttacttggaacgccgcctctgacagatggtcacctcaccatcactcattcatccttcaagtcttcgatacaatttcttccaagaaaacttacctgattatttgagcttgagatagcactctctggaaagccctagaatttttatagcttgcggtaattgcttactgaaatctccagtgggctggaaaattagggaaggtattttcatgtatctattgttaatttttcattaccacagctagcagagaggttatatgttttgaaaaaacttttattgagtaaatgagaggatgaatttaaaacaacctaaacacaggtaatgcaaccaaataacaaattaaaaatcatcaagaagtgaaccaaagaataaaatcaataaggtaatataggatcagaagtgacattgcacattaaatgtgctatgatagacatagggcccagaaaaactgatctcccaggtaaatgtcctttttcttacaccatcctaacactttaatcccttcctttccatcttacataaagtaactgtttactggcaaacatttgagatgcaattgatgcattaaaaaaagtctacatctctcaatttattagcacttctcatactgtgttcctcaagcgctaaatgtagctcgtcctgaccacgtaagccccaattccagcacannnn

SEQ ID NO: 23720 - DNA, 1973 bp, Homo sapiens
  misc_feature 1, 2, 3, 4, 5, 6, 7, 8, 9, 10, 11, 12, 13, 14, 15, 16, 17,18, 19, 20, 21, 22, 23, 1973: n = A,T,C or G
nnnnnnnnnnnnnnnnnnnnnnncgccccccgtctcttatcccgctcccaggaacgcccccgcccactttttccgtttaacttcccgccacattacccctgacatgtgcccgcccccactgacacacgctttatacttacgaaatccaatttcgaattaccttaggaagcccttcgcttgacataccaatattcaaagcaagtgggactgtgcaatcagagccatgagttttatgaaaactactttcctttcacatcatttgttagagaatgccacacccatgatcatgtaacattattacaatcatgaaatattactacattcgtgattaacattacccaaaaggcacatcttcaaatgttgaattaagaaaatccaaaaatcaaaacagtagagaatacattaaaaatcaagcatttaatttgtaaaccttaatgaaataacagcctactccagtttcttcaaaggtttgtgagctttttataagagtggtcaggaagtgcagaaaaacaacatggaagacaggatttggaaacaaggccaaaatttaaaagacttaaccttttttttcttttaaatgagccacagaagtgctcttttataatgttgacgcaaatcaacatttatattatagaaatgcactcagaagtaacagacacacaaggttaaaacctgattcttcccactaagttctggaaatttattctaacataatggtgcctttctgtacaaagaactgtaccatatcataaatttactgctagtaaactttaagccaccagaaatctttcagctgtgacaagcacttgattgtaatgacagatttcagagtctgaatactgaaaaatatatatatccaataaaaaatttttgaagggggaataaaagcacataaatggcagcagaggaattgatgttctaagcctgttttattacatgggacatcacactacccttaatttcactgaaggtatctgaaatgggtgagatgaaatcaataggattttctgctaccattgtaacagttctatatgtagttacaaagggtgttattcctagtgatgatgacacctttcatgggattcaacttaaaaattaaatccttgcactttcaaagtttgaaactcaattcaaaatgagtccgtcttaaaagcctggctcatatggtcccattaagggaggctaacaatggtaatctataatacccaaacttgaagaataaagactttatggataaaaaggaataaaccaaaatatttgggctgttgaagtataagggcctgttgtaggacaatccctcctacttcctaatcccccccatacaatggcttaagatagccaaaacgtttattgtagaacgtttattattcctacaagcttatgtctcacttcccctaagcctctgtacttacagtcaaggacaaatgctctctagcatcatatctcattttctgttgctgacagttcttgagacttggcttccttccagcatgatcctaagtcagcctgattggaactgcttggacttgaaggttaagggctattaagtccatatttatgactttaaaaagggtaaaaatgagtttccacagctcagtgaaataacgataacagggaacatccccttcctacctggggaaaaaaatctcttcacagtgcatagtttgaaatcaaagtgcaatatgggcaaaaagagaaggtggtgctctcgataccataaatttagtttttggttttctgccattaatatttgctaacaaattcaagctaaaaaatggggaggaggggagagcctcacatgttacttccttattttataaactattactctttcaaatctaatgtttgaataaaatattttttcttcgatataaaaatcaatttttttagataaaaatcaatcagcacagtggccttgtcttacactaaagccaacataacagtaaatccgaaaggataacttacggacgcgn

SEQ ID NO: 23721 - DNA, 6430 bp, Homo sapiens
  misc_feature 6430: n = A,T,C or G
cgatcacctagagggtgcagagggaaagggaagggtctgtgccctcagagaccagcgcttggagctctaattctgataccaatggtaatcccaagaatggtgatctcgccaatattgaaggcatcttgaagaatgatcgaatagattgttctatgaaaacaagcaaatcgagtgcacctgggatgacaaaaagtcatagtggtgtgacaaaatttagtggcatggttctactgtgtaaagtctgtggggatgtggcgtcaggattccactatggagttcatgcttgcgaaggctgtaagggtttctttcggagaagtattcaacaaaacatccagtacaagaagtgcctgaagaatgaaaactgttctataatgagaatgaataggaacagatgtcagcaatgtcgcttcaaaaagtgtctgtctgttggaatgtcaagagatgctgttcggtttggtcgtattcctaagcgtgaaaaacagaggatgctaattgaaatgcaaagtgcaatgaagaccatgatgaacagccagttcagtggtcacttgcaaaatgacacattagtagaacatcatgaacagacagccttgccagcccaggaacagctgcgacccaagccccaactggagcaagaaaacatcaaaagctcttctcctccatcttctgattttgcaaaggaagaagtgattggcatggtgaccagagctcacaaggatacctttatgtataatcaagagcagcaagaaaactcagctgagagcatgcagccccagagaggagaacggattcccaagaacatggagcaatataatttaaatcatgatcattgcggcaatgggcttagcagccattttccctgtagtgagagccagcagcatctcaatggacagttcaaagggaggaatataatgcattacccaaatggtcatgccatttgtattgcaaatggacattgtatgaacttctccaatgcttatactcaaagagtatgtgatagagttccgatagatggattttctcagaatgagaacaagaatagttacctgtgcaacactggaggaagaatgcatctggtatagtgaaatcgattttttgcttacattgtatcagggaaagctttgaaaattttcttttattcgggagatatgctaacttggggggatggtgtcaggaaacctaagaaatttacagacttaattttgtacagtattttaggtcaaataattttaataaacatcttctgatgaatgacctaatttcacacccagctaggtacaagcatgtgatttgattgatctgagattgggattaggattttatgtaaaatatgattcatgcagaattggtcctttaattcttggaaatccctttgaaaatttacgcgtccgggttaattagtaccttactagctttgggattttctcaaagggccgaacttttcgcttgccatagttagaaattcctttgatttctatagaaagaggttttttttttttttaaccattattatgcaagaaggtctttggatatagaacatagatgttttattgttctgataaatttaggagtattttaatttccataggctaatttctaaggatttcctccgacttcatccttatgagatgacttaatgttggtcatatcattgaagcttttctatttttccatcaaatacgacattctacatcaaagtacagtgttcatattcagccaaaatttcaccaaaaacagcagtaccacaccatttccagtttaaaccatgaagtcctttgatagtgcttggtattttctactgacaggtttgtccaatgagtaagtctccatatgtggatcctcataaatcaggacatgaaatctgggaagaattttcgatgagcttcactccagcagtgaaagaagtggtggaatttgcaaagcgtattcctgggttcagagatctctctcagcatgaccaggtcaaccttttaaaggctgggacttttgaggttttaatggtacggttcgcatcattatttgatgcaaaggaacgtactgtcacctttttaagtggaaagaaatatagtgtggatgatttacactcaatgggagcaggggatctgctaaactctatgtttgaatttagtgagaagctaaatgccctccaacttagtgatgaagagatgagtttgtttacagctgttgtcctggtatctgcagatcgatctggaatagaaaacgtcaactctgtggaggctttgcaggaaactctcattcgtgcactaaggaccttaataatgaaaaaccatccaaatgaggcctctatttttacaaaactgcttctaaagttgccagatcttcgatctttaaacaacatgcactctgaggagctcttggcctttaaagttcacccttaaggcctttgtttatttaaacatgaactgatggtaactgtacattttgtgctaaaatgcatatttatatgtgtataccatatgtggagatagaaaagacctttaagacaataaaagattgtaggctatctctgtaatcatgcaatagctgttcggattgagaactcttcagccatgattagacgttgactgcatctccctgatagaccaatcagctgtgtcgcacttaaactggagaagttacactgaagtataatcacactgaatgttagactttttcatctgccaaaaccaaaaaccattttgatctccctgtggttatcaatataacgcacaatcacaagtgtatgaggacttagaaattaatcctttgtggtaggagttctgttgaatgatggaaatcttattactaccacaagactatttgatctggtaattggagacttcgggatttaggagatctccatgtctgtatttactctaccactgctaaagtgtgtggtcctgggtagtttacttgcttgcggaaaatgagaattgatggtgtccccaatgccccacctcacagagttactaaaaaatgtctgtaaagcatatttacctcttgggagataggcactatgtaaataaggtaaaatttctgttattacaattattcataataatattcttttcttatttctaagcctttctgggaaatcatttcagtccacaccaaccatattattcagggttcctgccatatgtgtggggtatcctactgatacacacgtattcaaagtttatgggtacaacaaagacatagtacatgtacataatatgtatgtgaatatagttaaatatatttcttcacaatattttaaactgtgaagaactttatcatacaggaaacttaaaacaagaggtgtcaaaagacccaaattaggtgcattttacttgtttatgatggcataaccattgctttaaaatgtttagacagtagaatattgaatttatgctctatttttgtttatttaagcaacacttaatgtaaaagtgcaacaggcaattgaatccaaatttcaacgacaaaaaaaaaaaacatgtattttagagttcatctttggcaaaatctttggttcagggtactagttgtttaaaagttgattcatattcttaccttgtgctgagaaaggttgcattgctgccccttatacacatgctgcagcttgatgttaaagaatttttattctttctgaagaactaattaatgtttaaagcaactgtttaatatgatggcatgtgtgtgtgtgcgtgcgtgtgtatgttctgagtccacttcttttttcctaaataacactacagggattttgtcatattagatttaatttataatttgaaaaatcatctagtgtgtgacctacaggcttagaaatggtatagtcaaagacattttatccacatttctaatagtggacttgattaagtagataagatcagcatctgtttatggtagtaggagaaatagccaaagttgaggattttatgtatgttttcctgtttacctggaaaatagcaattaattggattttttggtaaagattgccttctgtataatgtttggattatataaaattgcaaaaatgataacagcccgctttactgtactaagcctgttactttcatgacgtgtgagcagaatgccttattttgtaatcttgtttaacttgttgctactgggacttgatttactgtggcactagttaagtaagttaaaaaaaagttaaaccctctcattattaaagaggaaaggcgatggtgatgtctgtagtacaatataaaccataattgtgatttaccttaagtaggtataactcttatgggatatacagtatagtttttgtgaatctttacatgatagcattatctttttataattttttttcctaagataaacaaatgcatagttttcttctatgggtgatagaaacagctttttgaagtaatgaaaacctcaaaagatcatgttgattcttaatttttgccttttgcataagcctctttataacatgtatctttaaaacaattaagtctttaggaatgtgtaaccagaactatgttagtattgcttataaaactttagttaggttcaatatatacatatatacatctctatataggtatatagatttgcattttgtcttgtaaaattttatttgaataaattcttcctgtaggtaatgggaaacaaaattaatagttcatatgtcactcatagcatttctatatttgaaagtagcccaatataaaacttttgattctaaaattaaaccagcagcctattacaagcacattctttgattgagtcattggttataaacttactaaatgcagagaaagcagccaatttaggaaacttctgagttggtgggacactgttgattaataatgtactgtatgaattaagtgatgctttaactttgattttacattttaaagttaaaatgtgggcattatgtcagcaaacttaagggcattatgtcagcaagctaaaacattttttttcctgtgcttttaatgtatctctttacatgatctgagagaggattcaagttgatagaaatagctgaggggaaaagggggaacatcttgggatgaagcttgtccttatggtgatggtttaattacagattaaaaaattagaaggaaatttcagtggattaagtgtatagctttcatatctacatttcaagaaattaccattgtaacttgataagagatgatttattttatgtaaacatctttgcaaagcaaggtgtagcagctcagctagatttattactgtgcacgaaagtaaatacctatctcaattattctttttcttttccaatataaagtttgctgaatgtacaagaagagtttatcacttaggatatagaatttttttaggggttgggggaggggatctgttaggaaactgttacctataaacaaagattgactggattcgatccaaaagataaaacttgaagctattctggaactaacatggaaaaatgaaatggctattgtttaaaaaaatgatagaaatacattgttgatgggatatgagttaagtttattttctacaaactgtaattgatgaggacatggataatatcttcatgtttctgagaagtaatctgtatgtggggggaggggataataaatatttctaaccaaaaaaaaaaaaaaaaaaaaaaaaaaaaaaaaaaaaaaaaaaaaaaaaaaaaaaaaaaaaaaaaaaaggggggggggcgccaaaaaatatccccccggggggcgccccattcgcgcccaccctttttttgtgaaaaagggggcccccatggggggtcttattaaaccaggggggggcgcgctaaacaggggggggggaacaactacgcctgtggggcacttgtggggaagacgaggcaccccctacactcggggggggggccgaaacaatgggggggcaaccaccactccagaaagttatgtaagacgcgtaagggggataaatacacaaactagcggcgtggagctggtgggtggcagcccacaggcgcgtatatttgcgaagcagaaaagaagttgggctacccgagcgtatcgtattgacgacctttctttcgcggggctccgtgagttattacgtcgaaccaaaagtcaaaagcgaccaagagacaacgaagcgagccaggtatgaacacgagggcacgactgacggcaagacgacacgaagggaaggcaacaaagcaaaggagacacacccacaagaagcgagcaaaccgccacacacggaagacaaggcccgaaacgacgagcgaaagagagcgacaaagacagaagaagaatagatacaaaaacgcggggccacaaagcagcgcacaaagcaggcgaacaacacacaacaacacgcacgaccaacaacgacgacagcacaagcagagatccaagacagacacgagaccaagagcagacagccgagagcactaaggcccggagacgaacacacacggtgaccgaacaagcan

SEQ ID NO: 23722 - DNA, 698 bp, Homo sapiens
  misc_feature 1, 2, 3, 4, 5, 6, 7, 8, 9, 10, 11, 12, 13, 14, 15, 16, 17,18, 19, 20, 21, 22, 23, 24, 25, 694, 695, 696, 697, 698: n = A,T,C or G
nnnnnnnnnnnnnnnnnnnnnnnnnacacatttttaataatcacagtaagttcattcgtatttgtcaaaactaggaacgctcaagaagttctgtaggtgagtagataaacagccggcagtaaattcatagaataatattcagtaattataaacaagagctatcaaaccataaaaatacataaatgaattttaaatgcatattgttaagtgaaagaaacaagtctgaaaaagctacataatatgttatttatttgatattctggagaagtccaaacacacaaagtgattctgtatttgcgagaaatttaaggagatgatgaaaatgggtaaaaaatagatttaaaagggtgatgaaagtattatgtataatattataatggtaaatatgtgatatgaatttgttgaaatcaacagaatatacagcataaagggttaattccaattcacaaaaatataaataaataggagattaggaattccaggatagaatgcagacaatatagaaaatatctaatgtcattacaaatgtatgaaatcagaagaggtgccaagtgacctcagaaatagtgtagtcaataaaagaataaagaaagtgcacgtcagaactgtaccccagctgatgatgttccacaaaagagcaaaacatacacaatctggttccactctacagaaatcctggaactggactacaaannnnn

SEQ ID NO: 23723 - DNA, 920 bp, Homo sapiens; identical to SEQ ID NO: 20829
  misc_feature 1, 2, 3, 4, 5, 6, 7, 8, 9, 10, 915, 916, 917, 918, 919, 920: n = A,T,C or G

SEQ ID NO: 23724 - DNA, 1214 bp, Homo sapiens; identical to SEQ ID NO: 20119

SEQ ID NO: 23725 - DNA, 744 bp, Homo sapiens
  misc_feature 1, 742, 743, 744: n = A,T,C or G
nggaaggaatggagtaagaagcactcttctgcagggatgaaccatgggggtgggcacctgcaccgagggtcccttgcctaccctaggccactgcacacctctatgccttgcagtggggaagcccatcgcggtacagaagacgctgcatccctcggaggaggaggtgaaccagctgcaccagcgttatatcaaagagctgtgcaacctcttcgaggcccaccaacttaagttcaacatccctgctgaccagcacttggagttctgctgagcccaaagggcagggccaacattagggagcccagccggaggtgctgtgctgagaagacttcctggaggtgtttgttgaacatatctgcagagccttcccagactcctgcaaatccaacccatatcaggctgtaagtcagagcaggcaatgcagaagaggagaccagaccaaggggtcagctggggctaggacagtgagggctgctagaggggctgggcctctctttgcacatggacactgggcccctctctatattgagtggtctgttaacattcattggtggctgattccaaaagatgagagccaaagctgcacggactcgagtcctaggctgcacacctcacaagcatctcttctactgcattctgttggtcgaagcaagtcacaacccagcagattcaaggagtaaggaataggatccccctctggatgggaggagcagcaatgtcatattacaaaagggtgtggacacannn

SEQ ID NO: 23726 - DNA, 920 bp, Homo sapiens; identical to SEQ ID NO: 21122
  misc_feature 917, 918, 919, 920: n = A,T,C or G

SEQ ID NO: 23727 - DNA, 1200 bp, Homo sapiens
  misc_feature 1, 2, 3: n = A,T,C or G
nnnaagcctgcccacctagggtggactgcctggcagaagaaagaagaaccggccaggcacggtggcacacgcctgtagtcccagggcactgggtttataggcgtgtgccactgcacctggcctcctttctttttctttaaaaatggtcataagctttgtaaaaagctagtttgctttaaatagaaagtagtgatttacctctgcattttattcactcaggttctataaaaaaagtctcagcagattttacaacattgaccttacctaagaaattgaaagcaattggagctaaaaagtcaaatcacttttcctctctattgtgttctgccaagaaactgaaaaatattccttggtatgcatgtatttttttcctcttagattaaaccaccattagccttaatgacacagtcccccaaatacctagaagaatatatacttcagtggaaccccgagagaggtgtaagtaaagcatatatatgttatttaaataaccagtcctcacctagaacatatttgaattgtatatctatttttaaacataaacacaaaaagaatttcaaagaacagaaggcagatgtgaatattaagaaaatctaagacaatatgtattactgtgcagctgtcatagactgtactggaagagtttttgaagattgaatattgatacttaaattatttctgaagctcttcaataaagttttctaattataaaaactccacataatttggttcaagccaagaaacaaagtcattttactctaagatttattctctaaatatagtaatgagatctgtaaagtctgtgttttgctaattaaaagagtaaatctgcgtattttctgcagactgctttctttgaatctgtttctaaaccacaacttgataagtttttatgggtaactgggaatatggtcaacactgagttttccaagggttccatccaggagtatttcattttaggatgctgtttggacacagggtttgtaactttgttctctctgggtcctacctgatctctggctgtgtcatttcagggagtgtgtgaaaataaagcccagttcttaaccaaggagccaatacccttgatataattgctttggatatttggacatattgggagaaatgtgtccaaatacttttcttttctttctttctttcttttttttttgaaaaggcaaggtctgtcgcccaggctggagt

SEQ ID NO: 23728 - DNA, 920 bp, Homo sapiens; identical to SEQ ID NO: 20829
  misc_feature 1, 2, 3, 4, 5, 6, 7, 8, 9, 10, 915, 916, 917, 918, 919, 920: n = A,T,C or G

SEQ ID NO: 23729 - DNA, 579 bp, Homo sapiens; identical to SEQ ID NO: 20440
  misc_feature 1, 2, 578, 579: n = A,T,C or G

SEQ ID NO: 23730 - DNA, 3499 bp, Homo sapiens
  misc_feature 3490, 3491, 3492, 3493, 3494, 3495, 3496, 3497, 3498, 3499: n = A,T,C or G
gggagtcgacccacgcgtccgaaaaaaaaaaaaaggggggggggggctgcttcctgccgctcgacgccgcggcaggccgcatgggggagcgctggcgaggcacggacggcgggcgcccggtacctctgcccgcggtcctcgctctcgggcggggcggcggcgacgcggacctgcggactagcgaacccggagcacgacatcataaaataaatccatcagaatgacaccttctcaggttgcctttgaaataagaggaactcttttaccaggagaagtttttgcgatatgtggaagctgtgatgctttgggaaactggaatcctcaaaatgctgtggctcttcttccagagaatgacacaggtgaaagcatgctatggaaagcaaccattgtactcagtagaggagtatcagttcagtatcgctacttcaaagggtactttttagaaccaaagactatcggtggtccatgtcaagtgatagttcacaagtgggagactcatctacaaccacgatcaataacccctttagaaagcgaaattattattgacgatggacaatttggaatccacaatggtgttgaaactctggattctggatggctgacatgtcagactgaaataagattacgtttgcattattctgaaaaacctcctgtgtcaataaccaagaaaaaattaaaaaaatctagatttagggtgaagctgacactagaaggcctggaggaagatgacgatgatagggtatctcccactgtactccacaaaatgtccaatagcttggagatatccttaataagcgacaatgagttcaagtgcaggcattcacagccggagtgtggttatggcttgcagcctgatcgttggacagagtacagcatacagacgatggaaccagataacctggaactaatctttgattttttcgaagaagatctcagtgagcacgtagttcagggtgatgcccttcctggacatgtgggtacagcttgtctcttatcatccaccattgctgagagtggaaagagtgctggaattcttactcttcccatcatgagcagaaattcccggaaaacaataggcaaagtgagagttgactatataattattaagccattaccaggatacagttgtgacatgaaatcttcattttccaagtattggaagccaagaataccattggatgttggccatcgaggtgcaggaaactctacaacaactgcccagctggctaaagttcaagaaaatactattgcttctttaagaaatgctgctagtcatggtgcagcctttgtagaatttgacgtacacctttcaaaggactttgtgcccgtggtatatcatgatcttacctgttgtttgactatgaaaaagaaatttgatgctgatccagttgaattatttgaaattccagtaaaagaattaacatttgaccaactccagttgttaaagctcactcatgtgactgcactgaaatctaaggatcggaaagaatctgtggttcaggaggaaaattccttttcagaaaatcagccatttccttctcttaagatggttttagagtctttgccagaagatgtagggtttaacattgaaataaaatggatctgccagcaaagggatggaatgtgggatggtaacttatcaacatattttgacatgaatctgtttttggatataattttaaaaactgttttagaaaattctgggaagaggagaatagtgttttcttcatttgatgcagatatttgcacaatggttcggcaaaagcagaacaaatatccgatactatttttaactcaaggaaaatctgagatttatcctgaactcatggacctcagatctcggacaacccccattgcaatgagctttgcacagtttgaaaatctactggggataaatgtacatactgaagacttgctcagaaacccatcctatattcaagaggcaaaagctaagggactagtcatattctgctggggtgatgataccaatgatcctgaaaacagaaggaaattgaaggaacttggagttaatggtctaatttatgataggatatatgattggatgcctgaacaaccaaatatattccaagtggagcaattggaacgcctgaagcaggaattgccagagcttaagagctgtttgtgtcccactgttagccgctttgttccctcatctttgtgtggggagtctgatatccatgtggatgccaacggcattgataacgtggagaatgcttagtttttattgcacagaggtcattttgggggcgtgcaccgctgttctgggtattcatttttcatcactgagcattgttgatctatgccttttgggcttctcagttcaatgaagcaataatgaagtatttaactctttcactacagttcttgcaagtatgctatttaaattacttggccaggtataattgccagtcagtctctttatagtgagaaaatttattggttagtaatataaatattttaaactaaatatataaatctataatgttaaacatatgttcattaaaagcatagcactttgaaattaactatataaatagctcatatttacacttacagcttttcatttgatcaggtctgaaatctttagcacttaaggaaaatgactatgcataattatacctgaccatgaaaaaaataagtacctcaaatgcatgcatttgcactggtgattccaactgcacaaatctttgtgccatcttgtatataggtattttttacatgggttgacatgcacacaacaccattttcattcagtatgaaccttgaggctgctgccatttttccacttaaccaaaccagcctgaaggtgaacctcgaaacttgtttcataaatctttcaaaagttgttttacatcaatgttaaaatttcaaaatgctgcagggtaatttaatgtataaaatattagtaagaaaaagtatgtattgcatacttagtagaatagatcacaacatacaaattcaattcagtgcatgctttaggtgttaagcatgagattgtacatgtttactgttaggtccttgcatctgtggtgctaggtgagtatgagaagatgtcaaggactggacgtattttgttgcctaaaaaaaaaaggctgtttgtaggcgttttaaatatgcttattttgtgtgtctctcactacctattacacactgttgctttgtgggtttgttttgtatgtgcgtgtgttatacagtagttaaatttccatgcagaaaaataaatgtcctgaattttcatattagtattctttattgtatatcatgcatgtaatttatttagaaatgtaggtcttactaaatgtatatgcatgtatttcagattatactaggatttcttggattagaagcagattgtgttaactgtaacttaaagaatgaatgttaaataaaatgatacagatttattttcttcattacaaaaaaaaaaaaaaaaaaaaaaaaaaaaaaaaaaaaaaaaaaaaaaaaaaannnnnnnnnn

SEQ ID NO: 23731 - DNA, 1490 bp, Homo sapiens; identical to SEQ ID NO: 21073

SEQ ID NO: 23732 - DNA, 944 bp, Homo sapiens
  misc_feature 932, 933, 934, 935, 936, 937, 938, 939, 940, 941, 942, 943,944: n = A,T,C or G
ccacgcgtccgcatatatttaaaaactcaaaaccacagacttttatttcatattttgtgtaatttaatgggttaagaataaataattgaaggttcttgccaagggaagtcagtatagtatagtatttgagaggtcacatatctagtactaagttaaaataaggtcttgggcaaattaaactctgggttttagtttccttatcaggtaaaatgatgctagtaggagctaaagattactttgaaggttctgtgggaattaaggtaacatgcttaatataataagggttcagtaaatgttacctattgtttgctgttaatcagataagcagaatacattctatgtgacctacctttctttataggtgaaatgtgggaacgttaggaatttctttaccacaaagtccctcttcatatgccagtcactaagttgtaggaatttaaaggtgtttttgggataattgtctatactgagaaggttcaggattctaaaaagtaacacatttttattttataaataaagtctagctctcttttgcacaattttttgttagacacaaatgccagaccctaagaccttcaagcagcactttgagagcaagcatcctaagactccacttcctccagaattagctgatgttcaggcataaggttgtttacaggtgaacttcatgacacctttgactcttctactgtctcagaccttaggtaacatacctgcagctgcttttctaacaaactgttgatcagcaaaaataaaggggctacagaaacactcatttttatgctgttccctcttgggcttcatgaaagacaattctgtgtaaatgtacagttgactctgatttggaaatatgaaatcagtccatccttgttataaaaaatttttttacaattgtaattatattgatgttcatattgtgtaaaataactcannnnnnnnnnnnn

SEQ ID NO: 23733 - DNA, 555 bp, Homo sapiens
  misc_feature 1, 2, 3, 554, 555: n = A,T,C or G
nnnccgaggtacttctatgatatagttgtcaaaatcaactggaggataataaaatattgtgggttctcagcattcttagaatccaaattacaaccatatcagtaagggtttggtccacatgagccaactgaagtcattttcctcaaggttggaatttgtgccaacctaaatacgttgtttctttgatggtgtttattgctattggtattattttgaactaataacaattattttgtctaaataatgctaagacaattctgttaagaattttgtcagctaacataattcattaagtatgtttggcatcatatggacaaaatatttggatgaatgactaaatttctgacacaattaaatattttggcattctatagacacatctcctatgtatgtctactgtaattaatccaagttaataaccaagttttctgaaatacttggcaggatttttggtatgaagttgggtagtggaatagggaatgaagagtgagttctaaaatacaaatatgaaagcaggtaatatatatcacaaaacaggggtctgatgaaagtann

SEQ ID NO: 23734 - DNA, 1490 bp, Homo sapiens; identical to SEQ ID NO: 21073

SEQ ID NO: 23735 - DNA, 1220 bp, Homo sapiens
  misc_feature 1219, 1220: n = A,T,C or G
acgcgtccgtgaagttttaatgaataaacgtttaatcaattagtaatggcggaaactgtcgctgaagcacttaagaaataaaggtactttacagcaacattcgccatactagcggaggtaaaacaaaagaaatattgaaaactgaggcagttaaccaaagtagctcatataaataataaaaccaatctgagtttagcctcatttgtcaaggtttggttgtaattgtcttaagactagtggacatacttactatgttctcctttttaaagtattcttatttctttgtgtggaaatgttatatctggggtacttacatgattgaggttgactatatgaggtactgttagtctgttagtctttcaaattgacttttaaaaatacatatctttatgattttcatcataaagactggcaatattataactaaaaatcttactataatgaaagaaatcatacataaaaatgtagcctgccttacatataagctaatgtagaaaagtttagacttataaaaaggcagatagtatatatatatttatatacatgtatgtatatggtatattatacatttggtggcagaaaaagaagatactgcattttcacattgaaaagaatactttgatttttgaaggtatttactttagggttcttttaataataatgtccgtcctaatgctttaaatatatgatttaattgtaggaattggtttacacagaacttttttggaatacatctcttagtaaggtgaaatataataatataattgtatttagttactattgtagataacttaaacttgagtagtgatttactgttttataaaatgctttcatatatgttatctcatttgaacctcataaccagccctgaaatagtaaaaacaagctatattcccactttataaagaatttgaggttaagataaaaggactcatttaagctcacatggtcagtaggtggcagagctactagtagggaaagaagaaagctagcattaatgaatgcttactatgtgccaggtactacatcctgtcatttaatcttaacctagtctgggagatgcgtaatataattctggtgaagtaatagtttcagtggatgattgaaaacaacaacaacaaaaacaaaatgaaactaatctgctgcctctaatttccaaaaatgtaagaaattttacaattgtgaaaacctcatggatttgggcaaactgaatgtatann

SEQ ID NO: 23736 - DNA, 1380 bp, Homo sapiens; identical to SEQ ID NO: 20118
  misc_feature 1380: n = A,T,C or G

SEQ ID NO: 23737 - DNA, 833 bp, Homo sapiens
  misc_feature 1, 2, 3, 4, 5, 6, 7, 8, 9, 10, 11, 12, 13, 14, 15: n = A,T,C or G
nnnnnnnnnnnnnnngatgtaaaaaaaaaaagccctatttcgcactaacattttattttacaagtattttaatcttatattttggtattagaaaaatttgtctattttttcattttgaagattaaatgttgcttacattttaaaagcatgggtgaagtgtacaacaaaccaataatgataaaaaatacttctctttttctccctgtttccctttttcccttggccacagccaaatgctaattgctgctttaattacagagatgtgtaaatgtattcagattacaaactctacaggaatacatcaacattttaactcttttgcgtttttactgtttaactgttttaaatgcaagttattttagggtgacactccttccagttctggccagatcatgagtttcaagatcaagagtaaaaagttattagaattaaacagttttataaagggaggcagcccttttccctcaagaacaactttgttgagagttactacttgacagcaagcacagaaatgacaaatttaaaacttttacacatggcatttaccaaaattcccagtgattattttgtttaaaagagggaacctaaatatctactctattccctttcagttaactccacagaactttgtaggcatccatgaatacctgttatagtgggttaggtgtggagataaggaatttggacaaagttgagtaagtttttactgggtatctgctttgcacccagtagtctgcaacatgagtttaaactcaggttactactttcacttatactttatggagaagatagacagtgagggaggaatgggaagctgttatgagagtgcaccg

SEQ ID NO: 23738 - DNA, 1090 bp, Homo sapiens
  misc_feature 1090: n = A,T,C or G
ccctcagatcacttacgatgagcaagcacttgtgctaagtagttaggaagaatgggcattccatcaggtacagtatacaagtttttccaagaaatcctaaccctgggggctcaggcgaatgaggagggtcaaatgctgagggtgggagaaagcagatctagacagcattctggaattgttgctttgccattatttgcccagaaaacatttatggcaaggaagcctgaaaacatggcaatggttgtaagatgggttgcgatacaactggtgatgtgagaagtgaaaatgaaactgactcctttagggaggacattggtttatagtaaacaggtttgcctcatcagaaatgaatatggatattgctacacaataaaaagaggaaaaacaccaacaacagtaacaatggtaatcacaataatgataatgactctgtaggtatagaacctccagttttttgtgttctgaaggttatttcagagtttcttgcaagagagaaaacaaatcagaaaaaaaggggaagagagaagatgggaaaataatttatgtatgggtatacaaagtaagatataggcagtcagagaaaaacagatacagacagaaaaggaaaagaaacttagagaagatataaaaatgctactggaaattgcctctgtggccttagtaccagaaaagactgggctctcgctccacagagggagtgactccatagcccagattttttgaaaagttttgatttaaggatttttttttaagtcagggtgatacattcaatggataactaaatgtcatttaattttttatgctctgcaaaaatatccatctaaacaaaactcataaataagaaagaatcctgttagatcactggcattgatttggttttgagagtatggtagcctcagggatgtcacggcagtaactgaaatggccactgggcatggtgagttttgaaatcaccaaacccagatctatgaatttccaggatatttcaccaggatgaaggaaatgttaaaaacaagaaaacaaaacaaaacaaaacaaaatgaacatttttggacagagctttgcctccacgattctgatcattccatgn

SEQ ID NO: 23739 - DNA, 5301 bp, Homo sapiens; identical to SEQ ID NO: 21447
  misc_feature 1, 2, 3, 4, 5, 5179, 5180, 5181, 5182, 5183, 5184, 5185,5186, 5187, 5188, 5189, 5190, 5191, 5192, 5193, 5194, 5195,5196, 5197, 5198, 5199, 5200, 5201, 5202, 5203, 5204, 5205,5206, 5207, 5208, 5209, 5210, 5211, 5212, 5213, 5214: n = A,T,C or G
  misc_feature 5295, 5296, 5297, 5298, 5299, 5300, 5301: n = A,T,C or G

SEQ ID NO: 23740 - DNA, 4409 bp, Homo sapiens; identical to SEQ ID NO: 21026
  misc_feature 1, 2, 4400, 4401, 4402, 4403, 4404, 4405, 4406, 4407, 4408,4409: n = A,T,C or G

SEQ ID NO: 23741 - DNA, 516 bp, Homo sapiens
ggagtcgacccacgcgtccgcggacgcgtgggtccccacgcgtccgaaagagttttgggtactcaaaaactcacccagcctcaacttgaaaatgattcatatgccaaggaaaaaccattcaaatccattccgaaatttcctgtcaactttttaagttcaagaacagactctattaaaaatacttccctaattgaatcagctgctgcattctcttcccaaccatcacgaaaatgcttgctggagaaaattgatgttataacaggggaggaaacagaacataatgtgttaaagataaactgcaagcttttcatattcaacaaaacaacacaatcctggattgaaaggggcagaggaacgttgagactgaatgacacagcaagcactgactgtggaacattacagtcaagactaattatgcgcaatcaaggcagtctaaggctgatcctcaacagcaaactctgggcccaaatgaagattcaaagagcaaaccacaaaaatgtacgaataacagctact

SEQ ID NO: 23742 - DNA, 3106 bp, Homo sapiens
  misc_feature 3100, 3101, 3102, 3103, 3104, 3105, 3106: n = A,T,C or G
ggactatgcagcgtttaaagttagtgggttttgtgatttttgtattgaatattgctgtctgttacaaagtcagttaaaggtacagacattacaggtgttgtagacagaggcacttgtctcgtgcagagggattaaatttgacctgtgagattatatttggaaaaattcatgtctgtaactaacccattagtgcagtatttaatttgttactattccttcccgccaattctgtccactcctcacctcgcatcagctataaatttggaagtacttgtccaggcactcaagtgacttcatatttctctctgcccatgggaaaagagataggctttatatttccacagagtgaaaaatcctctgtcatggagcctgtcctgccaagtggcaagagtgtggggactgtctggtgatgatgtctttcatggcatctgagtgaagagtgacaggttggctcaacttttttctttttttttttttaattgccttgtattgtaagtattcttccctgcagtccaagtgacttttcattttttgttttaacttcaggcaaaatctttaaccactctggcctctgtttcccccaccaacggggagcagtgacatttacctccctcacagagtcactgtgaggattctatactgatttgaagtggagctgttcagaactgaaccttgtaggaaattccaagggcctttctactgaatctggtgatggggtggggccgtggcactttctctgccacagctgttcttcacagtgttggtgctaatgaggccagggtgcagggttcgattcacacgtaggccagttaacttagagaaaatctatttccttacctctagccagtcacttcctttttccgcagttgtgatgggttttgctgagccatccactctgactgatttcctctgaagtaaacatatttacaatccaaagcaattctactgacagaagtgttgccttcataatcaaacagcttgtttttccatctcctctgcaaccctaattaaatgagtacaggtctacaaaatgttttcaaggagaaaagcagcatatccttaagtgaagtattatatttttcaataaccctgtagtggcttgatgcagggaaccctgggggactttcagcgaagagctgtgctcttttctgactagattagagcgtttggagtggaagacgtcaaatgtgtagtgagatggaggttttacattgttcttctactggctgtgatgaagtgccagaatgtctctttagaacaagagttagattccccctttctccttattgccccttccgttttgacttcccctttatttatttgctgtctaattaggggccaagtctgtaaagttttgtcaaagtgagttagaagttgttttctcttactatttgtgtttaccagagttgggagataagatagtttccatgaaggtgtgtatgttttatacgatgtttgttatagggccatgcattggtaacttgaaaatagaccagcttaatgtcttcaggatgtaaaactctgaatacacggcgtctctttttcatacattgcatgtaagttgttagtacctcacaagctacagaagttcagccatgagattttgtttggcaacatgaacagatttgtgtataactgcaatggccttttttccagatttccttattgactttttgtttgccttacctggggctagttttttatgctttgtacctagaaaacaaaaaattacattcgttgggctttttttcaaggttgggattaccacaccacctggaatatcatactgtggtttctgcctaaaattggcacatgtaagtattgaagaaaatggttatataattcagttgaaactcttggttattagatgttaggcatctcctgtatgtaagacacaaggccaaccacaacacagaacgatgttgacctgttaagtattctctgaaacatggccaaaatgcattttatgagcttttttttttttgctattgtaaatattagtggtttacaatgcgctttagacatatttctttaaaatgcaagcagtgagaaataagacctctctgaattagtagctctaaactgttaacatagaatgttacttggaaaaagtctggaatatgtggtgtacacaagcagtgcttcgtgaatgagtttcttagcttttatagtgcgccatgtttctcaaagtttgtttttgttgacaaaacattttataatatatatcttatgtttattttttttctcaactaattgtgtactgcactgtaaggtgaaaattagccatccattatttatcttctgtggcaatgcatttatatggttgattgggtggggaattttttgcagaaagatgcaaagtgattgggttttcgacttcctatcgcagggagcttttaagaaatattaatttcctatacatttttccaatccccatgcaaactgttcctgtttacataccttctctgttgtatcagtactttgagtgagaagacagtttatttaaaacttgagcaggctgttcagcattttttctgcttctgaaatctgtatagtacactggtttgtaatcattatgtcttcattgaaatccttgctacttctcttcctcctcaatgaaatacattatatattatctttatgtactcttaagaaaaacgagcaaggaagagtatcttcattattctcattttctctgagttggaaacaaaaacatgaaggactccaactagaagacagatatttacatttaaatagattagtgggaaaactttaagagtttccacatattagttttcattttttgagtcaagagactgctccttgtactgggagacactagtagtatatgttggtaatgttactttaaaattatcttttattataggccataatatggttactcgttagagtgggcttcatctgatggttcatgatcagcagtgatttaaaggtcctttattatttagtaattactaagttttgaaacttttaggggtgcgctgttgtgctgattgcaaaatacggtgggaaggggaagagatctgtaattgggaggaaaagcgaagttataaaagttttggcgcaaacacagggtgcnnnnnnn

SEQ ID NO: 23743 - DNA, 940 bp, Homo sapiens
  misc_feature 939, 940: n = A,T,C or G
actaaaattccttggttcactgattcgaagaagaacatcagcaagaacatcagctcggatgggcccttagagagcaacaatagatttgaaataagggacaagccaggaggttgccggggggcgggtagggggatagttgcaaaaatgttctgaactttaaaataacggtcccttgcaaacagaagttttttctccaaagtgtctctcctccagatctcccatctaccatttccaccctgcatgtgaatctcacttctagaggcagctgcctcgcgttcagcttacgacaccttcagaagctttgctaataaatgcatatcgaaaaagcgttctgcccatggggaccaatttctttttccatcacccgtgacttctcaacatgaaattaaaggcagaagcaagtaattgcagctggtggcagctcccaaggtttagctactgccaagggatctggtccatgcctcgtcccctctgtttctccctcctctcatccaaggaccaagcaaaatatggggcatgacctgcaagaaggtgatcctcccagctagagcacagctctctgagtagcagttctcaggaagcctgtgagctagcccagccaggggcttttccaggctttgtctcaagtgcagggcttggagaagaatattgccagccttcagtcccaactcaggaccatcagtgacctcatggggacctcactttggtgggaggggttggaggatgatgctctcctcccagggaagtaagcctaagggcagattcctctctctgccctgggggagaaagtaaaagggagggagggcttctcacagtgcccatctggccctgtggagagttgctggtgacatttcagtcagtcatccagtcaaactcatgtgtacctgcccgggcggccgctcaaagggcgaattccagcacatggcggccgtgactagnn

SEQ ID NO: 23744 - DNA, 2669 bp, Homo sapiens
  misc_feature 1, 2659, 2660, 2661, 2662, 2663, 2664, 2665, 2666, 2667,2668, 2669: n = A,T,C or G
ncgcgtccggtgactgtgaagtctccagttttgccttctgggcatcatttacagattccagcccatgctgaagtgaaatctgtaccagcgtcatcattgcctccttcagtgcagcaaaagatacttgcaactgccaccaccagtacctcaggaatggttgaggcctcccaaatgccaaccgttatttatgtatctcctgtaaatacagtgaaaaatgtagttaccaagaactttcaaaacatttacccaaaacctgttacagaaatagcaaagccagtaatactaaataccacacaaattccaaagaatgttgctacagagacacaattgaaaggtggtcagcattctcaagctgctccagtgaaatggattttccaagataatctacagccttttacgccatctcttgttcctgttaagtcttcaaataatgtggcttcaaagattttaaaaacttttgtagataggaaaaatttgggagataatactataaatatgccaccattgagtaccatcgatcctagtgggacgcgatccaaaaatatgcctattaaagataatgctttggttatgtttaatgggaaagtctatctgttggctaaaaaggggacagatgttctgccatcacaaattgaccaacagaattctgtttctcctgatactccagtaagaaaagacacgttacagacagtgagttcaagtccagtcacagaaatatccagagaggttgtaaatattgttttggctaaaagtaaatcttcccagatggagacaaaatcactttccaatacccagcttgcttccatggccaatctaagggcagagaagaataaagtggagaaaccatctccttctaccacaaatccacatatgaaccaatccagtaactacttaaaacagagtaagactttattcacaaatccaatctttccagttggatttagtacaggacacaatgcccccagaaaagtaacagccgtcatttatgctagaaaaggaagtgtcctccagagcatagagaaaataagttcctctgttgatgcaacaactgttacttcacaacagtgtgttttcagagaccaagaaccaaagatccataatgagatggcatcaacatcagataaaggtgcccaaggaagaaatgacaagaaagattctcaaggaagaagtaataaggcattacatctgaagagtgatgctgaatttaaaaagatatttggccttactaaggatttgagagtgtgccttactcgaattcctgaccatttgacctctggagaaggtttcgattcctttagcagtttggtaaagagtggtacttacaaagagacagagtttatggtgaaggaaggagagagaaaacagcagaattttgataagaaaagaaaagcaaaaactaataagaagatggatcacataaagaagagaaaaacagagaatgcttataacgcaatcataaatggggaagctaatgtcaccggttcccaactcctaagcagtattttaccaacttcagatgtgtcacaacataacattctcacgagtcacagcaaaaccagacaagaaaagagaactgagatggaatactatacccatgagaagcaagagaaaggcactttgaattcaaatgcagcttatgaacaaagtcatttcttcaataaaaattataccgaagatattttcccagtgacaccaccggagttagaagaaaccattcgagatgaaaaaataagaagacttaagcaggtgctgagagagaaagaagcagctcttgaagaaatgcgtaagaagatgcaccaaaaataaaatctcctgtaaagacttcagtgaaatagctgttttttaaaatatacttcagcattaataagttaattgtaggtgtgttctgaaagtgtctttgaatatgaagcttgttttttcatcagtcgattgtacaactttaaggaatacagaaaaggttgattcacatatgacttgtgaataatttacatggggtatctatacctttgtcttagatacctttttttggaaggataaattttatatttttctattattttaactagaattctccaagtttgaatatttgggcagggtttttgttattgtttgtatctttacctaaattgctcaggcattattccagcagtagatagtgactgtgtattactgaaattttacaattcaagagaggaaatcagctccaaacttagcttttccagtggatttgtatatgtacttgctttatctctttacccttaaaatgatgataccttgtattcaccattgttttttttaatgtcgtgaaataatatgtattatggcaacattatttaaacattcaaacatttctcaagaatgagcaacatttgtaactttacaatgtaattttatataatccaaaggtattttagaattcaggccatttgatgttttgtttgcttatagtgatgtgttcccaggcaaatgctgctttttttttttttgggactatgtacatacgttactgagattgtgtaaaaagtagatcctgaacagttatcacatttaatatttcttaaactgtaaaagtgtaaaattcggcgcccaaattaaattgcgggaagaaataatctgacgtaggttaccacgcactgtatctcatctacacatatctcannnnnnnnnnn

SEQ ID NO: 23745 - DNA, 1803 bp, Homo sapiens
  misc_feature 1802, 1803: n = A,T,C or G
cgtccgctttttattaagctgttttgttaaaagcttttggttataggcatgaatattgttttgatggttaacttcactgacttatctgtaagtgtcattttatagtactttacagttgtcaaaaaaaatcttacatatattgatctagttgatcggtagaggaagcttgtgaagtaggtaggacaggttatgatgtcttcactgtatggacgtgaacccagggttctaataggtaggaatagggctcaaagtaaaacttttggttcagaagcttgactcataaactatactatatattcccaaaaatgtcagtattgacaacacagtctaactcttaaataaaattatgctaattagttacattcaaaataatgtttataaatttatttgtctatactagtagaagtgatcagtgacatactataaataatcctaaatggttatatttgatagaattcataacacattaaagagaaaatttcacattaaaggaaggtttaaaaatctattttcagattataaaaggtgtctttactggttttcattccttttatctacatgtaattggacatgtaaacttgttaaaaatcaaaatcttactgattgtacagggagaaattaagcattctgttttaaaaattaggcttattgctagactgtaagtttaaaaacaattcatgttcaaaggagcttttcaaattacccagtccaccacagaatcagctaatgtgacagaagtaaatatagtgcgtcataattgctaaaaacagggtgaatttctttcacttaagttggaaaaccagcctctaaaaaattaggtgctggtaatgagagcttaataccatggttccctgcaggtctcagaaacattagtagttcctttcttggccctcactgtccttccagtgttggcctctggcctcttcccctcacatttatgttcattctccgggcttatattcattctctgctgctttctcccttcacccgtgggactctcacccttcttgctcattctccagcacccattcctactttagtctctttgaaatcttttttggagattttccttcagctacaaatgttccagtacaaccaatattactcctgaggggcaaagactttttcatatttatgtccctagtatctggtatggcgcctggcatatggcatttcagaatatgttcatagttgaaacagtaggatagatatttgtcatcttgacaagtagccctttgcaatttatacttgagttcactcctggtcaatggcacatggctggaaaatgcagaaagcaagttcacttacagcctgaggcttataaagcttgtacagctgcctcccggcagtccaggaaaactgcaaaaaatgggaagtaaggtcctggcaggcagacccggcatgtagccgctggccatcttgaatcctagggcatgaagttgccccaaagttcagcacttggttaagcctgatccctctggtttatcacaaagaataggatgggataaagaaagtggacacttaaataagctataaattatatggtccttgtctagcaggagacaactgcacaggtatactaccagcgtttggatattgatatatacatggcaaatctgaatattgttttatgagaggcctggcaatgggtaaaacaccaaacttgaaatcagaacataggtgcaaatggccactcctgtagtttcttttctgtaaaatgggatctggacgaatgataccaaacgtttctttctaacattgtattttataactctggcctatgattgtgttgtgtcttgcann

SEQ ID NO: 23746 - DNA, 1490 bp, Homo sapiens; identical to SEQ ID NO: 21073

SEQ ID NO: 23747 - DNA, 1715 bp, Homo sapiens
aagaagaaaaggaaagaaatgaagagaattcagagacttccattattattaatacctattttattgattctgtttctagccctgagtccgctcctaacttgctataggatctctggtaaatcatttcctgtaataagcagctgtcacctctctccttgtttcttccagaaatagtaatctcttctttagtagtactactactccctaacccaaaccaggtgattctagtgaagactgtcaataaacggagcatgtgatcaagcagggcccatcagaatccttccctaagatttttataaaaagctggacctattctttttccatttgagtggcaaatatttgaagatatgaggtctaaagctgtgatggcttattctccatccctgtgtaaattctggtctatagtaagcgaaaacaaggccattaggcagagggcagcagagacataaggtgagaaagagtgtggtctctggttttctagaccctgattctggtttggaggcttggctgatcacctcttcctttgattctgatagaaagctcaatgtatctttctaataaaacccccctttgctttgcttgttggagttaggttcttatcccttgcaaccaaaaatatattgtctcttcttttgttctcagttttctcatttatatatccttctagctccaaagcacagaaattctaaaacaaacaaacaaacaaacaaaaacaaacaaaaaaaacctgggtcattcagaaaatcccactgatatagactttctgatccagaatgtataatctgaaaagaagcctaccctcgtctccatcctctcttcttgtacctgaaggaacgaagaagagggatttctcaaggtgagaagcagttctccatggacactgatgacagcacaggcaaagtttcctatgactagggatcactgtccacacagagtctggcttcccaggtatccagcaggtagacaaaacagctaactccactgccactcctttctccacatccgttcctatttctcagccatctcagtgacatccgccatcttgagagtcaactactgactggactgagttgtgtggtatatgcttctgtttacttctcttctgtcttttttaagtggccaaatagcaaacgcttaaataggaaatctctgggagacttgaataaaagactttgcttggtagaaaatcatgtcacagaaaggctaatagacagcaaagtaaatcagcaagtccctgagcagtaggattaggattcctgtctcctttcagattcaaatgcatctgtttctggggttaacagtggactgttaagaggctgtgcagcttgggttaagtcattcttatctctgggcttcaggagcttagaccagatagtttctacaggctcccttggtgctgatgccttgggattctgtggctgttttctgtaagatctgcaagggggaaacaggatttcggcagcaatcctttcattactaaagcttccttccttttcgggtacacacataagaactgaaatggcccaaacccagaaagaaagcccaactagatcctcagaagacgcttctagggacaataaccgatgaggaaaagatggcctccttgtgccaccgtctgttatgatttctctccattgcagcagaagccgttcttctaagcagacagcaggtgatgatggcaaaatagaccacactcttgaggagcaggaggaggt

SEQ ID NO: 23748 - DNA, 6030 bp, Homo sapiens
  misc_feature 1, 2, 3, 4, 6029, 6030: n = A,T,C or G
nnnnagtcgacccacgcgtccgatctataccgagctgtacagccatcagaattagttggaagtgtgtggacaaaagaagacaaagaaattaactctcctaatcttctgaaaatgattcgacataccaccaacctcactctgtggtttgagaaatgtattgtagaaactgaaaatttagaagaaagagtagctgtggtgagtcgaattattgagattctacaagtctttcaagagttgaacaactttaatggtgtccttgaggttgtcagtgctatgaattcatcacctgtttacagactagaccacacatttgagcaaataccaagtcgccagaagaaaattttagaagaagctcatgaattgagtgaagatcactataagaaatatttggcaaaactcaggtctattaatccaccatgtgtgcctttctttggaatttatctcactaatatcttgaaaacagaagaaggcaaccctgaggtcctaaaaagacatggaaaagagcttataaactttagcaaaaggaggaaagtagcagaaataacaggagagatccagcagtaccaaaatcagccttactgtttacgagtagaatcagatatcaaaaggttctttgaaaacttgaatccgatgggaaatagcatggagaaggaatttacagattatcttttcaacaaatccctagaaatagaaccacgaaaccctaagcctctcccaagatttccaaaaaaatatagctatcccctaaaatctcctggtgttcgtccatcaaacccaagaccaggtaccatgaggcatcccacacctctgcagcaggagccaaggaaaattagttatagtaggatccctgaaagtgaaacagaaagtacagcatctgcaccaaattctccaagaacaccgttaacacctccgcctgcttctggtgcttccagtaccacagatgtttgcagtgtatttgattccgatcattcgagcccttttcactcaagcaatgataccgtctttatccaagttactctgccccatggcccaagatctgcttctgtatcatctataagtttaaccaaaggcactgatgaagtgcctgtccctcctcctgttcctccacgaagacgaccagaatctgccccagcagaatcttcaccatctaagattatgtctaagcatttggacagtcccccagccattcctcctaggcaacccacatcaaaagcctattcaccacgatattcaatatcagaccggacctctatctcagaccctcctgaaagccctcccttattaccaccacgagaacctgtgaggacacctgatgttttctcaagctcaccactacatctccaacctccccctttgggcaaaaaaagtgaccatggcaatgccttcttcccaaacagcccttccccctttacaccacctcctcctcaaacaccttctcctcacggcacaagaaggcatctgccatcaccaccattgacacaagaagtggaccttcattccattgctgggccgcctgttcctccacgacaaagcacttctcaacatatccctaaactccctccaaaaacttacaaaagggagcacacacacccatccatgcacagagatggaccaccactgttggagaatgcccattcttcctgagttcctctgtactgggatgtatattttcctagccccaaatccattgctggcaatggatgcactgaatgtgccagcactgaggagttaaaatgagaactccaaacactaacgactcttcttcaagatgcagtataagacaatgaattttaacctagatgtaattatacaatggaaatggtattccagtttagaatatggaaagaccgacctagaggaattggacaactgattgcacctgaaaatcataaagggactttttctggccaataggcaggagtcctctttttgtgaagtgatcttttgtgaagtgatcattaaagggatggaaaacacagtctagtgtccagcaggcccacatgacagtttttgtaattcaaattatgcacttttaaaaaaaaacaaacttaaacagggatcttaatatcttcctttgttttcctttgctttactcttctactttagaatattttcttaaaaatcactcaaaggactgtgaggaaaggctgtggtacctgaccttgttgaaatcaaggcccggcactgtactacaggcctgtttacagattattacggtgaactgaatgggtaccgaggcttcaccaaagaggtacttttttgttgttgttgttgttttaggaataattgtaccaattttaagagcattccccccacctgtccccacacacccaaacaaaatgtggtggtgttgccttcaaaaaagagaagttttgtgtcattaacatgacagaagaactttttaaaaaaaaataactgtcaactattctatttgcatttaggagactgttcatctatgctagattgtcattttccctccttctcccacagaagtttactggtagtccatgtcatggctcgtagctatccctctaaccataccatggaaatgcaggcacccaatgtgaaaaggagcacttgctgggcatcactgacaccgctcatgttttacacatagttgagtaatcagcatatctagaattatcttgcattgcctaaatcatatgtatatagtgaatgttatataatatacctggcaggtctgttttaatttaattgaataaagatacaaatactttgtttggctggcatatattaaattattatatgaagaaaatggttgattcttatttcttttagttgaaaaacacacaaaaacactaaacataaaagcacgttttgtggtacgccttggtttctagttctggatatatgtattaatcttaaagaatgatctaaagtcacagcttggcatataggaagatacttggttagaataggatgggtatcttttaagcagaactttgtaagtaagttttaagttcctaagcaacaagtatacagtttgttaaggtttatattgaacattctaccttgcttgaggttttctgctttatcaaaactattcataatagaacatctacctgcatcattactatcataatatggattattcataaagcgtatgtactgttcttctgagtctaacaaatactgtgactgaaatgcatgcaccttgttgaagagaaaacattttattaatctccactataatgtctgtgaaatgtgcagtattccatccttagagagttatctggttcatcagcatctgcatgtatcctctgaataatgaagcaacatttcagcaattctgttaaccacaccattagagacatttttagaagtgctgcaacatggtgggaacctagtactttaataatttcctatgatatttattagagcataaaatgtacatcacgatagtacagtatgtagtcctttaagaccagaaggtatgttaactgcaccatcattaagcagtctatcctgttttcttatttatttgttagaattgaatcctttctcaatatctgtaccattcctatgatggtagccattcttctctttataaaatatttcctctttgaaaagcgtcctaaaacattaatttcaaatcccctcttggatgcaaagtgtccctaagaccatccattcaacagtatttatgtgagccaacttactagagccgctacaactaatcatgatagacagtccagaatctccctggactttatactgggccagcctcattgtccctaagatttctctttttatgtctcatggattacttctctttttaattgccccaggcacattccaaatgagaacctggtaaaagtcacattggacccccttcagtatgtcttcggctaatgtgttagccttcaatataaggtgataaccccttttcaacctatctagtctataaagaggaaaaattcagatttggagttctaatcctatttctcccaaagggaactattcttctaccccatggttctaggagaccacttcactgtgcaacagttttacatgcattgtggatggaggatatttttattctgaactgttacatttaggtaaaaatattttctgcagtggtaactgattagaaaaatgccaattggatgcccttaggtggaggtgagaaaatggcatccttgccttcttctcaatatgaaacattaactagttgacaaatttatccttgtagaaatgaaaatctatttaatcagggaccagaaatggctgaggagataaatgcatcattacaaaattctgcttttgaatcctggacattacaagggggtaaatgcagcatgactttttgttaaccacattccaaaatgtggaacatttcttttagaaatgaaaatatttcaaggctgatgtattttaagactacacattatcaggaaacatacattgagagttcgcttaattaaaggttgttgggcatcaaattatgtttagtaggttactattctctaacaactcaaggatgctttaatggatctgaatttgacaaagagcatgccacactaatactacagtcaacaacagcccagagaacaattactatgtcagctggaggctatattatgattctaaattcttaaaggtttttttccctccataaatcaaaaattaccttatgtaaaccaaaaattagttggtatttatggtcatgatcttaattctcaagtttagcttaatcttgtatttcattgtttgtcttctaatatgacagcttaaattcagatttttaagtgactcagcaaaataggaggagtgtcccaatttattagtgttgtacatattgaagaaaacctttttgttccttcagatttagaaagaaacagtttaaccatttatttcttggtattctgctgctgtgaataggtttacttattcttttaacatatattgtgtgactacgcaagtataggtcctgttgtattgcattaatctttaccagtaactaaacatcacaaggttaatattggtttggctgaaagaattatgcagtaaagttatttataagggaacatgatgactttattcaatatttttcttctttgaaacatctcattactaacttttaagattatttcataatcccttatacatgagccaatgaaatattttgagctctacttaagaagcatgaagtctatattataaacctaaacaacaaaagcacttgtaacttgtttagtaaattccatgccttattttccatttttgacaccgtaaagtgcattttctgtcgactgtgagcaaatttcccttttgcctttaatgaaaatagtgcattaagtagccaattgctgcagaattataaagcaaattagctaacagtgggtcacattggactaccactcaaagaaacaagatgcataacagatgatggaaggtacatgtggtgtggcttagggagagcgcacctgtgccagatgcatgccactttcagtagctgccaaatgtgcctttaattaagaacatctctaatttttttcttcagatcaagtcagcatttggggtcgggatttgggcagggaactctggggtgcaaatatctggtgaaaccaccagagaatttgtttgtcaaagtgacatgtataattttagttgagacgtgtttgtgtatatatgtgtatttgcctttgtttagtagcacggttatttgctaaaataattgtcaaaaaattgctctgtcggtcggtctttgatgtaagaacaaagtgtggtctatacatctaatatggcctttgtacctaaccatgttcataggtaatctttgtactctgtgtgcagcagtatttggtttgcatttaaagtgaaaataacggctgttatttttctggcattactaagataaactgaaaaataataaagaaaaatgccttacatagccctcgtgtgtattatttttgcatgtatttatttgagggcgcccgttagactagttctagagaaaaaactttgccacacttttccctctgaaccctgaaacattaaaattgaann

SEQ ID NO: 23749 - DNA, 386 bp, Homo sapiens
  misc_feature 385, 386: n = A,T,C or G
acctgcaatatatttggagtattatgtctttattgttgttaaaaagtttttattgaatgtatgaaaattatcaaattgtattcatcattattaacatgtcctggggaaggaagggaaactttctaggacagaagtcactttcagatgtcatgtatgtattgggtgttcaatcatatctaacactgttttgatttttgtgggaaaatattccaggaaacgctaattctctttagactccttgttcttttatgactacaatgaacatatgtctatgtgatagctaaagatatttttgaattgtatgtgtgcttaattatcggtaagtataaatatttgagaaaacacatggtctggatatttaaaaccctcataaacatgttggcann

SEQ ID NO: 23750 - DNA, 555 bp, Homo sapiens; identical to SEQ ID NO: 23733
  misc_feature 1, 2, 3, 554, 555: n = A,T,C or G

SEQ ID NO: 23751 - DNA, 2330 bp, Homo sapiens
  misc_feature 1, 2, 3, 4, 5, 6, 7, 8, 9, 2326, 2327, 2328, 2329, 2330: n = A,T,C or G
nnnnnnnnncgaaagtcttctagtaattaattgtcgccggtcacaaatttctacttgctaaaatccatttaccttgacaggaatcaaacctgacagcagcatatcctatgtaatatatgatcatggctatttttaaatatgtagttttgtgtattactgtagataaaagttggtaacaaaattgtacagtggttttaagaagcccatgtaactaacttggacatgtctttaagtcacatattcatcataaaatctaaaatcctacaaactgattctattagattcttagggtaaattttttctttgcccacctccttctttttaagataagtatgcatgtcagcaaaacagagcaatcatgcttttaaagatgaactgttttaaagaaaaataaatgcatcaactcccagtgtttctgataaagggacatccttctaacttaacagactattctttatcttgaatttgaaattatattgttagtcatgcatttttgtaatgtcagggggaacctggtaccagttctcaaaactataggattatatgagtgtgtgtatacatatggcaaaattataaatgaccccaccttactgtgaaatatagtaatcttgagcaccttttgaaagggccaaacccataattaggtaccaatgtattttcaaaggtcaatgttaaaatgtttacatgcttttgaactagcattcatttatgattaaaacccttttcaggttatttgacctaaaaaccaaagtgagtgtggttaggttaatatgagatttttttacacaaaaatcattgtgtgcaattactgttctagctaagcaccttaatgcttctaagtgcttttcatttcgttgaggcaagacaagtggggctttcatcttttttttctctatgtcatttatattctagttatttctgaagagtgtactaggttgagaagtttctaatgtgaaaaatcttgttcatctgttcatgcaacagacatttattaggcatctgtagaccatataattgagacagagaaacattttggagaattagaagctcacactatttatggcataggttatataattatgataatttatgatttactttcttgacaaaaacagctacaaccatgtatacctactatttctcctacaaagtaggtgagattttttgattttacattagttagggaggtttttgatttggttttgctttaagataggcattgactatagcttctgattagcaacacacagtattttgtgcttgggtatctgtgagggtgtgtaattctagttgtcagaagctgtgctttttctccttgattttaatactagctgacctcaggcaaagccactcacctctcagccttttaaattgtgaagtgaatggactaaatggcattttaggcaattgttcccatattctaggccaacagtaaatattcagctctcctcaaaggaaaaatataaataatgctgatagaaagctcaaatttgatttttttattatgattatttcagctcttatggtatttaagtgtcttttatgaaatgttgattgtggtagcttggcaaaatagtaaggtggcagcccaatgttgatccctactttttttttcactgctccatggaatttaaaagtctgggaaccactaagccaacatcctatctaaagttctgagacttattaaggtattaaagtaacagttttattttgagatttagcttgtgttatatggaatttttcattagcacaatgtgttgaggtgagacttcatggaaagttactgtaaaaaacaaaaaaaagtccttacttccattcagtttaccatcatggatccaaactaagggtaaagccagtacatcctaatatgtgcccaacccataactttaaatgattaaatgaaacacacaacagggagatctattgttaatgtgttaaccaaaattgccaggaattgccctaaaggggaaaaattgtttaatcagtaaatcagtgaggaaatacaagattataaattagaagtgttgctatggtgttagctcttacatccctgaacaacaaaaaagacagttcaaccccaagcatggaacagaaaaatgctgagcttagaatgttgtcagctagatattgtgtaaaatagatgttctctttaatacctgtgtctctgtggataatgtatttctagttcttccatcctgtcccttacagataaccagaagtcaattcatgttaatattttgttctttaattgtgacatcgttttcatttgtaaatatgcagcattatgtagattcccagctttttcatttaaaataatttcgagcannnnn

SEQ ID NO: 23752 - DNA, 4345 bp, Homo sapiens; identical to SEQ ID NO: 21910
  misc_feature 1, 2, 3, 4, 5, 6, 7, 8, 9, 10, 11, 12, 13, 14, 15, 16, 17,18, 19, 20, 21, 22, 23, 24, 25, 26, 27, 28, 29, 30: n = A,T,C or G

SEQ ID NO: 23753 - DNA, 691 bp, Homo sapiens; identical to SEQ ID NO: 22001
  misc_feature 688, 689, 690, 691: n = A,T,C or G

SEQ ID NO: 23754 - DNA, 4083 bp, Homo sapiens
  misc_feature 1, 4074, 4075, 4076, 4077, 4078, 4079, 4080, 4081, 4082,4083: n = A,T,C or G
nactatagggagtcgacccacgcgtccggatggttccatcatggcgtcaatgcagaaacgactacagaaagaactgttggctttgcaaaatgacccacctcctggaatgaccttaaatgagaagagtgttcaaaattcaattacacagtggattgtagacatggaaggtgcaccaggtaccttatatgaaggggaaaaatttcaacttctatttaaatttagtagtcgatatccttttgactctcctcaggtcatgtttactggtgaaaatattcctgttcatcctcatgtttatagcaatggtcatatctgtttatccattctaacagaagactggtccccagcgctctcagtccaatcagtttgtcttagcattattagcatgctttccagctgcaaggaaaagagacgaccaccggataattctttttatgtgcgaacatgtaacaagaatccaaagaaaacaaaatggtggtatcatgatgatacttgttgatgccactgttatcatcctcctagcagaagatagtcctactgagaaaatgagcactttgatcattcagtctttgaactttaacctttgactggaagtgacctataggcaatgaagactacttccttttactgcatttttactcgtgtgcattctgggcgcatgttgatcgctggttcagtccaggcaactgacatgcttttattagtcatacagtattaatgcaggtgtcaggaaatgtcaaatataattccattttttatttttatttttttaagcttttggaaaagctccaggtcctcatgtattgtgcaataacaatgacttccttggcggttttggtacgttcattgccggcaatgggcgttgtaacaggaaaagttttcattaactcctgccattcaatgattaatgcatgatagggcctatgaaatgaacttactggttatagtgggaatataaataaagtgagggatccaacattactttaaaagtcaccccaactgtttatatttggattctatgcactgtgatcctaaggttaacagcatgaattaacatgcgtctttaaaggactgtaatgaaagatcattgcatatttattgaattgtttatatctactgtcaagttgttttgacatggaagattttcaagtaacattggcagagaggtacagtatgttatccctatggtgaaaataaattaatttgttgtatatagttcctcaatctctgaagtaaaggtatgagtaatatagggtatgaatggtttaatcaaggctttattttggaagtaagaaaaatggcagtgatgattaaattgctgcagtccataatttgggcttgttatttgtacattaaagattttttccaagtaagttacactctgttaacttcctgctagccatcagcatgagccctactgcctaaacactatttcatttatttatgtttggaaaccccgtaaacatttttgtttgcaatcttgtttcttttgttataagtcaagtttgaatgttacaatacttttattgaaacttttgttaagttttttcttgtaaattttctttacttgtgagtatcatcttgtcctttaatcctgtaccctaaaataagaaatacatttttgacagaggcttaatgttttaacaaaagagtgtggacatttttattttaaaatttaggcaaaagtcactatcaaatggttgcttatttgtctcacacagccatatagtttttcctggagggttttgttttgttgttgttgaaaagactttgcttacagctagatgaaactttctatagaaaaaaaaaattgttgaaaggtccagttctcagtaccatgtgagttaatgatactacaactaagttctttttaaaaagtgattaatgtattttataaattaccttttcacatatgcaaaatctgtttctactacaatgttatttttactaatgccttattgttgcactctttttgaaatatcctgcagtgaatatatgaatcaatttgggcttaaaactgaaagccagttggctgaaaggtttgaaatacgtaccccagtaaaaccattcaatcaataattggtaaataatattttaaaattgtttttaatctgtatagatgacattttgtagctttgtacatgttgttaattaagggcatataattttacactcaaagtataattgctgaactcaggggtgggtagacttcaaaaatatgtctgctatagaaataacttgaaaaaaaaaattaaaaccgtggccagccaccaaattgtggacactgtttatatactgctagttaacaattaccacttttaaaaaattataaccgtttttgttctatcttgactagataaattctcacaatgatctctgtcagttttattagttggcctgtttaaccaagacagaaagtctttgaattactcatagttttaaactgcttttaatatgaaaattgcagctgtaaattatgtattttcatattttgcgtaactgctctacactactgtttgacttgatcttcttctgggggttagggagaaatctgtctccatattgctggttctcttaccaaaatgcttttataaagaaatgaccggtgacatttattcaccaaaggaattaatatactgagtcaaagattaacaatgctatactatagagtaataggtcatatatagcctcaattgagttttttatgacaatattttaacatacctctctctctacatataaataccataaagtaaactaaaatgacacagaggaaagtagaggaaaatgaaataatttcggtacatcttatggtttaaagagtagaaaataagatgaaatatcctaaaatataggagcacagacatttaaaattcataatcaggctaacaacactctcttgaatttaggaatcattgaaaactccttgcacttagatttaatttatatgttagttacattattaaaagtcataaggcatttatctgagtcattgctctacagagagcaattaatggcttgtaataataaaaagaatatttctctgtaatgcattgttgaaagacaaccagaatatcaagaaaatgtatataggaatatgctacttgcctcctccctgcatttcctcgtggggcactatttgcgacataggcctacagaattagactttcatacttagaagataaggtacactcttcttcttttatttatttatttatttatttttaggccattcttctggtttgccaaattctattaagacagtgatacatttgcttccttatttatgcatgcttagatcatgaacatgatgcccttctttttttttttttctttggtcaagtagggattaatgccataggtttagagagaaggattgttttcagtttttaagagaattttttaaaaatacattttatggttctcttaaggaattaatattcacttctgaaggacttacttgtaatatataatttatcattttagccagcagggaaataaatcatttttaatccccagaagaaagtgctggaaatagcttctatatagtcagcagttcacctggagaaagatcttaattccttgttgttttgactaggaatatcaatatttggtataaaataactagaatagtttattaccttttccctcatgaaattttaaatatatgcaaatatatatatcattagattcctgtggtggataataatttcttcagattctaaaacaggtgtctagtgactgcttaattgtttccaagttgcatcaaagatgaattggtaaataatggaaatgagtagtgatatgaaaatggttatgtaactacatattacttgtttctggtaatcaagtcttattttttaaaagcctattgtttttcagaattgagatatttaaaacttgttataacttcttcctaaaaatagaagagaagaggaggtactgtgtgttacaaaaatttttttaaataaagaattcagtgtcactagttctaaaaaaaaaaaaaaaaaaaaaaaaaaaaaaaaaaaaaaaaaaaaaaaaaaaaaaaaaaaaaaaaaaaaaaaaaaaaaaaaaaannnnnnnnnn

SEQ ID NO: 23755 - DNA, 507 bp, Homo sapiens
  misc_feature 507: n = A,T,C or G
gcgtccgaaattatttcactagttgtttcatcaaaccctggctgtttctattttgtttgtatatttaaatttaatcttgtttttaggaagaatttaaggtgcttcatactcactacttagagactgatctgactcacctaataataaggttataatgggataatgaatattgttcatgcttattttaaaaaattatttttttaaataaaggccaacagatactaagattactttccataagcaacaaagtttaatgacttggtctgaattctgtcagaggaatcagtcagtccttaacataagggactgggccaaaatccaaacaacaaaaagatgaatattcctcctgtttcctcaacacacacacgtgcaaacaaagatgcattcctatgtacttttcaatatttttcttgcagcttggaaaagtatttggttgtatcctatgaatataaatgaagttatcagaggtaactgaagtcatattattattgatgaaggaattaatcn

SEQ ID NO: 23756 - DNA, 1490 bp, Homo sapiens; identical to SEQ ID NO: 21073

SEQ ID NO: 23757 - DNA, 844 bp, Homo sapiens; identical to SEQ ID NO: 20549

SEQ ID NO: 23758 - DNA, 920 bp, Homo sapiens; identical to SEQ ID NO: 20829
  misc_feature 1, 2, 3, 4, 5, 6, 7, 8, 9, 10, 915, 916, 917, 918, 919, 920: n = A,T,C or G

SEQ ID NO: 23759 - DNA, 316 bp, Homo sapiens
acgcatcttcccattcgaccttgtcctccaggttcactcacgccaaggaggaggatgactcagatcaggttgaagtccctcgagaccaagagaatgatgtcggggataagcagtcggctgtgaagatgaagatgtttgggaagctcacccgagacacgtttgagtggcaccctgacaagcttctatgtaagagatttaatgtccctgacccttatccagattcaactttagttggcttaccaagagtgaagcgtgacaagtaccgtgcctgaattaattattaatatttaaaatacttcattccttaactctccct

SEQ ID NO: 23760 - DNA, 1214 bp, Homo sapiens; identical to SEQ ID NO: 20119

SEQ ID NO: 23761 - DNA, 920 bp, Homo sapiens; identical to SEQ ID NO: 20829
  misc_feature 1, 2, 3, 4, 5, 6, 7, 8, 9, 10, 915, 916, 917, 918, 919, 920: n = A,T,C or G

SEQ ID NO: 23762 - DNA, 1490 bp, Homo sapiens; identical to SEQ ID NO: 21073

SEQ ID NO: 23763 - DNA, 1490 bp, Homo sapiens; identical to SEQ ID NO: 21073

SEQ ID NO: 23764 - DNA, 533 bp, Homo sapiens
acctatatcttcagtgtggaggtgaaggcagtattaacaatatcctatagttgactgaagagttggttacagcaaagctctccattgcccttaaattttctctctccttaatacagtaggatcaattttaagtgcattttatgtgtgcattttaaaactcttttttaaaaacagaatagaaatggttttcagagtgatgctgatattggttgatgatgccaaggcaccaatggagagcatattttttaaattgaatatgtttttattttcttgtttgttgatttttaaagtgaatccaaatgtgaagaggaaaaaaatcaaattctgccaatttgaaaagaacaaaaccagctaaaaccttcttttaaaatttctaagctattatgagaatactacagacaaaagattgcatatgaaagatttttttataaagaatcagattgctttgcctttctttagtcatttcaaaagtctttgtcaggtatgaaaaagaaatatactcaaaatgaagagtaaatataattaaaacagtt

SEQ ID NO: 23765 - DNA, 930 bp, Homo sapiens
  misc_feature 1, 2, 3: n = A,T,C or G
nnncgaggtacctctttcagtttcccaattagttatttgttttagattaaacaatagtgtaatgcatcaattccttgggtaatttaccgattggaattcctagtgtcatccttgagacacaagcaaaaaactcaacaatattatccacgtgaaatgggacctctaaactgtcctgttttgttacagcctctaatgagctaaaatagtataagaatcttgaagattaagaatttctgtagtgctctacttgcctgaaatttggggtgctaagcattaaaaaaatgcaattttagtgtgttatacttgcggacattaaacactatgtgtaaaggttgagaatttctaccataaaatacatagatcctctggatgtaaatcttgtatatgacacaaactagatgttagaccctaaaaaagatgttcagattctccatgtgtcagtctcttcattttaaagaatctaaaatacgaagaataaaacaatgtagggaaagtctttagaataatgaaatttacttgataagcattcaataaatatttgctattattactgatggttaatattgtcaacttgattggattgaaggatacaaagtattgatactaggtgtgtctgtgaggatgttgctaaaggagattaacatttgagtcagtgagctgggaaaggcagacccacccttaatctggtgggcataatctaatcaactgccaacgtggctacaatataagcaggcagaagaatgtgaaaagagagactagcctagcttcccagccgacatctttctcctgtgctggatgcttcctgccctggaacatcagactccaagttcttcaattttggaactcagactggctctccttgctcctcagcctgcagacggcctattgtgggaccttgtgatcctatgagttaatacttaatacattcat

SEQ ID NO: 23766 - DNA, 330 bp, Homo sapiens
  misc_feature 1, 322, 323, 324, 325, 326, 327, 328, 329, 330: n = A,T,C or G
naggtacaagagggtgcactaacaaaggtctgatttaagtgcttttattcaacccagtgaagggaaaatgacagtaatacatctaagccatgcataaaggattcaggcttccttgaaaaggattcacgtggcataaaatggtttgtttctccacagcaatttacatttattaaaatagataataggcataatcattgtcaaaatagagcttctaccctgtataatatcttagtacattccccgcgtacataaaatatatttaactattgataatgtggggtgggtaatactggctgggaaataatgttagaagcttttcacnnnnnnnnn

SEQ ID NO: 23767 - DNA, 2231 bp, Homo sapiens
  misc_feature 58, 2191, 2220, 2221, 2222, 2223, 2224, 2225, 2226, 2227,2228, 2229, 2230, 2231: n = A,T,C or G
tctcaaaatatctatgaaatacttttagacaaagattgagctggagaaagagatacanatttccatccccccagacagagagacatatttccattgtaggaaggcattaaacattttgaaacttgtgaatcatctttagaatttctactggggaattttacttcttcatccaaagtaaaagccacttatctcctttggttcccagtgacagattcagaggcatacgcagatatacaattttcaggctctagttaatcttcttccaatagttacgaacaatgggctaacaggcgtgggtgtttctccaaaaattattcatgcacaaggcagcccaaagcttcagggaaaactagaaatgtgttatggattagaataggactgttttaaaatgctagtaccaggtggaacgctatttctgcaacaggactctgtccatttcctttggaacaatatattccaagtaaaatggctcttccaaggaatgacacctttacttgacacccttcggcatacaaatgattttaccaatagccatgattattattaaggccttttaaaatacaggctgtttgaaaaaagacagattaaatattcacagcctttgtatcatggttatttgcttaaaacagcttttagaagtacaagtaataactttttgataagaaaccccaggagaaactttttggtaagaaacctcaaaaaatttgaacaaaggcattacataaaaaaaaaaaaaagctaaccactccattcaactctctcagaaaataaatttcaatgtgttcaatgaattgtcttgaacctgaaacctgcatttagatatcagtcccctgccaatagctaatattaacagaatttgaacaatcatacaattatgtctcaaatgtgaagactttgtacagtaatattttcactttctaaatgacccatataacattcaggaattatagatgtgtatgtatattttttaagtacagaaagttcagccagtcttcagagaagtaaaagtgatgtctattgtgcattgaagtaaatattacaaacattccagtttcgcaatacaatacttgagctttcgaacacctcagacactagaatgtgtaatgcgagtcaaaaaagctgacatacaaaacaattcccatttggctcagggttcctaaatgtcacaatatcttgggtaaaatatactttttgatttcctgatgatgtccttctaatcccttctgactttgattcctaacagccaggcactgttgacatgaatcattaacttccaaacccctttaaaatcaagaagctaggcgatcatacagtcatttcaatggccaaccagttcttgctctacagagcttttacacctttttgggaaacctgatatcaaacacatttatgttatatatttgctcccttgcattaattctagatttttttttaatttcttttagaaagggcaggggggaagtgggtcagagcaaggttcaagaatcacattcatccttgctctaaagtgtttacttgccagcaaagaaaggcaaacacatttttatattcagaaagcagaccggtcattttcaaagaaaaatgactgcaaccatgcctgtagaatgtttctgtgcaagcgcactaattttctatcacctgcatgctgtatataatacatttgcctgtatactaggaagaaaaaccaggctgttttccctgagtacaatgcagcttggatggctgggagcgtaagccttccgtgcatttttatagtgtacatatttgtatatactaactatatcgccatgtatgaacacagattttgttatatttgcttgtttctgtttcctaccaaactggcccacaatggggattcttttgtatagaaaaaatatgcttggaattttttcctggtcattctctttcaatagcttatgaaagaattagatctgagtttacaaagaaactataagaaccaagtttgtctgtctgcatgagtcccgtccaattgctggatctagggaggaaccaacttcctaattcagagttttccttttaaaggcatgctttacccccatgggaaaactgcacactcatccatgtagaattattctctttgtattttatctaatagtgcctgaaaatttttttaatgtcttcttagaagaagaattcataattgtcaaaatttgaaacattagcttaattntgtttttatgacctcaagattcttctccnnnnnnnnnnnn

SEQ ID NO: 23768 - DNA, 3560 bp, Homo sapiens
  misc_feature 1, 2, 3, 3529, 3543, 3551, 3552, 3553, 3554, 3555, 3556,3557, 3558, 3559, 3560: n = A,T,C or G
nnncgtccgaccttccagtagccggcggcggtgtctcaggcggcaatggaaggatccgagcctgtggccgcccatcagggggaagaggcgtcctgttcttcctgggggactggcagcacaaataaaaatttgcccattatgtcaacagcatctgtggaaatcgatgatgcattgtatagtcgacagaggtacgttcttggagacacagcaatgcagaagatggccaagtcccatgttttcttaagtgggatgggtggtcttggtttggaaattgcaaagaatcttgttcttgcagggattaaggcagttacaattcatgatacagaaaaatgccaagcatgggatctaggaaccaacttctttctcagtgaagatgatgttgttaataagagaaacagggctgaagctgtacttaaacatattgcagaactaaatccatacgttcatgtcacatcatcttctgttcctttcaatgagaccacagatctctcctttttagataaataccagtgtgtagtattgactgagatgaaacttccattgcagaagaagatcaatgacttttgccgttctcagtgccctccaattaagtttatcagtgcagatgtacatggaatttggtcaaggttattttgtgatttcggtgatgaatttgaagttttagatacaacaggagaagaaccaaaagaaattttcatttcaaacataacgcaagcaaatcctggcattgttacttgccttgaaaatcatcctcacaaactggagacaggacaattcctaacatttcgagaaattaatggaatgacaggtttaaatggatctatacaacaaataacggtgatatcgccattttcttttagtattggtgacaccacagaactggaaccatatttacatggaggcatagctgtccaagttaagactcctaaaacagttttttttgaatcactggagaggcagttaaaacatccaaagtgccttattgtggattttagcaaccctgaggcacctttagagattcacacagctatgcttgccttggaccagtttcaggagaaatacagtcgcaagccaaatgttggatgccaacaagattcagaagaactgttgaaactagcaacatctataagtgaaaccttggaagagaagcctgatgtaaatgctgacattgtgcattggctctcttggactgcccaaggctttttatctccacttgctgcagcagtaggaggtgttgccagccaagaagtattgaaagctgtaacaggaaaattttctcctttgtgccagtggttatatcttgaagcagcagatattgttgaatcactaggcaaacctgaatgtgaagaatttctcccacgaggagatagatatgatgccttaagagcttgcattggagacactttgtgtcagaaactgcaaaatttaaacatcttcttagtagggtgtggagccataggctgtgaaatgttgaaaaattttgctttacttggtgttggcacaagcaaagagaaaggaatgattacagttacagatcctgacttgatagagaaatccaacttaaatagacagttcctatttcgtcctcatcacatacagaaacctaaaagctacactgctgctgatgctactctgaaaataaattctcaaataaagatagatgcacacctgaacaaagtatgtccaaccactgagaccatttacaatgatgagttctatactaaacaagatgtaattattacagcattagataatgtggaagccaggagatacgtagacagtcgttgcttagcaaatctaaggcctcttttagattctggaacaatgggcactaagggacacactgaagttattgtaccgcatttgactgagtcttacaatagtcatcgggatcccccagaagaggaaataccattttgtactctaaaatcctttccagctgctattgaacataccatacagtgggcaagagataagtttgaaagttccttttcccacaaaccttcattgtttaacaaattttggcaaacctattcatctgcagaagaagtcttacagaagatacagagtggacacagtttagaaggctgttttcaagttataaagttacttagcagaagacctagaaattggtcccagtgtgtagaattagcaagattaaagtttgaaaaatattttaaccataaggctcttcagcttcttcactgtttccctctggacatacgattaaaagatggcagtttattttggcagtcaccaaagaggccaccctctccaataaaatttgatttaaatgagcctttgcacctcagtttccttcagaatgctgcaaaactatatgctacagtatattgtattccatttgcagaagaggacttatcagcagatgccctcttgaatattctttcagaagtaaagattcaggaattcaagccttccaataaggttgttcaaacagatgaaactgcaaggaaaccagaccatgttcctattagcagtgaagatgagaggaatgcaattttccaactagaaaaggctattttatctaatgaagccaccaaaagtgaccttcagatggcagtgctttcatttgaaaaagatgatgatcataatggacacatagatttcatcacagctgcatcaaatcttcgtgccaaaatgtacagcattgaaccagctgaccgtttcaaaacaaagcgcatagctggtaaaattatacctgctatagcaacaaccactgctacagtttctggcttggttgccttggagatgatcaaagtaactggtggctatccatttgaagcttacaaaaattgttttcttaacttagccattccaattgtagtatttacagagacaactgaagtaaggaaaactaaaatcagaaatggaatatcatttacaatttgggatcgatggaccgtacatggaaaagaagatttcaccctcttggatttcataaatgcagtcaaagagaagtatggaattgagccaacaatggtggtacagggagtcaaaatgctttatgttcctgtaatgcctggtcatgcaaaaagattgaagttaacaatgcataaacttgtaaaacctactactgaaaagaaatatgtggatcttactgtgtcatttgctccagacattgatggagatgaagatttgccgggacctccagtaagatactacttcagtcatgacactgattaatacaagttgtcttaacgttactccaggaccacttgattttggaaagagtgcacttaattcagaagctaaagaaaatcagttcataatactatggatttctctttcattaagccttaattttaagggaaacatcagtaagaaactgcactgaagaattataaaacattttggggcatagcatacacttgtctaacggttcacacgtggctatgatcacaagcaactttgaactggaatgctatttacaaaagttttgtgtattaatctgtgtattaatctctctggataaaaaaaaaaaaaaagggcggccgctcagtactagatnagcagaaaaaactncccacacnnnnnnnnnn

SEQ ID NO: 23769 - DNA, 478 bp, Homo sapiens
  misc_feature 475, 476, 477, 478: n = A,T,C or G
actgccctccttatttcagcgctgtcattctgatcactctaggaccggttgagactttttcgtgatacagtttcctacctttttaggcaaccatctgtaagacaaggtagaatgctaccataaccatgattaacatttgcaaacactctgccacagtgcagccgctttctttgcctccagctgaagaaattgaggtgcacagaggttaaatttgatgctcaaagcaatacaactagaaaatataggaggctgggctgcctgattgattcccagcttagagattgaaagtcacatgcgaagcgctttagcagatagagaagggggagtcatactccagcgtgcattttagtttgtgcttttctgtccttgaattaagaagtgtgacgtgtgcctccaacagcatagcatgctacagaaatggatttcttttcctggggttgataatctgctggccaaatctttatctctgtagtannnn

SEQ ID NO: 23770 - DNA, 623 bp, Homo sapiens
  misc_feature 623: n = A,T,C or G
actagatatccaaatgaaccgggagaattacatgttagatagcatttgagttaaaccagaccaatttatatgggacaatttactgttgacaacaaaatatttctgactgtgggtattcaattcaatgaggttattgcttaaggatcataattggtctggaatctttgaaaatgtgtaggctactttataaagttacataaaattgtgaaaaagttgcatgctttagaaacagtatttccatcaagcttgtggtctaaaaagaatatgaagacaatagcaaatggatgtttttaacacagtttcttagtatttacagtattttttcttctctagctgccatcccttcaaagctggtcaatggtttttctggggcttttttcacctcacattcagagcaaggaggcatttgcaatttctgtgggataggctgggtttctgcagtggcattacttgggggactttctttgtgcttcatggaacacggtctgccctcatcttgagagtcacaggctttggtacctcggccacgaccacgctaagggggaattgtggttttttccatcacaaggaacaccgatggcccagtgattctggccgtcctttttcacacaggaaacagctan

SEQ ID NO: 23771 - DNA, 798 bp, Homo sapiens
  misc_feature 1, 24, 52, 81, 796, 797, 798: n = A,T,C or G
nacatatttttgataatgtcatcntgttgcttgtttttccctgttcaatttnttcttggacacttctgatttgtttttctntcgcttgtctttcagtaaatatgacatccaaactttgtgtttctcgatcattttgagctttaagcatattgtaatcattcattacttcttccatttcagtgttggtattaagtttatctaccaacatgttgtagtctgctagttgtccttgaagctcttttatctcaacagctaaagtctcagccctcttttcatatgacaaatatactgaattctcttgattgtacatttctattcccttctgaagtttattaacttcagttgtaagttcacttattttacttctaagaagcccaagatagtaagatttgtctaaaatttgcctctggggacctttcgtcccagttttcattccagtcaaaccttgttgtgttacagggcgatgggcaactttgatttgagaagacagaactccaccagtccctatgggacaaccacgagaacctggtcttgctgtcccaggtggcattgcagttgccactcgaatatttcctgataggggtcgtatcccagaaggaggccttcctgttaacccaactccacctcttgaaacagggcgagctgctgaagatttgtgattgctggccattgtttcttcactttaatcgctccgccggcgcggaaggagggcagttgcccggctcgcgggtgccttaacttctttctgaggcccacgctcagttttcctcggctctcaggcctagagcggacgcgnnn

SEQ ID NO: 23772 - DNA, 3190 bp, Homo sapiens
  misc_feature 1, 2, 3183, 3184, 3185, 3186, 3187, 3188, 3189, 3190: n = A,T,C or G
nnagtcacccacgcgtccgagtggaccttcctgctccctgagactgttttgattgacatcttttgtgtttctatattttccgaggcagtattttctttgtatgttaatcatagttatagtaaagtcagactcattaacttttcttcctagtaattttgacttggattatcttctagcctgcgggatggggttcatatgtgttgtcgtaactttagattactaaacaaaacaaactgtttttttgtttgaaggtatcctttacatacctgtctgtaggtaagcaagtgttagtaaaaacaattttgtcaaacagtactcctgacagcttggtaaagtctaggtagagtttctgattttgtattatgtcctaagacttgaaagtgcatttgtctagttgccaaaagttctaaaaatgagatggtgggctttctcagcatctttttgcttcctagaattgagttgctcttgaagtctgtactcctgtgtcaaaaagatggcagactgcaaatgggcagtacaggctttgccccatgctttcaaagtaggattctggattgcagtttcaaaaaaatatgatagattattgttatagaatcaaagtgtcctgaagggagaagaatagctatagttgctgggcaaagagtgtaagaaagaaactttagagcatttatcaatacttgagtgctttattatgttccaggctagaaatgtgatcattgcatggcctaagtgtagtcattcatatatatatgaatatctatatctatatctatacatatatatgtatcgccattatcgagtgttttctagccctggataaagttaatttttttgaagtttgattgccaagcaatccagtgaatctaaagtaatttttctcactttaaagaccagtgatgaggagtctggtccttcctgtactgatactgtagaactccagtcaaacttcagtgcactgctttcttacaggaagacaactcagaacacacagccataatctgctttggtgtcagtcacatcacagtggttatacatttgtcctgaatggtgattcattcctttccatctaacttccttgtgacaaatagcatttactattgaaatagtcttaaaatagggaaaagagtgaaagttactcttatgcatgggagtgggcttaaagggttgacttccaccagctgagtacaaacaagtgtaaagaaaaactatgataaagtatggaggtcttgagaattgttcataatgaaatctttaatctgggttatcagagtaatgaaatcaccaataaaaacattccatttatcttggatcttctgtggttagcagaggagtatggtctagctatgttagcagcttgaaggcacaacgtaaaaggaatgagctttcacaaggtgcttacgttagctgggtagtattggtcaaaggtactctgaagagtgaatgcagaaatcagttggctgtgtttgtaatcttgtcccacatggaccctaacctttagtagacttcagtcttttagtccagtagaagacaatggccctgaatatgtgttttctgctttttggtggaaggtttcctgcaggtggttgggtggtttttgggttattggctactgttcgttcagtgccatttgaagacctgttgtttcttaatcctttttcttggtgtgactggccaggaaaaagtccattgagtcctttttttctccctggtgtcttaccccttctgtagaataatccatattttaaaatttgtttcacatctttatagcaaacctgccacagacttgcaagcagtgattttatctttccttcctgagaaggtgatctcacttttgatgtttgggtcacctgtggacacctgtgctcttttgagtctcaaggcttatagctttcacattggcttgggaacaacagacttgtgtgtggttctagagtgaaatgggcagtgttctgctggtcctcagtctttgagaggtcttaggcaacatccttagtatagtggaatttctgaggtcaaatttaacatttaatatattctccttttagttcattgaatctgaggttctaaatctgtagcttcattttgagcacaagtctgcattgtcattttttaagagattggcaggcatatccttttgtgatacttaggaaaagactatggatggcagcaaatgaaagtaaaggttctcaactgtgaatgaaatttagaaagataattcttcagcagttggttgattagatgggttagtgcttttggaatatataacagtagacttgtattctttatgcactatacatatgatacgcactgacagaaaagcacagaagacatactgctaagagtttctttgtgcatttcactactgttctaggggactgctgtctctttggttccttttaggtttgtgttaggatgttgcacaagtaatcatttaatgttaaatgcaagtgtccaaagaaatgagtcttaaagttctttggtcatatttcactttagagttaggacaggagacagctaacctgacttccattttacaaatattagaaactttttcttcagtaacaaaaacagggaaggacaataaaaccatgaactattttgctttatgtctgtttttaaaaaataattgttttgaagtttgcttattagcttaataccttatagtacttttaaaaaatcatccttggtaattattgacttatcctagatccatgtacaattcagacttttatctgttagctttaataaaaatttaaaaccatctcatttcagaataaaataaacggaattacagttcatgcattagcatttttaagtgaagttctcttaataagattgccttttgtctaaccgaaatagggcatacagattagtttggatgggaaagtggtaagacttgagtttttatatgtgcctattcaaagagacttgtgtggtttttcatttgctttaaagatgtatgggggataactagtctttacacattgtgggagtagtttgtcgcacaggggaaattgcgagttggtaaccattttggacctgcggtgaaaactggacgttccatttttggggaaacgtgtatgtacacgtgtgggttttagattctgaaaaacctttcataaagtgtttagacatggaaataaaggggtagttgataaaacgctcaaatctttagctaatgannnnnnnn

SEQ ID NO: 23773 - DNA, 3981 bp, Homo sapiens
  misc_feature 1, 2, 3, 4, 5, 6, 7, 3655, 3656, 3686, 3687, 3975, 3976,3977, 3978, 3979, 3980, 3981: n = A,T,C or G
nnnnnnncagctccgggggaaagagggtggcgtcccggggaagcccgcagccgccgccgatgtcgctgggactcggaagtgccgaaagaggggtgttgggaactcgcggcgcgcgtgaacgttgccgtcgccgccgcccgggacagcccggagaaactctcagcgtaggcatcgggaaccttcgtgccaaggagccatgccgccccgatgggaactggcactttacctacttgcctcactaggcttccacttctattccttctatgaagtttacaaagtctccagagaacacgaagaggagctggaccaggaatttgagctggagactgacactttatttggaggattaaagaaggatgcgaccgactttgagtggagcttctggatggaatgggggaagcagtggctggtgtggcttctccttggccacatggtagtgtctcaaatggccacactgctggcaagaaagcacagaccctggattctcatgctctatgggatgtgggcctgctggtgtgtgctggggacccctggtgtggctatggttttgctccataccaccatctctttctgcgtggcccagttccggtctcagctcctgacgtggctctgttctctcctcctcctctccacactgaggctgcagggtgtggaagaagttaagagaaggtggtacaagacagaaaacgagtactacctgctgcagttcacgctgaccgttcgctgcctctactacaccagcttcagcctggagctctgctggcagcagctgcctgctgcatcgacctcctactcctttccctggatgctggcctatgtcttttattatccagtcttacacaatgggcccatcctcagcttctcggagttcatcaaacagatgcagcagcaggagcatgactccctgaaggccagcctgtgtgtcctggccctggggctgggccgccttctttgctggtggtggctggccgagctgatggctcacctgatgtacatgcatgccatctacagcagcatccccctcctggagactgtctcttgttggaccttaggaggactggcgttagcccaggtgctctttttctacgtgaagtacttggtgctctttggcgtgcctgctctgctcatgcgcctggatggactcactccacccgccctcccccgctgcgtgagcaccatgttcagtttcaccgggatgtggaggtattttgatgttggactgcataatttcttaatcaggtatgtgtacattccagtgggcgggtcccagcatggcctgctggggacactgttttccacggcgatgacatttgcatttgtgagctactggcatggcggctacgactacctctggtgctgggcagcgctcaactggctgggagtcactgtggagaatggagtccggaggctggtggagactccctgcatccaggacagtctggcccgatacttctccccacaagctcgccgtcgattccacgctgcccttgcttcttgttccacctcgatgctgatcctgtccaacctggtatttcttgggggcaatgaggttgggaaaacctactggaataggatcttcatacaaggctggccttgggtgaccctctctgtcctgggattcctgtactgctactcccacgtgggcattgcctgggcccagacctacgccacggactaatgctgttgggcccaggccagtccttgttgctggcctccaaggcaaatagtgcttcaccctgacctctcactccaggacagcctctaagggatttgatctgctcatcttcagttgaatgccctcactccaagactggatgctggatctcatagaaaattcacagccagacaatcttctaatctggagtctttgagatcttctaccccaactcatcattttcctattgaggaaacgggtccagggcagtcgtgtgtcttacccagctacacagggtgacattttggtctagaacctagtctcatgagccctttgcattctttccccttaagcaagaatagaatgtagtggaaatttattgattgagacacagaaatcctgattagtgataggcctgtcttctgggcaatatttctaaaatatttgagtgacattgatgtttaagtgacctccttcatcacatcctgcagtatctccagaagcagcactagggtttgagtttcatgcttcagcccctctgtaggaatgagaccaagccacagctgtcttttgaattacgtagtcgaagaagacggtagcagccctgtagcattctaaggcatctatacccaaggagtcctgtgatttgagcttcagcagggtgatctacatttgggtgcttgtttctgagatttgcagagaagtataacatggtagttcctctaccttacagttaatcgtttcttaataaagaagcagaatttagaaaccacaggatagtgtacccacagatgggtgttatcaaggccagtcatgaggatggtgtcctggagtcttgtccaccctctccatacaagtctcaaaagtcatcctcctactcagtgattcacgtttagtggtttatattattaaggtttgattcaaacagagccttttctgtcctgtagataatctacatgtttgtagaattattttgaatatgtttgaggaaaatgtttaaaatctaaatatactcacataacttgattattcactcctctgaaaagatgctggataggctaccaaagttcccaagtggtagataattcagaagacttgtttgaatttggattttttctttttgggagtggggaagggtataaaggaggcttaaaatttgaatccataatatatctaattacaggagaatttacaacatctcaagtacgtaaattaagttgtcattgagtgaaaggttcacttggacctagtgctgcctcctgtttattacatagcatggcccttatgtcttgagttgaggttatcatctcaatgaggcttaagctcctagagtacaggaccattttgttgattgtctttcttcatagcttctctgcttggcaaagagatgggagggggccagatactgactacctggggtaggcacattatgtgttaaagcaagacagaggccagagaggggcaggtagacctgcatagcagcagcctcagcagctgtcttggtaaaggagagagagagacatggggccagtaattccggggtgctcagaagttttaggagggaatgagcctcagggaggagtgagcacctaaatgaacgcagtaaaccttcatggaccaacagtgattgaggatttgtgggcagccagagggagtctgactgaagtttacttggaaagaaagggcttgctaagaaaaaagggagtaaaaatgatgatagggaagtgtctaatgtatgtgcacatataagtaatacaaaagttttgagctcttccaagtataccatttatatacaaacaaataggtttattcattcattaaactactttggaagcgtcagtggatatatttgaaagtggtaatcctgaatctcttttaaactattatatgattcataatggttctcaggaattaataaatgattactgtgtttagctcaaaaaaaaaaaaaaaaaaaaaaaaaaaaaaaaaaaaaaaaaaaaaaaaaaaaaaaaaaaaaannttttaaaaaaaaaaaaaaaaaaaaaaaaanncctttgttggcccctttggcccaattaatttttaacttgaaaaagttttttttttgggcccaaatttgggtttatttggccaattcccccttatgggaggggtttaaaattacagggccgggttttaaaaaatgtaaattggaaaaccctggggtccccatttaatagcctttggaaatatcccttttgcaggtgggaatataaaaaaagccccccacatacccttccaaaattgtgcaccctgatgggaaaggaaattgaaccttaaattttggaaaacccgtaaannnnnnn

SEQ ID NO: 23774 - DNA, 1490 bp, Homo sapiens; identical to SEQ ID NO: 21073

SEQ ID NO: 23775 - DNA, 694 bp, Homo sapiens
  misc_feature 1, 2, 3, 4, 5, 6, 7, 8, 9, 10, 11, 12, 13, 14, 15, 16, 17,18, 19, 20, 21, 22, 23, 24, 25, 693, 694: n = A,T,C or G
nnnnnnnnnnnnnnnnnnnnnnnnnacctggaaatttaaaagtataatttcaaaaactccaggtaaaaaataaagtcaaatctgaaattataaattatttataacttagaacactaaatataaatttaagagatatggataaagatgtatttagaggaaaagtcgtaccttacaatgttagtaactgtcttttattaaggaagaaaaagttaaaatggcatgtaacttaagaaggtgggaaaataataaaggaaaaaattaagaacaaaacgaaaagaatcatgaaatagtaaaacagtaaaattaagatataaatctcagagttggttatttgaaaagatcaatgaaacagagtaattctggaaaaaccaatgagaacaaaaagggaaagcacacgcaacatgggaatgaggaagcagaatactacaactccaggccaacaaatctgaaaatagaacagaatcactatttaggaaaattcacttaattaaaaaaaatttttttttgagaaagggtcttgctctgtgtcccaggcatgctcacggctcactgcagcttcggcccccagggctcaagtgatcctactgcttcagcctcctgagtagctgggactacaggcacacaccaccatgcctagctaatttttagtagcgactatgttgcccaggctgattgtgaactcctgggctcaann

SEQ ID NO: 23776 - DNA, 891 bp, Homo sapiens; identical to SEQ ID NO: 20416

SEQ ID NO: 23777 - DNA, 1690 bp, Homo sapiens
  misc_feature 1, 2, 3, 4, 5, 6: n = A,T,C or G
nnnnnnaaagtgtcctgctgtggcatgaaataaatgaaacagaaaatgatggcaagactgctaagaacatcctttgctttgctcttccttggcctctttggggtgctgggggcagcaacaatttcatgcagaaatgaagaagggaaagctgtggactggtttactttttataagttacctaaaagacaaaacaaggaaagtggagagactgggttagagtacctgtacctagactctacaactagaagctggaggaagagtgagcaactaatgaatgacaccaagagtgttttgggaaggacattacaacagctatatgaagcatatgcctctaagagtaacaacacagcctatctaatatacaatgatggagtccctaaacctgtgaattacagtagaaagtatggacacaccaaaggtttactgctgtggaacagagttcaagggttctggctgattcattccatccctcagtttcctccaattccggaagaaggctatgattatccacccacagggagacgaaatggacaaagtggcatctgcataactttcaagtacaaccagtatgaggcaatagattctcagctcttggtctgcaaccccaacgtctatagctgctccatcccagccacctttcaccaggagctcattcacatgccccagctgtgcaccagggccagctcatcagagattcctggcaggctcctcaccacacttcagtcggcccagggacaaaaattcctccattttgcaaagtcggattcttttcttgacgacatctttgcagcctggatggctcaacggctgaagacacacttgttaacagaaacctggcagcgaaaaagacaagagcttccttcaaactgctcccttccttaccatgtctacaatataaaagcaattaaattatcacgacactcttatttcagttcttatcaagatcatgccaagtggtgtatttcccaaaagggcaccaaaaatcgctggacatgtattggagacctaaatcggagtccacaccaagccttcagaagtggaggattcatttgtacccagaattggcaaatttaccaagcatttcaaggattagtattatactatgaaagctgtaagtaaacttggtgaaaggacacaggtactatcattgaaaaccttgacaatgggtcttcttccattacaccttctttatattttaaaggcctgtgaatatacttataacctgcatatcacaaaataaaacatatttctctcatgtttaccatttaatcttctatttaatggtaatttatttactttgatactatatatcatagacataaaccattatacacaactgagaacagaagaaataaaaagaaaaatatttttccacattagtcaactccaattgtttatggattgactggccacctagtagattacatttcctctccttcacaaagacttccctgactctcttccccacccttttctgaagaaaagcaaataactctctctgcgtattcttccatactatttgatcatattgctcctaaagttctttctcactggtttatggttaagacttatttgtcattctttcagctactacttactaattggatgatcttgagccattcacttggattctctgaaccttgttttttttaatctatgaaagagagataatagctaggtatgttcaagt

SEQ ID NO: 23778 - DNA, 509 bp, Homo sapiens
  misc_feature 508, 509: n = A,T,C or G
acgagaactggagcaagaggtgcaaagacttaaaaaggaacaggccaaaaataaggaggactcaaacatagagaaaattcagcaggagctggaaaaactaagcgtgcatttgatttcagtgctcatggccgaagacacgtagccctaagaatagcctatatgggctggggataccagggctttgctagtcaggaaaacacaaataataccattgaagagaaactgtttgaagctctaaccaagactcgactagtagaaagcagacagacatccaactatcaccgatgtgggagaacagataaaggagttagtgcctttggacaggtgatctcacttgaccttcgctctcagtttccaaggggcaaggattccgaggactttaatgtaaaagaggaggctaatgctgctgctgaagagatccgttatacccacattctcaatcggtatggctgtagaatttcctctaatcttatatgactgtaagtttgaaaatgtcaagtggatctann

SEQ ID NO: 23779 - DNA, 534 bp, Homo sapiens
  misc_feature 533, 534: n = A,T,C or G
actgccttatcattttattggtgttgtgttactagagatttgacttgaagtccttaaggcagcatactttgcagataaataatctgagagaatctggtaggtcaacagatctgctgtctgtgagctaacactaaagaaatagaagaagaggaaatctttgaaaaatcgagaaaagatacctttgatcccaaaagtcttggtttgaaggaactttttatccattagatcatctaattctggaagaataaccaaagtgcagcatccttgtattcttcctctaagaggctcatcctcataggggatgtaaattgagccaagttttctaagtgtctaaatgttaagtgctccagggctcagtccttggactctctagtctcttctttggtgaagtgtccatttgtgtggcttcaaacaccttctgccatctctctcaaatttatactcttcctgtcggaccattttactgaactacagtcatgtatatgcaactagactattaagcacctcaaatttaagattaactgaacagaacnn

SEQ ID NO: 23780 - DNA, 1946 bp, Homo sapiens
  misc_feature 1, 2, 3, 4, 5, 6, 7, 8, 9, 10, 11, 12, 13, 1132, 1133, 1134,1135, 1136, 1137, 1138, 1139, 1140, 1141, 1142, 1143, 1144,1922, 1923, 1924, 1925, 1926, 1927, 1928, 1929, 1930, 1931,1932, 1933, 1934, 1935, 1936, 1937, 1938, 1939, 1940: n = A,T,C or G
  misc_feature 1941, 1942, 1943, 1944, 1945, 1946: n = A,T,C or G
nnnnnnnnnnnnncgaaagtcttctagaattaattaacgcggggagtcactttagggatagaagattgcaagtactttccaagtctactttctatgagccaagaccctatctattgaaaaataatttcaactgtaccagaagagcccagtgcccagaaaccaatatcagttctatacagatacaaggtgatgctgattatttcatcaaccatcttggagttcccatcgtgcagtttgcttacgaggacatcaaaacattagagggtccaagttttctctccgaggcccgtttttctacacgagcaacaaaaattgaagaaatggatccctctttcaaccttcatgaaaccattactaagctctcaggagaagtgattttgcgaattgccaacgaacctgttctgccctttaatgcacttgatatagctttagaagttcaaaacaaccttaaaggtgatcaacccaacactcatcaactgttagccatggcgtcacgcctgcgggagagtgctgaactttttcagtctgatgagatgcgacctgctaatgatcccaaggagagagcacccatccgcatccggatgctgaatgacattctccaagacatggagaaaagctttctggtaaagcaggcaccaccaggtttttatagaaacatcctctaccaccttgatgaaaagacaagccggttttcaatacttatagaggcttgggaacactgcaaaccccttgcatcaaatgagacccttcaagaagccctgtcagaggtgttgaacagcattaattcagctcaggtttacttcaaagcaggacttgatgtgttcaagagtgtcttggatgggaagaattgagaaaactctgagcatttttaaaagtttgtttacaattccacaagcaaaagctctaatttaaccagattttctgacattgaaggcttattttccccaatggctttttgacaagtataaagctattattacattgtattttttaaatgtaaatatagaaagaacattttgcacatttaatatttttcttatatctacatttctgaatatgtaaagcaagttattgaaataggacttaagaattacctattaaaaagaaatctgatatataataatatgtaccnnnnnnnnnnnnnccgaggctattttaaggaaaaatttccaagaagttctggactatctttgttcctatggggagggcatataggaacacagtttattctctctgatagagctattaatgacttagtttctgtaaaagaaatggagagttgatatggttcagattaacttcactattaagtgttcaatatgaagaattcaagtattctgactgagtgattggttgacctaaaccactttgaatgtttctattttatgaaatgaagtttctcttcttaacacaactagatgtagtaatacactggttatgaaattgtatttttttaagtattaatgaaaaaagagccataagcattccaggagaaaatctcaagggagctacatagagcaatttaaatgcaaatttttttcctaacaacttacaaggtgactagctttgaaacccctaatttgcctcagttgattttctaagaatttcaggagtgatgtatgtcttaagagggagaaaaaaatatttcttattactttttctcttgtttctgttggaaacactgaagcagggactctaaaatgaaagcatctcacattggttttctttcttgtatcttttctgaaactccttgctgtaaggcagctttctcagagtactatatattttcaacagtaaagtagcagagtttctctttgaaacccaaaatgtcttctaaagaatcaaatttctatttctgcctctgacaaaaagaacttactatgaaagaaatagttgttttatcaataaaagccccttaatannnnnnnnnnnnnnnnnnnnnnnnn

SEQ ID NO: 23781 - DNA, 622 bp, Homo sapiens
  misc_feature 622: n = A,T,C or G
acatgtgtaattcatgggtagtatgatgtatgtgttataacagcatactggagaatgagaagctcacaatagtggtttcttttggggaatgggcttagggagatgggcatgtaagggaacttcatctggagataatgatttattttcttaagaaaaagtagatagaagaagaatgttagaatatcttaaaaaaataggaatcccattctgtattattggataacattagcacacccaatgaaatcaattccttagttttatccaatgcccagtttatcctcatctttctccagttatccataaaatatcctttaaagctgtttttcccaaactagactcgagttttgcatcatggggttgaatctggctactgtgtttctgaagactctttttagtctttaagaactccctttttcatgacatggacttggtgaagagactgggaagtgtatttcacagaatgccccaccttatgtttgtggatttgcttccttttggtttcttttaatttgctcctctaagctacagttcctttaaacttggatgtgaggcctaaaggtttgattggattttatttttggaggggttgcatcaatgctgatcggtcatattgcagcacacn

SEQ ID NO: 23782 - DNA, 1231 bp, Homo sapiens
  misc_feature 1, 2, 3, 9, 12, 15, 23, 27, 32, 35, 52, 1227, 1228, 1229,1230, 1231: n = A,T,C or G
nnnggaccnccnatncatcgaancccnattgnaangggacgcgcgccattgngttggtacccgggaattcggccattatggccgggggagacagacacagagacactgttcagaagatgaactaaactcagcagtggtctggtatcaagagctttctgatgttttacagcctgaatttggagggataacgatctgctgtgcctttgcagtcactgcttagcccaaagtaatagtacttttgataataactcactctgtgcgatattcctgaataagtccatctcaaaagtttgggattttcctcctcttaactttcttaatatttggacatgcagttgtcgccaaacttgggtattcatggaatttctagtaaatgaaatacctatactttgatactgaagactgccaaatacataggaattttctttcttaaaaaacagtaatgaagactatatctcctttcccagcactgaatgttttactagcactgggtgctcaccatgcaactgaagaaaatgtggaaactcaaaaggtcaggacagacttccaagcacttgcaactgatgttactgtcttcaattttaataattacacatatttgtatatttcagagaagtttttaatatttctctgtccactttttataagctttaaaatgattttctctgccttgagatttgcatcaagaaaaagcacctctcttcacctgaaagctttgaagactagagacacgctttacacgttttaacaagtatattgagtccacgtttggtagcatcagttgttgagttaaaaagaaaattattgcatttgatctggatggattttaaaagaatataatgttcaatattaaaaggataattcacatttgccaccataatgttcttttttatgtaaaaagaagaacttggagacattaacatgaaaaagtcttttatcattagctcatgtatttgaggaagagcagctgtctttttatatgttttttgacaaatcatatttgtgttctttttgtcacaacagaactacttgtttctcgaaaaaatttgaatgcttaatttttaacaggggcgggaatttttccacaattgggtttttggaatacaagggccaccattactcgggtgggacacttggaatctctgtggcacactttctggaagctcaaagggcggggaaaggggaactcttggttaaagcaccttgaggggtacaacatggcatacnnnnn

SEQ ID NO: 23783 - DNA, 957 bp, Homo sapiens
  misc_feature 951, 952, 953, 954, 955, 956, 957: n = A,T,C or G
cgtccgctgtacattatgtagctatgcacccatctaaagaagttaggaaaatgacatcaagtagagcatcaaaagaaagaaggaaaggataacttaaaacagaaatgaatgaaataaaaccagaatagaagagacgatctacaaatccaaaagttggtttgttgaaaatactagtagagctgacatacctgtggtgagactgatggaaataatgcagttacaactaaccaatatcataattggaaaggaaatcactataggtgctgtaaaaattaaaaagataatagaatattatgaacaattttctgccaatattattgaaagtttagataaaatggaaaattcatttaaaaatataatttgacagtattatgttatgtgaatactataatgataatcctgtaatcattaaatgaaccagtagtttaaaatttttccatatagggaaggtcagggccagatgtgttcaatggttggttctactagacattcaaaaaaataataattcaagtctacacaaactttcctgagattagaaaaaataaagaagagtccccccacctgtttcttactttatgagaccacacctaaaagatagaagactgctttgcaaccaagaaatccttcatgaacacctctttaatcacaagtcctcaactccaaggttagctttatttcaacttttataatacttttcttacttttctttgatagctttaccacccatgtattcattcctaaaaaatacacagcttttgtctgatttcgaatttcctgtgaacgggattggccctatctgcggtctgggtcttcctgtttactcaaacacggttctgagaacatcaccttatcgtacaatccggccaggaaatggacccaacacgcgggggggaaggaaatcctcccaaaattttggccgaatgggcgcgcattggtcacatttcctccaannnnnnn

SEQ ID NO: 23784 - DNA, 515 bp, Homo sapiens
  misc_feature 514, 515: n = A,T,C or G
actagacttattcaaatcccttagtcccaagcctgaattgattccaagggcaaggatgtctccatttgtgagaaaaaaaagagcaagagaaacgaaaccaagaagtgcttgacatcctgagcaattcccggatgctgctttgccagagagtaggatgccaaatatttcgagaaagcctttctggacttgaaaaggaaaaatgagagccagtcttgtcgtgtcatttgacttttaaatcatctcctggaggaaggttatatgggagatcttcagcatgagatgattctttataaggctaaattaaagcaaggattttccctagccaataaccttagaaatgcatgagctagaatatttcaagcccaaaacaaaatatgccaagaagcactgaaatcatgacgcaatgctggaaatgatatgagaaacttgggtctcaaataatatttggaagtgagtgcagataaatgcaagctgtaacaaataacttcctgttgagtgatttatgttaaagtann

SEQ ID NO: 23785 - DNA, 420 bp, Homo sapiens
  misc_feature 1, 2: n = A,T,C or G
nnagtttgtgaagatggtgttgctaacaatgatcgcccgagtggcggacgggctcccgctggccgcctcgatgcaggaggacgaacaggagagactaccggcgaagaggaaatctttcctgaaggaggagttaagttttttgtgttagctgtttctctttagaaaaatgctctggacaagtggtagctttggttgattgtgatcacccagtgttctttgactctttagggactttgttaaaattcaggatttctaattttctgctgctaataggactgctgatggataaatcctgggaaaaaatcagccaagttcttcaagtctataacgtggcacctgatccttgacctagcttgctgacatcttttgaaagtgggtgaggtaatattgccacataaaagcacctgttaaattttcagt

SEQ ID NO: 23786 - DNA, 435 bp, Homo sapiens
  misc_feature 1, 2, 3: n = A,T,C or G
nnncgtactgggattataggcatgagccaccatgcccggcctttgctcttaactactgatgttgtcttcctgatcttttctacaagaagcttttaaactttttggactttaacctacaataagaaatccattttacatgttcacatgtatctataacaacatttatatttctaaaacaaacttttcatgaaacaagatatacctacatatgtcaggcactctgatattttctattctagtccaccttttccatttcattctatttatgggaaatatatgttggttgggagtcactgagttaatttaatgacccactaataggctgtgagtggcattggaaaaatacctgcttgtaagatatgcgaacacacgtttcaaggttgtttgtgcatgtggaaatattttggggtgctatctgttttaccatcagtttgt

SEQ ID NO: 23787 - DNA, 984 bp, Homo sapiens
acattttaatttacatgttgtgtagaacatagatgagaactccgggaaaacttgggaatggcaaccaaccaaaatcatttttaatcatttattagaaatttctcaatattgtgtctttttcttttgaaactctaaacacttcagaaaaaaacactatcagtgtagttcatgttagtataattatagatttacatatatttgaatagttaatttgctttgttttacacgtagcccactgcctcattataggtaaaaggcatttataactgctcaggggattacgagaactcaactgaaactgaatttttgtaacaagaatgttaatagtggcaaagtcctctgtcagtaaactctttaagcttggtgccgcaaagagtctttaaatgggggctgatttcaagtaacctaaaagactgtgttatcagaggaagaggtcccaaatttggagtaaagatgggagaaaataaatatgtgctatttccttggcgagttgggggaatttgccaccttacagagtttgtatcactgaattagctgcttttgttttttttgtttttttttttgccagggctatggagtgggggttgtttgtcaaactgattttcaataattggatttaattttttttaacattgaaaagtgcctgaaaaatggtaaattcttaaatgtgtgtgagattgtcagaatcaacaaaactaggttggttaaacatatctctggtacatcaaggggcatgatacaaaccagtctaaagactgtttataaaggagagagctggcgacttatttttattttttttttttggacagagtctccctttgtcacccaggccggagtgcagtggcatgatcatggttcacttcaacccctacctcctgggctcaagtgttcctctcaccttatcctcctgaggcagctcggggactacaggcacacaccaccacacctggctaagttttgtattttttgtagagatggggtttc

SEQ ID NO: 23788 - DNA, 1490 bp, Homo sapiens; identical to SEQ ID NO: 21073

SEQ ID NO: 23789 - DNA, 1490 bp, Homo sapiens; identical to SEQ ID NO: 21073

SEQ ID NO: 23790 - DNA, 1641 bp, Homo sapiens; identical to SEQ ID NO: 20385
  misc_feature 1, 2, 1626, 1627, 1628, 1629, 1630, 1631, 1632, 1633, 1634,1635, 1636, 1637, 1638, 1639, 1640, 1641: n = A,T,C or G

SEQ ID NO: 23791 - DNA, 384 bp, Homo sapiens
  misc_feature 1, 2, 3: n = A,T,C or G
nnnactttttctcctgagcccagacttgataatcactttctcaatctctgcttgttaaatggcttctaaaaattcttgggtaaatatgggtatggttgcataaaagaaaaatcccttaaaggataagccaaaatttttcagtgatagtgcataaaagccttgttatctttaaggcttgtcttttggtgcatagagccaaataaattgccaaggcaaaaacaaaaagaaagaaaatctagtctctgatttagtgcccaaaagtttttaatgctttgggtcctccagttgctctaagaattttttgtggctttgaagctttttatcaggttttaattttatccttatattttgactgatatttccattaaatgaattaggggatgt

SEQ ID NO: 23792 - DNA, 1490 bp, Homo sapiens; identical to SEQ ID NO: 21073

SEQ ID NO: 23793 - DNA, 758 bp, Homo sapiens; identical to SEQ ID NO: 22066

SEQ ID NO: 23794 - DNA, 793 bp, Homo sapiens; identical to SEQ ID NO: 23716
  misc_feature 1, 2, 3: n = A,T,C or G

SEQ ID NO: 23795 - DNA, 1715 bp, Homo sapiens; identical to SEQ ID NO: 23747

SEQ ID NO: 23796 - DNA, 1490 bp, Homo sapiens; identical to SEQ ID NO: 21073

SEQ ID NO: 23797 - DNA, 568 bp, Homo sapiens
  misc_feature 565, 566, 567, 568: n = A,T,C or G
accactttaaattccccagttaagctttttggaccacacaggtagcctaagcttggactgaaagcccatagaaggccatttgtggttataaatcatcagggaaaatattctatagtttccatgtgccactaaggttgagacaaatgagttccttgctgcgcccttctatggagtgtttatttcttgttcacctttacactgagggtgtccagctttatgagggaacctactagatttctcatttcctgttgcccatactttgtgtaatcactaaaatagaaggttatggtctgctgaatttggcaaaaattctggggaaaagctggctttggcagttacttcctaggattccagcttttgcttcattttgaagagccgtaggttccttactttcgtgcctgctcagcaatatgtttaaaagtattttttataaatatatttacccagtatcttggttgcttctgctgaaaggacttttcagaattatctaatccagcatactgccaaaaacagagccctgaattagtttcaaatacgcacaccaacgcactccccctgccccgannnn

SEQ ID NO: 23798 - DNA, 920 bp, Homo sapiens; identical to SEQ ID NO: 20829
  misc_feature 1, 2, 3, 4, 5, 6, 7, 8, 9, 10, 915, 916, 917, 918, 919, 920: n = A,T,C or G

SEQ ID NO: 23799 - DNA, 920 bp, Homo sapiens; identical to SEQ ID NO: 20829
  misc_feature 1, 2, 3, 4, 5, 6, 7, 8, 9, 10, 915, 916, 917, 918, 919, 920: n = A,T,C or G

SEQ ID NO: 23800 - DNA, 5221 bp, Homo sapiens; identical to SEQ ID NO: 20940
  misc_feature 5193, 5194, 5195, 5196, 5197, 5198, 5199, 5200, 5201, 5202,5203, 5204, 5205, 5206, 5207, 5208, 5209, 5210, 5211, 5212,5213, 5214, 5215, 5216, 5217, 5218, 5219, 5220, 5221: n = A,T,C or G

SEQ ID NO: 23801 - DNA, 525 bp, Homo sapiens
  misc_feature 525: n = A,T,C or G
acttgtatgtatctggaaatgggaaaagaattgtgctcataacaccttctggatgcatatttctttgggaatatttggaattaaagaatatcttatcttctaaaagcctttcattggcgggtcggtggtcccaggtcatacctgaagaagcagttctcttgccttccaccgaagataaagaagctgtagtgaatgctgtttttataaaaaatgagttatttggagactgctgcctgtgttcatttactttttattctggggaatgcctgaagttaacatttctagcaattcggtggcatgagaatgtatttacatctgtaagatcattgccataccatgttcattgggctcaacaagactgtcatctctgtagtttaattcctaaatgtgaatcagtgaaggcaagaggagctctaatttctgccttttcaagagatggccttaccctggcagtacctcttaatcagaaagaccccaaggcaactcaggggttatttataaacacactgaattttggtactctcn

SEQ ID NO: 23802 - DNA, 920 bp, Homo sapiens; identical to SEQ ID NO: 20829
  misc_feature 1, 2, 3, 4, 5, 6, 7, 8, 9, 10, 915, 916, 917, 918, 919, 920: n = A,T,C or G

SEQ ID NO: 23803 - DNA, 1022 bp, Homo sapiens
acccttgtgaacaatcttgatcttggtcatttataattagaacatgagaaaaagtgacagtgaatacaaatgagtactaataatatctttgcctaattaaagggttgataagaaaattaaataggaaaaacagggtccatatgctgtgaaaactctcagaacagtgtgtcaactttcattaacgtaggtaaatgtactcttttcaaggctttacttccaatcttccccttaagtgctagtgtccagaggaaaaattatttcttctctgtagaagtcattttgaagacagtatttttctgagatccaatgtggttgggagttctgaagaggaagttatagttttaagctagattatctcattttattatattctgtgtttattttcctttgccgtgcttaggcctttggcaaatgttctctagatgtacctgcccgggcggccgctcgatgctcttcttttcttcccaatgtatcttaataacatcagggaaaaatttctcaagaagacaaaggtatgttccagccttctggagctttgtttcagcaattgaaggaagaaaaatagtgggcttgggggaaacatctgcatcaagttgtttatctgtgacaacaagtgttgttccactgccaaagagtttcttatacccaagaaagggttccagtatcccaggtggcacagtaatagaccccagaatcattttcaattagatttcgtagtatcaatatccagctccacctcctgggtgtatgagtataatactttcctggactgagtcctgattccaacacatcctttgagttggagacgtcatagtacagaagacgctgtggggccttcccctcctggtgtaggtaccagtggatgtagaaggcatttattacagtaaggtcacaagtgatttcagcagatgacctagtcggcctcgtgactgacttcgttcccccttccaagttggaagatttctgactggcaggagacaggaaagctagaagcaccagtagggcccaccgcatgcccggac

SEQ ID NO: 23804 - DNA, 920 bp, Homo sapiens; identical to SEQ ID NO: 20829
  misc_feature 1, 2, 3, 4, 5, 6, 7, 8, 9, 10, 915, 916, 917, 918, 919, 920: n = A,T,C or G

SEQ ID NO: 23805 - DNA, 606 bp, Homo sapiens
  misc_feature 1, 2, 3, 4, 5, 6, 7, 8, 9, 10, 11, 12, 605, 606: n = A,T,C or G
nnnnnnnnnnnncgaaagtcttctagaattaattaacgcgggggagagagagagaagggaaactttaaaagtttgatctaatgtacttactaccaaataaagattttacctatagattgaaactaaattgtaaatgtcccaaatacttttcccgatgaaattcaaacaaaattagacttttatacacacaaagcaaaacaaaacacaacctatatataatttcaagattaagaaaaacaaaacaaataaaagcattctctcaagaccttgcttcagttgtgtaaaataattaaatgtgctattccaagttgattttagtttttaaatacagaatttgataaaagataagtaaaagaaggccttgggttcagggtggcagatatttagtgcaccctttatctagttcaggaaacacttgaaagatttatcaagtttccttatgtaatgaaagacttaactagttcaaataagcaatacccacagaacataattagagcagcatattggagcacaatttttttttcataaagactaaaactgaacagcagcagattgaaacaccaattttttttcctaaagaactaaactgaacagcagtcaagacnn

SEQ ID NO: 23806 - DNA, 2020 bp, Homo sapiens
  misc_feature 1, 2, 2020: n = A,T,C or G
nncacagctcttttgaagtcaggttcatccataaattcggcaacagcaaattgcaagagcaggtataccactccagtaagtacagaaaatgcggtgataacataggcaaaccatctacttcccagtcttctttctagatttattcctttccagagcatggatgccatattgaaatacaaatgccaatcatcagcatggtgaaggggagagagcagtaaacgctgccagtctttttgctggtaacacttctccacactaaggcaggagctatacagtggcttctgagggttcaagaagaaccagatgttgagggccaaagttgctagggtgacaggtggaatattgttgatcccaacatggaagatttgagaaaggagtagaataagtccagtatttatccctcttgatctccgttgcatggccagatatcagggaaacagctcagcaatgggaaaacgtactcaggtggtcagtttcaggtatctggggagatatacagacggctgaacgccctcgacgacccgccaggtgactacatgaacatgtcaccagtgggggactccaacaccagcagcccctccgactgctactacggccctgaggacccccagcacaagccagttcctctccgtactactcattgccaacgatcctttaagcaccacccagccgccccgagggagccggacgcgggtgcccggcatcagcacctccgcctttccactagctctggtcgccttctctatgctgcaacagcagatgattcttcctcttccaccagcagctgacagcctgggtggtgggatactgctgtggtgctaggctggagcccagccattccacatccccaccatcaggttctgcagccccatctgcctcgaaaggtggacacagctgctcagaccaatagccgcactggcccgtgccacgaggctgtacctgggggatcccaaggccagcaccttacctcgggcccgagagcagcagcagcagcagcagcccttgctgcaccctccagagcccaagagcccgggggaatatgtcactcatcgaatatgggcagtgatcagtctggctacttgtctggcccggtggctttccacagatcacctatctgtcaggtgtccatcccagactccagcacagactcccagacgcggcagacgactggacactgaggagtacatgaacgatggaccctggggccgggccggagggcagactggcagcgaagagcactaggcgtcgagatgggacgactggggccctgaacactccctggggctgcttcagcatctgcaggcctacatgggaagtgaccagaagcctatggtgacttacatgaccatcgcagatgagttgtacacagtacagagcctaagaatgggaacacccttcgcacagcaatgactccctgtaacaagactactggctgacacatgccggagcacatggcacttggcatgatcgaacgaagtctaacccctgaccaagtacaatccatggacttgctcgcctaccatccatctcaaacagcatcatgacacacacgacatgaaccataaagagagtcaggacgaagcgaggaagacaccgatgcaaacccgaggagaggcggaggccacacaagcgccagtagcggcacatgaacgggacacaacaccgaggagcacatccaacgacgccagaacgcggcacgcacacgacagggcaccagcggatatcgccggtccagcacccgcacaagcggatcggcacgcaagaccccatccacgcaccgcgcaggaggtagacgcgccaacacaactgactcatgctgctagtgaagcgaaaggcatgcctggagagacggggctcccagactcatccgagatgcgcccggacggcatcgacaacgcgcagtgagaccaacacgcgcactgaccacaacgtagagcctcgaatacgagcgccaccatgacaatagagcagtgagaagatcaggccaactcgatcatcaactcgctagtcaatgactcan

SEQ ID NO: 23807 - DNA, 4090 bp, Homo sapiens
  misc_feature 1, 4070, 4071, 4072, 4073, 4074, 4075, 4076, 4077, 4078,4079, 4080, 4081, 4082, 4083, 4084, 4085, 4086, 4087, 4088,4089, 4090: n = A,T,C or G
naacaagcataggcagggatctgatggtaatcacaccatcccagcatcttcgttgcattcaatgaccaacttcatcttcaaaccacagtgtagggccaatgagaacaagaaggagggtatctgcttcacggagggcaagagccggagggtctcagaggacagacagtgccaggttgagagcaccattggatgcttactttcaggtgagcaggacccagcctgacttgccagctaccacttatgattcagagactaggaatcctgtatctgaagagttgcaggtgtctagtagttctgattctgacagtgacagctctgcagagtatggaggggttgttgaccaggcagaggaatctggagctgtcattttagaagagcaactagcaggtgtctcagcagagcaagaagttacatgtatcgatggaggcaagaccctccccaaacagccatctccccagaagtctgagcctctgctaccttctgcttctatggatgaggaagaaggggacacttgtacaatatgtctggaacagtggaccaatgctggggaccaccggctctcagcattacgctgtgggcatctctttgggtataggtgcatttccacgtggcttaaaggacaagtacgaaaatgtccccagtgcaacaagaaagccaggcacagtgacattgtcgtcctttatgcccgaaccctgagagctttggacactagtgaacaggagcgcatgaaaagttccctactgaaggaacagatgctaaggaaacaggccgagttagaatcagcacagtgccgactccaactgcaggtcctcactgataagtgcactaggcttcaaaggcgtgttcaggacttgcaaaaacttacgtcacatcaaagtcagaatttacagcaacccaggggctcccaagcatgggtcctgagctgctcaccctccagccagggccagcacaagcacaagtaccacttccaaaagaccttcacagtatctcaggcaggaaactgccggatcatggcatactgtgatgctctgagctgcctggtgatatcacagccttctcctcaggcctcttttcttccaggctttggtgttaagatgttgagtactgccaacatgaagagcagtcagtacattccgatgcatggcaaacagatccgtggactggcgtttagcagttacctcagaggcttgctactctctgcttccctagacaacactattaaactgaccagcctggagacaaataccgtggtccagacttataatgctggacgtcctgtctggagctgttgctggtgtcttgatgagactaactacatctatgctggactagccaatggttcaattctggtatatgacgtgcgaaacacgagcagtcatgtgcaggagttagtagctcagaaagccagatgcccactggtctccctgtcatacatgcccagagttgcctcagctgcatttccatatggtggggtgctggctggaaccttggaggatgcttcattctgggaacagaaaatggacttttctcattggcctcatgtgctgcccttggagccagggggctgcatagactttcagacagagaacagctcccggcactgtcttgtgacctacaggcctgataaaaatcacaccaccatacgaagtgtgctgatggaaatgtcctaccgactggatgacactggaaatccaatctgctcctgccagcctgtacatacattttttggaggacctacttgcaaactattgaccaaaaatgccattttccaaagcccagagaatgatggcaacatcctggtgtgtactggggatgaagcagcaaattctgccctgctgtgggatgctgccagtggctcgttgctccaggacctacagaccgatcagcctgtgttggacatctgcccatttgaggtgaaccgtaacagctacttggctaccttaacagagaagatggtccacatctataagtgggagtgactgtggtctcgaaaccttgaaggcatgctgctggttagatgttgtttgctagcgcctagcagccccaagcaagatccctgtttattgtctgcagtctagaacattgggaatcatggtttgtttgcattagtatgattctaggaccctaggtcactgagacactacagattgtgtatctgttatgtccactaaaagagtaattgatgggtactttatctacattatccatttcttgggtttaaagccttcattaaccattattgtatgttggaaattcttattttctttattttctgtgtgactttctggaccttagagagtgtcctctcatcatctaggatgtgagtgggcatcaagcattttctggggaatatgacatcccatctgagttgtcctgtcacttaagtatccttgaagggactaaccatcgtcttggtactgatttgatgcaacgtagatgtaaaagagtattattcagttgaacacaagagggcactgtagaaccttgtgtccggtttatttctgaccttgaaggctgacaatcttttagtaacttgtctcatctccacacaagtgtgtgatagcacacctgggtgtgctttgtggcaataacacttgtgttccaggtgtgaagtgctgggacattggcaggcccagtgatggaagcagctagtgaacgattccctttgctaatgcctagtgcattaagttcattgctttgcgaaaggtaaggaaagaggccagttgtttgagcggtggggaagattttgttttttctagccagcttaggatctcaggattggttttatccaagctagtgctttgaagaacactatctcttgccaggaaaagatgagtgataggtcaaagcttttacttgagtctcccctagtgtcagagatcaggagaaaagacataagagaatttacaaaagctattcagactgctattgaaaacatgagaagaacttgtctcccattttgagagttcctatctaaataaagccaattcctcagactgaggggctgttcttaagtgttctttatacattccagttatccagttaaagccttccccatgtgaagctgatgtttgattccagtttcctttgatttgcctccctaaccttttctagggctcagtttgtatttctttgccttgcctcagactactttgccaacccacttccacaacagaatatgcttcaagatgtgggcaggtcagtgtcctgttcatgggagaaaatggcttaacagtctgattttctcaaatgattattgaagagttgttatcgtttttattataaaacacttctgacctgtcaattcaagagctgtttctaggatctttctctccggcaaggggttgttgcactagatttccccagagttccaagttctagttgtgccttttaatgaccctttaatattttaggacataattttttccttttttaaattttttgtagaaatagatgtttcactacgttgtccaggctggtcttggactcctggcctcaagcaatcctcccacctcagcctcctaaagtgccaaaattataggcgtgagccactgcacccggcccctatttgaagacgtcttttgtaaaagctagcttctagaacctgagaaaagctcttttctcagaggagatactccttttgatatgttaatgattaagagtggttgcccaggcctagtttcagtggcagaataggattggaattaaaaagcagaactcatctggcttcagcagattgccaccaagaggatacaggtggtcaggtcctggctggcttgtcttgggcctgggcaggcttaggattgactttctttgaagtacctgatgctgatttgattccactaatagtaggaagcaagagacttaactatgaggacgttctgttaatctttaagtcttaccagtcctggctttagtacctttaacttgggtgttcgggaagcaattctatgatcgcggagggtttccaaaggaagaagctgtgcggctgaccactgggaacccttttttttaaatacaaaattccgggggggggcgcgccgttccccctggggggggggaattttccnnnnnnnnnnnnnnnnnnnnn

SEQ ID NO: 23808 - DNA, 1715 bp, Homo sapiens; identical to SEQ ID NO: 23747

SEQ ID NO: 23809 - DNA, 1091 bp, Homo sapiens
  misc_feature 1, 1091: n = A,T,C or G
natccaatttctaaatttagctgtccatgaatccatatgatcaagaagttgtctattcatagccactcttgcccagacctcttctgcggcttgtttagagctgagatcggcttcatctttgttagcacatggggcctgagtccttcaggcaagctgatactgaaacttctttaaagtttgtgcataatcccccatagaacgactatagttccagaaagtaggactgctggaaggagaggtagaatctgggctccccagcttaaccctatgctgtttctcctcttcacttctgagaaaagtatccaaagttcgtaggtcggtcatgtagtcttctttgtcagtaggtgagttgtagacggtaggtgaagaacggtagcgagatctcaatccactgctctccactggtccaacagtggtagggtacggagaaggaggagaggggctaaagctcgccaacttattataaccactgacgggcgagtaggtcactccagggctataagaaccactgccacctgaggacagaccttgcagctgagggctgtaaccagtcatacagctggtggtgaacttgggactggtactgggcgaacgagaagggctataactcaacacactctgaccctgaattgaaggggaaggtggagcgggagggatttgggttgctgccagatcatgtggaggcgtagtctgtacaacagctgttttcaaccctaaaagtgtttgctgtccaggactaacaaccagacttgttggtgccacagtatatttgaaatatctccaaaaatcaaataaggcattaaggctgaagagagatgcaagggcaagctcaatataccagaggggccagtatgtcacattgtagtatgaactaatcaattttccagtcatttcagtatatatcattccagccatagatacatttaggagtccccaggctaagaccactttcctagcctctgtttcttttctcatcttgatggttctgtcaataagggaagcactagggtgtgcctccccctgcatcatgtcctctggccggaaaacgcaggctcgcgccactctctctgggcatgcggacgcgtgggtcn

SEQ ID NO: 23810 - DNA, 1715 bp, Homo sapiens; identical to SEQ ID NO: 23747

SEQ ID NO: 23811 - DNA, 993 bp, Homo sapiens
  misc_feature 1, 2, 3, 990, 991, 992, 993: n = A,T,C or G
nnnacccacaatggaaagatgatcttcctgcattgtgaaggttgttctcatcaaccaagcctgcaatgactagacattctaaagagaagagtgatggcaatggaaagaggacacatccacttgccaggtcacttctatcagttgatgacatgccatatgttatggctaggtcagctttccacaagtatgcacatgcaaaatagaacttgggaaaaaaatctttgatttggccctttaccaagtggatcagtgtgtcagagttcagttgagcaaaggtcagagtttaagttgaatctccagtcactcttttgaagatatttggtgatgccaaatttaatttaggatattatgtaggtaagtattctgtcagttcatttatagtgtgaatttacaggatttagccttagtccgagaaaaactggcccctggcccagactatacaccaggcagttctaaacatatacaattcatgttaaggaaaaaacagatttacaacttacattactcctaaataacatttatttccatgtgacttgcatgtctaaataaaatgaatttggcttagtaaggctttcatttatcttcatctaaacgcttttccaccagtactcatcacaagactccccaaggttatgaagcagattgatatagaaactccatttctaggacaaaaacgaggcaccttgagaatggacccaagccataataaactagtaatgcattttcccacacaaccatataaaatacagtgagcccttgatcaacctttgcacaaaaagaattgctcattaagtctttgattttttaaaaaatggcacttggttttctagaaagaggatctgcacactaactattcgatttgtttgaatatagtcagattattatgtctgtgtttattaggcttaatttgaaaagatttttggttagtatctccacttctatgatcaaacactatagagttcaagaccagcctgggcaacatagtgagannnn

SEQ ID NO: 23812 - DNA, 2505 bp, Homo sapiens; identical to SEQ ID NO: 21198
  misc_feature 1, 2, 3, 4, 5, 2505: n = A,T,C or G

SEQ ID NO: 23813 - DNA, 4104 bp, Homo sapiens
  misc_feature 3813, 3814, 3815, 3816, 3817, 3818, 3819, 3820, 3821, 3822,3823, 3824, 3825, 3826, 3827, 3828, 3829, 3830, 3831, 3832,3833, 3834, 3835, 3836, 3837, 3838, 3839, 3840, 3841, 3842,3843, 3844, 3845, 3846, 3847, 3848, 3849, 3850, 3851: n = A,T,C or G
  misc_feature 3852, 3853, 3854, 3855, 3857, 3858, 3913, 3914, 3915, 3916,3917, 3918, 3919, 3920, 3921, 3922, 3923, 3924, 3925, 3926,3927, 3928, 3929, 3930, 3931, 3932, 3933, 3934, 3935, 4064,4065, 4066, 4067, 4068, 4069, 4070, 4071, 4072, 4073: n = A,T,C or G
  misc_feature 4074, 4075, 4076, 4077, 4078, 4079, 4080, 4081, 4082, 4083,4084, 4085, 4086, 4087, 4088, 4089, 4090, 4091, 4092, 4093,4094, 4095, 4096, 4097, 4098, 4099, 4100, 4101, 4102, 4103,4104: n = A,T,C or G
tatagggagtcgacccacgcgtccggcggtgtaccctgggatagggagcgatctccgagcgaggcggcaagatggacgcgggatttttccgcggaacaagtgcagaacaggataatcggttcagcaacaaacagaagaaactactgaagcagctgaaatttgcagaatgcctagaaaaaaaggtggacatgagcaaagtaaatttggaggttataaagccttggataacaaaaagagtaacggaaatccttgggtttgaagatgatgttgtgattgagtttatattcaaccagctggaagtgaagaatccagactccaaaatgatgcaaatcaacctgactggatttttgaatggaaaaaatgctcgagaatttatgggagaactgtggcccctgctgctaagtgcacaagaaaacatcgcgggaatcccttctgctttcctagaactgaagaaagaagaaataaaacaaagacagattgaacaagaaaaactggcatctatgaaaaagcaagatgaagacaaagataaaagagataaggaagaaaaagaaagcagcagagaaaaaagggagcggtctcgtagcccaagaagacgcaaatccagatctccttcccctagaagacgatcttcccctgtcaggagagagagaaagcgcagtcattctcgatctccccgtcacagaaccaagagccggagtccttcccctgctccagaaaagaaggaaaaaactccagagctcccagaaccttcagtgaaagtaaaagaaccttcagtacaagaggctacttctactagtgacattctgaaagttcccaaacctgaacctataccagagcctaaagaaccttctccggaaaaaaattccaaaaaagaaaaggagaaggagaagacccgaccacgatctcggtcacgctccaaatcaagatcccggacgcggtcccgctctccttctcacactcgacctagacggcgccatagatcccgatcaagatcgtattcacctagaaggcggccaagcccaagaaggcggccatctcctcgaagaagaactccgccaagaagaatgcctcctccaccaaggcatagaaggagtagatctccagtaagacgaagaagacgttcgtcagcatccttgtctgggagtagctcatcatcctcttcatctcgttcacggtcaccaccaaagaagcctcccaagaggacatccagcccccctcggaaaactcgtaggttatctccttcagcaagtcctccaaggcgaaggcacaggccatcacctcctgcaactccaccacccaaaactcggcattcccctacaccccagcagtcaaaccgtacaagaaaaagtcgtgtttctgtgtctccagggagaacttcaggtaaagtgacaaaacataaaggtactgagaaaagagaatccccttcaccagcaccgaagcctagaaaagtagagttatctgaatcggaagaagataaaggtggcaaaatggctgcagcagattctgtgcagcagagacgccaatacagacgacaaaaccagcagtcttcatctgactctggctcctcctcctcctcagaagatgaacgacccaagagatcccatgtgaagaatggtgaggttggcaggcggcggagacattccccttcccggagtgcttctccatcaccacgaaagcgccaaaaagagacttcccctcgtggtagacggaggagaagtccatccccaccacccaccagaaggcgacggtctccttctcccgcccctcctcctcgacggcgcaggactcccacaccaccaccacgacgaaggactccttctcctcccccacgtcggcgctcaccttctcctagaagatactctcctccaatacagaggagatactctccttctccacctccaaagagaagaacggcttcacctcctccccctcctaaacgaagagcatcaccatctccaccaccaaagcggcgggtctcccattctccacctcccaaacaaagaagctccccagtcaccaagagacgttcaccttcattatcatccaagcataggaaagggtcttccccaagccgctctacccgggaggcccgatcaccacaaccaaacaaacggcattcgccctcaccacggcctcgagctcctcagacctcctcaagtcctccacccgttcgaagaggagcgtcgtcatcaccccaaagaaggcagtccccgtctccaagtactaggcccattaggagagtctccaggactccggaacctaaaaagataaaaaaggctgcttccccaagcccacagtctgtaagaagggtctcatcctcccgatctgtctccgggtctcctgagccagcagctaaaaagcccccagcacctccatcccccgtccagtctcagtcaccgtctacaaactggtcaccagctgtaccggtcaaaaaggccaaaagcccaacaccgagcccatcaccgccaagaaattcagatcaggaaggaggtggaaagaaaaagaagaaaaagaaggacaagaaacacaaaaaggataagaagcacaagaagcacaaaaaacacaagaaggaaaaggctgtggctgcagctgctgcagctgctgtgacccctgcagccattgcagctgccacaaccacattagcacaggaagagccagtggcagcgccagagccgaagaaggagactgaaagtgaagctgaagataaccttgatgatttagaaaagcacctgcgtgaaaaggccctgagatcaatgaggaaggcccaagtgtccccacagtcttagggggaaatgtttgttatgatgtaaattttatttggtttgtacgcagttcaatttcaaaattgctaaaatgtgtttgagctttagactataacatttgttgtaataattgctaggttgaagttcaacatgtaaaaaaagggggcatggatttacattgcaaaaggtgtccacagtgtattagtgacattctttcattgacagctgacataattcattgagtgaaatattttaagccaaaaaaaaattccctttttaaaaaagggggtttaaatactgttggcatttttatggttcctttaaatgccctagctattcccagaggggtttttttgtttgtttttttggttttgattttctttttgtttttctttcttcttcttatttttttcatttgagtcttagctcccatttaagttatgcttctgaccttgtatggtctgtaagcttgcccagaaataagaccactgttttgaactaccacaaaagtataaatgaatattttaatgccacaatctttcctgttgcctgtggagtctctgctgaaatgaatcaggattcgagctctaggatgagacagaaaatgaaagcatgttgtttgccaggacactgtgggtttatattgatgtgtaacaagttgatttggaacactggactctcattctgttattctggttttgttttttttgttttgttttttttcttttgtaaaggcaatgagctagtcccagaaaggatccttcagttacatacaatttgtttaatgaaatgtcatggctctgttcatatttttgtcttgttcttccaattggtatatacaactttcagagcctcttgtatttggaaggctggaagggcccagactttggaatagtgtcttggtttcactgtttttgttttgatttttttttttgttttgattttttttaaactaaagctatataaagcttgtggattaaacagaataaatttctaaatttaaaaaaaaaaaaaaaaaaaaaaaaaaaagataacagtggtaaaaaaagannnnnnnnnnnnnnnnnnnnnnnnnnnnnnnnnnnnnnnnnnncnncggggggcccgcccttctttttttaaaaaaaaccccccccccccccccggtgggnnnnnnnnnnnnnnnnnnnnnnngggggggggggaaaatttttttttccccccctgttgggggaaaaaaaaaaaaaaccccccccccccatttataaaacagtaaaattttttttccccccccgggggggggggggcccccccacaaaatannnnnnnnnnnnnnnnnnnnnnnnnnnnnnnnnnnnnnnnn

SEQ ID NO: 23814 - DNA, 770 bp, Homo sapiens; identical to SEQ ID NO: 20288
  misc_feature 765, 766, 767, 768, 769, 770: n = A,T,C or G

SEQ ID NO: 23815 - DNA, 393 bp, Homo sapiens
  misc_feature 392, 393: n = A,T,C or G
acttttcgctcagctgttttcatcactgtgttcagaggtttgtctttttttttcccctaaaaggtgctgagatgttatgagtgctttatgtgtggttactggataagttttgaaatgtcactgtgttataaactgcatgattatcgattttggaaattttgttttttttaaatgattaatttaaataaaatggagaattttgatccataagaaaagcaggactgaaatctccagggatgggagcctttgggttcactttgttcagtgttgtttctttgtagacttcctactttcttgtaaaatgttttggactaaatatttcacaagaatagaatttttcaaggtctggccggttatgggttgtagatttggggcagaatgctgagatgtann

SEQ ID NO: 23816 - DNA, 1214 bp, Homo sapiens; identical to SEQ ID NO: 20119

SEQ ID NO: 23817 - DNA, 1380 bp, Homo sapiens; identical to SEQ ID NO: 20118
  misc_feature 1380: n = A,T,C or G

SEQ ID NO: 23818 - DNA, 1490 bp, Homo sapiens; identical to SEQ ID NO: 21073

SEQ ID NO: 23819 - DNA, 1545 bp, Homo sapiens
  misc_feature 1, 2, 3, 4, 5, 6, 7, 8, 9, 1541, 1542, 1543, 1544, 1545: n = A,T,C or G
nnnnnnnnnctcatgagacattctgtgatatgtgtaattgattactccaaaaattaagctttctctgagggtaacacattgtcatctcattggtttaatgggctatttaaatgtgctttagccacacatttgcttaatagaaaggaattattttaaactaccaatccatatgttgagtggaaaggaagttggcccacatattccaataaatatatcagcaatataacagtttcatcatgggaccatggatacagtgcagggaaaaaacaaacaaacaatatttgagaaaatatatatattctgcccagccacactggtgagtttttatttcttgtatgagtttaaattgccaacttaaaaaagcctcgttagaatttgctattcgaaaagaccttaaaaaccctcacagagttctaaacatcccattcattgaaaatacttttcagttaagtagatttgttttgtgcacttcacaacttttaggtgacatgaatttgaagcgtagcaaaagaaatgtataaagatagccttttctggtcattaccatgtctactcaagtttctgttttctaggtacactctagcattgtaactttttccccctgagaagtaattttaagatctatcagtctcaatttaaatgatctgttaatcagccagagttttagtttcataatatcgttccattgcctgacaaagatatacacactgaagtgcctttagcagacctgggaccgtcaagaatcttgttaccctgattattgcaagatgacatatttcttaagccatttataatctcatattcgggttgaatctgaatttacaaataaaagggttaaattgaggcagtttcaagcagcatttaggaaaatgaagtggcttcaaattttagtgtttctggttacattattttgtttgaattatacaattacataattttctgtaaccaaaatggtaattttgatggattttttaaatgccaaaatccaatcatcaaggccaaagaaatgcatgattactctgatttcttatgcaccattcagtcaagacttaactcagaggcagttgattcagtgcttacatctagacaaagctttaatgagtgcagacccagcctaacagtatttcatctaatttctttgatggcttaagccaataagcactgaggtagcttttctcagaaggaaacagattttattttccaggggctaattaatatgcaccacctaagtccccaaaggatcacacaggtgcctgtatcatgccatatgtcatgtgctatattcctgcaagctcaagagattaatatacaatcattattatgaattattatgttgcattgaagttaatgtcggtcttttgtctaattaagtacaagggtcgaatagagtagtagaaagggtaagtcatttagactaattattcacaaaggtatttatataacggagaatagtcatttaaggttaattaactgtgtgggggataggaagggagaggaaaaaaggatgggggaatgaaggtaattgaattggggttctaaannnnn

SEQ ID NO: 23820 - DNA, 906 bp, Homo sapiens
  misc_feature 1, 2, 3, 905, 906: n = A,T,C or G
nnnacctctctttcttgttggaaatgttgaagtattgaaatacttcttttctgtagaaggtggttctcccttctacccaggaataattttgtggcaagtcattgagtcagcagttattttgaccctaactgaaagagataaagttcctaagaatttattatatatgtttcttgccactgagtgagcaagaaaaatacatacccatcagtgctgactggttggtaatttctgaaacacaatgccacagctcttcatgaataacacagtaacagaattacagagaatttggaagagatcaatctctagatggatgagttagtctataaacaaatagccactcaacttcttttaacttttaagaatgctgtatgtgttttctaatccagatccttgggtttcagtgagtctctagaaatcaagaaatttttacagattaatggatcagcaagtcagcattggtatatggacaaaataccttgtattattagtgagtaataaggagagctttcccctctaccccatgtcacttctagaaactctactctttaacttgaaatttaccatgactgtttagtgagttgaatttaaacctgatgtcatgggatgagaaaggagtgtaagtttatcaatgatctgtgaaaccctgtcaataaaatatttgtgtctttgtctctccataatgtcagggtgtattgtaaatgtcagggtgtattgtaaaatataagtaaagtatttatgtggcttaattgttttatttgtggcatattcatgaagctgtgttatgcaatgtctttgcgatacatatttgtcaattaacttgtattaactatatgcagggggcttgtataactttgataggctttttctttccaggcctccccaaatctgtagaaaatgtgccacann

SEQ ID NO: 23821 - DNA, 800 bp, Homo sapiens
  misc_feature 1, 796, 797, 798, 799, 800: n = A,T,C or G
ngtgatggttatctgcagaatatgttccatctgttttaccatcagtttgtacaaggacactaagacagtgtagcctgctgacttgagaatgttctgtaaggactggaaacactagaatcttgaagaaacgcctggctagaggtgagggtaagctgttaattacactgattacagtttgtgcctctcagactgagaactcttttcttcttgctgggggcattgctatctctaggatgtttgccctgaagtcctgatagtctctttggggttttaataaatggctgaaaaaattgttgtggggtttcaacaggcgttcataggcacccttgcttggcaatataacatggcttttgatgtttgggtgttggaagggatctttgaagtgctgagagggactcagtctttttccaaaatctctgcttgtgtctgtccagcctctggctccactgcttggctgagatcctggcccatagtagaatctgtgtagaggaaacgagagctcactatttgtgaggcagcctgttccactattggactgctttaaatgtagtgatcagtgattatgctataatccaatcatgtattaattgggcaccaactatgcactaggcatggtatcaagtaccaggagtacaaaaataagtaaaccttgatttctgctatcaattactctcttctcctacttctgtactactgcttttctattgtgagtttgtttaggtcattaattggtttattcattcattcaacaatcatatactgattagctactctgaccaggtccagtactaactcnnnnn

SEQ ID NO: 23822 - DNA, 616 bp, Homo sapiens
  misc_feature 1, 2, 3, 4, 5, 6, 7, 8, 9, 10, 11, 12, 13, 14, 15, 612, 613,614, 615, 616: n = A,T,C or G
nnnnnnnnnnnnnnncacagaatcatttccttctacttttccactaccagggctgttaacagtcccaagcaaaagggcaaaaattttttctacttgagataagaaaaatatagagtgtgacagaaggtattctaccaatataaaaacactttaccaggaaaactgagaagggggctgttaaccttccgggaaatgcaggtcttcagtggattcctgttacagacataaaaacgtagagagaagactttcagttaaaagcctcctcccttcagcaaagtatattctgattccattatcgtgttaggctcctatacagttataagtaatcccatgcggttttagaattcttaaatattcacacacatagtcatctgaaaatgaataaatccatgaatgactaaacaaaatttattcctatatcattttcaatatccttaaattatgcttacatccttaaatcggttgcctcattctgaaagcacatagtctgtaactcgtaaaaaacacctgtcggccgggcacggtggctcacgcctgtaatcccagcactttgggaggccgaggtgggcgtatcacctaaggtcgggagtttgagaccagcctgaccaccannnnn

SEQ ID NO: 23823 - DNA, 555 bp, Homo sapiens; identical to SEQ ID NO: 23733
  misc_feature 1, 2, 3, 554, 555: n = A,T,C or G

SEQ ID NO: 23824 - DNA, 831 bp, Homo sapiens
  misc_feature 1, 736, 804, 816, 817, 818, 819, 820, 821, 822, 823, 824,825, 826, 827, 828, 829, 830, 831: n = A,T,C or G
nagttcaactttaaatttgcccacagaaccctctaaatccccttgtaaatttaactgttagtccaaagaggaacagctctttggacactaggaaaaaaccttgtagagagagtaaaaaatttaacacccatagtaggcctaaaagcagccaccaattaagaaagcgttcaagctcaacacccactacctaaaaaatcccaaacatataactgaactcctcacacccaattggaccaatctatcaccctatagaagaactaatgttagtataagtaacatgaaaacattctcctccgcataagcctgcgtcagattaaaacactgaactgacaattaacagcccaatatctacaatcaaccaacaagtcattattaccctcactgtcaacccaacacaggcatgctcataaggaaaggttaaaaaaagtaaaaggaactcggcaaatcttaccccgcctgtttaccaaaaaaatggaagcaaacagaacaggctgatcttataaatgagctatatcaaggcaagctgaaggactacgtgagatgtctggaatgtggttatgagggctggcgaatcgacacatatcttgatattccattggtcatccgaccttatgggtccagccaagcatttgctagtgtggaagaagcattgcatgcatttattcagccagagattctggatggcccaaatcagtatttttgggaacgttgtaagaagaagtgtgatgcacggaanggccttcggtttttgcattttccttatctgctgccttcagctgaaagatcgatttgatatacaaaaanccccccccaaannnnnnnnnnnnnnnn

SEQ ID NO: 23825 - DNA, 2091 bp, Homo sapiens
  misc_feature 1, 2088, 2089, 2090, 2091: n = A,T,C or G
ncgacccacgcgtccgcagccatcaagtattttccgcacgcagacgctcgggggaacatggcggctgcggagccggcggtccttgcgctccccaacagcggcgccgggggcgcgggggcgccgtcgggcacagtcccggtgctcttctgtttctcagtcttcgcgcgaccctcgtcggtgccacacggggcgggctacgagctgctcatccagaagttcctcagcctgtacggcgaccagatcgacatgcaccgcaaattcgtggtgcagctgttcgccgaggagtggggccagtacgtggacttgcccaagggcttcgcggtgagcgagcgctgcaaggtgcgcctcgtgccgctgcagatccagctcactaccctgggaaatcttacaccttcaagcactgtgtttttctgctgtgatatgcaggaaaggttcagaccagccatcaagtattttggggatattattagcgtgggacagagattgttgcaaggggcccggattttaggaattcctgttattgtaacagaacaataccctaaaggtcttgggagcacggttcaagaaattgatttaacaggtgtaaaactggtacttccaaagaccaagttttcaatggtattaccagaagtagaagcggcattagcagagattcccggagtcaggagtgttgtattatttggagtagaaactcatgtgtgcatccaacaaactgccctggagctagttggccgaggagtcgaggttcacattgttgctgatgccacctcatcaagaagcatgatggacaggatgtttgccctcgagcgtctcgctcgaaccgggatcatagtgaccacgagtgaggctgttctgcttcagctggtagctgataaggaccatccaaaattcaaggaaattcagaatctaattaaggcgagtgctccagagtcgggtctgctttccaaagtataggacatttgaagaactggtatgctactcactggtgaaggacagtcaggtgaaggactgtaagcccacacaagctcttcttatctctactagaattaaaatgttaagtcaaaaacggctccttttttgcgcctcctagtgaaacttaaccagctagaccatttgagtaccagcatttagttacaaacgtcaaaggcttccggtgctgcttaccttccttttttgttaatgtgcttttatttattaaaaaaaattacaatgaagatgcctgttttgtctctactgtgtactctgatcgtatctttccaaagtgcagactcttgtgaagttttcttaaattgttcactttaaagaaaatgacgtaccaacaatgatttggcttttatattactgtaagatgttataatgttaatgtggatgtagtgcttttactttacagattgattggaataagattattgcatatgaatttacccacaggactctgaatcatgttacccactcccctcacaatgttgtccacttagtgagttgcattgatctatccgtaccaaatgatgttgaataattacatatctttcttgactatactgatttcttattttggtcactattactaaatctctgttaatattctctcttttaactgaaaagggatgggatagaagggtttgcaatgccatattattggtggagggctgttttaacatctttgaagtatggcttgctgaatatctttaccaacatcttgaatatatattctagtgtccacaagatttagcaaaaagataaagcttgggtggaatatcattttaaaatgttcatgttctgttctatattttcttcacctactctccaaatattgtaatgcaaaaagtctcagtaatgatttggtagtattaattttgtggtcattgtttctcttcgataaatttattttcattaaatacttattagagggttttgaaatgtttttcaaatatgtgaaatgtgaaactgctgtcttttatattaaagtaattaaagaaaatgtattgtgattgaaattattttggcctccacaagatggctctatgagtattcttccagggattctaatatttatttaaggtaataaaatcttgacatttataatcnnnn

SEQ ID NO: 23826 - DNA, 1214 bp, Homo sapiens; identical to SEQ ID NO: 20119

SEQ ID NO: 23827 - DNA, 579 bp, Homo sapiens
  misc_feature 1, 2: n = A,T,C or G
nngaaacactatttaacttaataatgtctacttaatatataatttactgtataaagtaattttggcaaaatataggtgatttttttctggagaattgtaaaataaagttttctatttttccttaagtcccctaaaagccacaaaaaaaaaaaaaaaaaaaaaaaagtacatattagcttggcattcagtaaatattgttgctaccctacaagaaagataatcaaactgaggataatcaaaccaggcatgcatttttatccttgaccatgtttcccggcatttagcatgaagttccagccagagacctaggtataagaattgcattctagaaagttagacttccaagtaatttcaatgtttctccaaactagaataagtcatatgtttaattgtgattcaaagaaaatatttctaaccttttatttatttatttatttatttcacatgctgctaggagaagaggaactatcttaatgttttcctccaggtttgtagacagtctctctgacagtgaatgtgatctaaggttgtgtggctcaaacagccaatctacttcccaaagtgatttccctgctgggt

SEQ ID NO: 23828 - DNA, 1982 bp, Homo sapiens
  misc_feature 1860: n = A,T,C or G
gagtctgatttaagttgttgcttctcttatttaataaaatctaatatagaaccattttgcagattttaccatttttccacttactatactcatggatgctcagtgaccaccggaaatgtagtataataaaatattgttttatggctatgaactaggatataattaatacacaatatggtctggaaacaattctacttatataacttaaccagtatttttatatctgatatccatttttaatatgttgaaataaaacataccttggatcctcctcctcacattatttaaagttaggttttcaaatccaatacttacgatcaagtgctagacagagatcaaagaagccatccaattgtctgtgccccagtgtgaagtagatgatgcagtgattcaaggaggtgatgggtggagcttttgaggagcccctactgtgtccaccaggattgaagccaagagagaaagtgaactgggcccaggctgcagtagaagctttttatccatcttctattccatcctgaggttcacagctagcgagcagggagctggtggtgctctttcccatgctccagtggcttcaatgaagatgctctttcctgtatttcagtggcttcatgggctgagttgggtccctctctcactgtctttgtgggccaggaatccaggcacaggttagctagggggctttggttgtctcaaagctcattatgagtcattgaacgaagagctccattcctcaccagctgctggttgggggtgaactcagttccatgccacataagcttctcattaaaatggacaagcctcacagttctggaggctgcaagtccaagatcaaagtacttttttttttttttttcaggcggccgggaagatggcggacattcagactgagcgtgcctaccaaaagcagccgaccatctttcaaaacaagaagagggtcctgctgggagaaactggcaaggagaagctcccgcggtactacaagaacatcggtctgggcttcaagacacccaaggaggctattgagggcacctacattgacaagaaatgccccttcactgggtaatgtgtcccattccgagggcggatcctcgtctggcgtggtgaccaagatgaagatgcagaggaccattgtcatccgccgagactatctgcactacatccgcaagtacaaccgcttcgagaagcgccacaagaacatgtctgtacacctgtccccctgcttcaggtgggcgcagtggcccatcaggttgctcaggccacgctctctcagccttcagattccagatcggaccaatttaaggccaactgagggagggaaagactgaggctggacatctctgggaagccccagaatctcaggatttgtatatcatatgttcttcagaatcaaagcgttctacagggtgaatatctctacctgaaatgcttggaaccagattttggaatgttctcgcatacatagtgagatgttttggggatgtgacataggtctaaacaagaagctcatttgtttcatatacaccttattcacatagcctgaaagtagtcttacgcagtgcgttttataattctgtgtgaaacaaagtttgcgtacattgaaccattggaaagcaaaggtgtcacgctggtattgaagaagtttcagattctagccaggcaccgtggctcaagccagtaatcccagcactgtaggaggctgaggcaggaggatcccttgagcccaggagtttgagaccagcctgggcaacatggcaaaaccctctctctacaaaaaatacaagtttgccaggtgtggtagcatgtgcctgtagtctcaggtcttcaggcggctggggtgggaggattgcttgagcccanaaagtggaggctgcagtgagccgagatggcagcactgctctccggcctgggcgacagagtaagaccctgtctctcccacacacacacaaattcagattttgcagcgtttcagaatttttgga

SEQ ID NO: 23829 - DNA, 920 bp, Homo sapiens; identical to SEQ ID NO: 20829
  misc_feature 1, 2, 3, 4, 5, 6, 7, 8, 9, 10, 915, 916, 917, 918, 919, 920: n = A,T,C or G

SEQ ID NO: 23830 - DNA, 741 bp, Homo sapiens; identical to SEQ ID NO: 20131

SEQ ID NO: 23831 - DNA, 1490 bp, Homo sapiens; identical to SEQ ID NO: 21073

SEQ ID NO: 23832 - DNA, 1490 bp, Homo sapiens; identical to SEQ ID NO: 21073

SEQ ID NO: 23833 - DNA, 3275 bp, Homo sapiens
  misc_feature 3275: n = A,T,C or G
agtcgaccacgcgtccggtagctaaggcgatcagcgggacttcccactgagacgagcggatgtcatattgtatcagggcgaacctctgaggagcgctggctgcgcttaggcaacggtgcggcaggcgccggggttttctgaaacagaaacgtttaggggtggggaaacgtgttccgaggaactctcgttttgaagtgcgagatacacctgtcttgccctgttccaagatggtggcagagcttctctgagtctctcgcttcctccagtccgtcggagaagcgctctttgattggccagtggacagcgccgtggcatgacgcgctggggcgctggccaatcggttgagagctgagctggacttggcggtgggagccggagcctgcttgttgcagctgtgggtgaggacggctctagctagttcccttttagactatggcgacatacctggagttcatccagcagaatgaagaacgggatggtgtgcgttttagttggaacgtgtggccttccagccggctggaggctacaagaatggttgtacccctggcttgtctccttactcctttgaaagaacgtccagacctacctcctgtacaatatgaacctgtgctttgcagcaggccaacttgtaaagctgttctcaacccactttgtcaggttgattatcgagcaaaactttgggcctgtaatttctgttttcaaagaaatcagtttcctccagcttatggaggcatatctgaggtgaatcaacctgccgaattgatgccccagttttctacaattgagtacgtgatacagcgaggtgctcagtcccctctgatctttctctatgtggttgacacatgcctggaggaagatgaccttcaagcactcaaagagtccctgcagatgtccctgagtcttcttcctccagatgctctggtgggtctgatcacatttggaaggatggtgcaggttcatgagctaagctgtgaaggaatctccaaaagttatgtcttccgagggaccaaggatttaactgcaaagcaaatacaggatatgttgggcctgaccaagccagccatgcccatgcagcaagcacgacctgcacaaccacaggagcacccttttgcttcaagcagatttctgcagcctgttcacaagattgatatgaacctcactgatcttcttggggagctacagagggacccatggccagtaactcaggggaagagacctttgcgatccactggtgtggctttgtccattgctgttggcttgctggagggcacttttccaaacacaggagccaggatcatgctgtttactggaggtccccctacccaagggcctggcatggtggttggagatgaattaaagattcctattcgttcttggcatgatattgagaaagataatgcacgattcatgaaaaaggcaaccaagcactatgagatgcttgctaatcgaacagctgcaaatggtcactgcattgatatttatgcttgtgcccttgatcaaactggacttttggagatgaagtgttgtgcaaatcttactggaggctacatggtaatgggagattctttcaacacttctctcttcaagcagacattccaaagaatctttactaaagattttaatggagatttccgaatggcatttggtgctactttggacgtaaagacctctcgggaactgaagattgcaggagccattggtccatgcgtatctctgaatgtgaaaggaccgtgtgtgtcagaaaatgagcttggtgttggtggcacgagtcagtggaaaatctgtggcctagatcctacatctacacttggcatctattttgaagttgtcaatcagcacaacaccccgatcccccaaggaggcagaggagccatccagtttgtcacgcattatcagcactccagcacccagagacgcatccgcgtgaccaccatcgcccgaaattgggcagatgtacagagtcagctcaggcacatagaagcagcatttgaccaggaggctgcggcagtgttgatggcacggcttggggtgttccgagcggagtcagaggaggggcccgatgtgctccggtggctggaccgacaactcatccgactgtgtcaaaagtttggacagtataacaaagaagaccccacttcttttaggttatcagattccttttctctatatcctcagtttatgttccatctgagaagatctccatttcttcaagtgtttaacaacagtcctgatgagtcgtcatattacagacatcattttgcccggcaggacctgacccagtccctcatcatgatccagcccattctctactcttactcctttcatgggccaccagagccagtactcttggatagcagcagcattctagctgacagaattttgctgatggatactttctttcaaattgtcatttatcttggtgagaccatagcccagtggcgtaaagctggctaccaggacatgcccgagtatgaaaacttcaagcaccttctgcaggcaccactggatgatgctcaagaaattctgcaagcacgcttcccgatgccacgttacatcaacacggagcatggaggcagtcaggctcgattccttttgtccaaagtgaacccatctcagacacacaataacctgtatgcttggggacaggaaactggagcacccatcctaactgatgatgttagcctgcaggtgttcatggaccatttgaagaagctggctgtctccagtgcctgttaagctgaggatacaaccaggaaatgcaacggtgtcagattgtgttcaaaatgtctagaaaggcttgataacattcctgttacttttctagcagattttaacaaataatcaaggacattttatatgtaactctttagattataatttatttgtattcctgtctttgtcctttttcttgcactataaaattataaggtcataaatgttttggtacttgtagatgtttatgtgctttttgtatcctaacttttagaatctaaataaaatcagaggtaatgtattttggcagcttgtttaggtgagaatcttaatgatcataaaggaaataaatctagatgcagaaagtactggctaaaatattgctaatacaaatgtgatttcctgaggtctctgtgtgagtgtgtatgtgttttaagtgacttccttaagaggtgtttcctgaacctaattctcataattaaagtaatgtatatgcaggatcaaaatgaaacaaatataccttatcctaaagagctcataacaaataagttacctccactctn

SEQ ID NO: 23834 - DNA, 1490 bp, Homo sapiens; identical to SEQ ID NO: 21073

SEQ ID NO: 23835 - DNA, 1490 bp, Homo sapiens; identical to SEQ ID NO: 21073

SEQ ID NO: 23836 - DNA, 1979 bp, Homo sapiens
  misc_feature 1, 1978, 1979: n = A,T,C or G
natgacacccaactaatttttatatttttagtagagacagggttccaccatgttggccaggctggtcttgaactcctggcctcaggtcatccacctgccttggcctcccaaagtgctgggattacaggcgtgagccaccacgcctggccgagtttttactttttatcgagcctgaacagataactattactgatctaatgaccatccccaccctacctcactttcagatctatccaatagcttcaaagggcaagtaattataatcatttgtgggaaaagttttattaaaaagtgacaaacttgaagctgtatatagtatgttctatttcagtttttagtggtgaatacagaagtcatcaaggtggtacttggtgccgctggaattttttttttttcctaggcagtcttgctctgtcatacaggctggagtacagtggcatcatcatgcagctggattttgacagcagaacttcaggcagtaattggagtcctaatgtcagttcttccttatggaggcctttatttggcctgagattttattcaactactttatagatgctgggtttattcatactatcgccagtttttataaaaatggaaaactagctcatcctttttgcaaaagaaagcaaagtggggagtcagaatgagaagtggataggggataactaaaactattctttactctcctttcattgcctttgagagctagctcttgcacacactgactttggcttccttagcgcataggtaagggaattgcctttccctcttttgtgaatattctcatttctgaaaaattctaagtcatgagaagataagccctatcctttcttacaaggattggatttcttgggtgacactgtggtgtggtggaagccagcggcttctttcaggttcataaaggccatcataacaacttcaggcttcatggtgtggacagggatccaggagagctgagtggatgtgtgaagtttctgatagattctgtcatcattccaaaggaatgtagtttcctccagctcaatcatttgaagtaatacacattgccaaatctgactgtaacctgacattttagacctattggagaaataggaagaaagcccctccagtggaaggactggacttggaagaagttctgcaggaaggtgcatgcaattggatagctgttcatgagtgaaacgtggggaacattgctatgaaattgtaaggtttgcacttcatttttcgtagtttaaaaattgctctgttctggctgttgaaaacacttggtgtgaggtttgaatgaggattatataatcattctagtattcataggaaaatgattactgctctctatttgtaaaacaaaagaaataactttcggaaacagtattttagacatgaggaaattgtttgtattaggcattttgatctaacagaatcagctaaggatagtggatcctggctttacacatttctttgaccaaacccagctggcaacttgaagttgttactgtgtggcttccagattgcctagaggtgaatcctaccaacatcactgttttttttgttttgttttgttttttttgtatgtttttgagacagagtcttgctctatccccaggctggagtgcagtggcgtgatctcggcttactgcaacctcagcctcctgggttcaagcgattctcctgcctcagcctcctgagtagctgagactacaggcgcgtgccaccacgcccagctattttgtaatcgcacgtagaagacgaggtttcactatgttggccaggatggtcttgattttctatgaacctcgtgttctgccgctttaactcccaaagtgccggcaattacaggcggtgagcgttgttgtgaccggggcccagcactcacttttactaacgcttctggggcccttccccttgggccctggtgtgtgaaacccacatggcctttccgtggggaacacacacaaaacgattgggccccactaann

SEQ ID NO: 23837 - DNA, 523 bp, Homo sapiens
  misc_feature 522, 523: n = A,T,C or G
actccagcctgggcaacacagcgagactctgtctaaaaaaaaaaaaagtgcttcaaaagcaaccgtataacagagacatactgaacataggatttctgccattcttgtctgcctataaggatagacaaactatctcagataagtaactgagatatttattcaacggtattctcatccagcataaaatacttttttcaatgtagtaacaaacttaccatcttttactttaagtgttctgttatttttgatttgcaatcagagcaatagtaaattgagtgagaaagttctgagttttacagaaactagaaggtgtaggaattttcttaagaaatcctgttctcatagcaacccatcccgtttcttgatgaaggagttcagataagtatatgaagtttggagtgtttattacgactctcagaccttttgaaatttacccatcacaaataccttctgtttttatgtgtgcagttaatatagatttaaatatatacttgccttctgaattttattatagatatacann

SEQ ID NO: 23838 - DNA, 353 bp, Homo sapiens
  misc_feature 352, 353: n = A,T,C or G
gcgcggggttgaagagtgtgtataggaaaggtctagaaataaataggcttgtgcatacctaggcattcatgctctttcttcctcttcagagatcatcagaaaagaggtgggaatacacaagcaggtgcatgtaagcccaaaagctagaaagccttatatttaaccaaaggttgatgtgttcattccagttattcacttacagatgaaactaaaacaaataaaggcaagctattatcagtttggtagttcattattttagaacaaatttctaaattaatttattcccataacctacaatagcactgagaacagaaaacatgtttcttcttcattttgtttaaagattgcgtann

SEQ ID NO: 23839 - DNA, 920 bp, Homo sapiens; identical to SEQ ID NO: 20829
  misc_feature 1, 2, 3, 4, 5, 6, 7, 8, 9, 10, 915, 916, 917, 918, 919, 920: n = A,T,C or G

SEQ ID NO: 23840 - DNA, 3560 bp, Homo sapiens; identical to SEQ ID NO: 23768
  misc_feature 1, 2, 3, 3529, 3543, 3551, 3552, 3553, 3554, 3555, 3556,3557, 3558, 3559, 3560: n = A,T,C or G

SEQ ID NO: 23841 - DNA, 533 bp, Homo sapiens
  misc_feature 1, 2, 3, 4, 5, 6, 7, 8, 9, 529, 530, 531, 532, 533: n = A,T,C or G
nnnnnnnnnatccactagtctagagcggccgaggtacctaatctttctggcctgaagtttatgtagaggttgttccgctatcgtctagtatttaatgtggcagagattggacactagaggaaaaaaattctggatatttacatgctttgtattgtgacagaaaactaatcacggtgaattgaggattgagtttccatttcttactgaaatggggtaaacattgccagtttgcatccttgcttttattctcaattctgcaaagttaactataattaaattaagcatttaaagcctgatagcatagaggtcaatagcacaaggtgtgaagccagactgcctaaattcaaatttttacaagctgagcaattttgggcaaggcacttaacatttctgtgcctatctcctatatgtaaaatttcctatatgtaaaaatatagtagttagctcatggagttattgtaatgagttaatacatgtaaatcacttagaagttcttggcacttagtaagtacctcggccgccaccgcgnnnnn

SEQ ID NO: 23842 - DNA, 555 bp, Homo sapiens; identical to SEQ ID NO: 23733
  misc_feature 1, 2, 3, 554, 555: n = A,T,C or G

SEQ ID NO: 23843 - DNA, 1431 bp, Homo sapiens
  misc_feature 1, 2, 3, 4, 5, 6, 7, 8, 9, 10, 11, 12, 13, 1431: n = A,T,C or G
nnnnnnnnnnnnnagtacagacagggtttcaccatgttggccaggatggtctcgatctcttaattttgtgatctgccagcctcggcctcccaaagtgctgggattacaggtgtgagccaccatgccctgtcaaaatattaaacttaactaatacattgtaatttttagtacttctataattactgcttcataaaaaagtggatttttccagctctccagttcagatgctattaacaggtaatcagatagcactgactaagtagaaatagattaagagtaatacctaaatttaatgtattttagcatattgaaatgagtatcatcagtgtatatttcatttatcactttgtctacactttattaggtggccttaatgcttgtcattgacaaatgttaactttcctcacaaaacctacactattcacttttttccagtatttttaccttccttattaaaaatgtttctaccatcaagaatttaaaatagaatcatgacattgcaatccaaacactaccttggcttgccagattagtctacgtgtcactccttggtgtaaagctataattccaacttccagcaaagaagtatctctgaattcaaatgagaatgacatttctatgggaataaatgtgaactgtctcacatttaaccattaagaatttactcatacgtcatcatgataacctaatgttagactgagaatcactgctctagtgtggctccagaagctgtcagtcaggaactactgatacgatttcacttgtccaataattttatacttccatcttgtagtacaaaaacattttaattttggcctgataaatgactaaaacaattgccgggggaattcagagagacacgtttcattattcaattcctaactgaattgaccctcattgatcctcagactaatttagacacttttcaataacattcacagtcaatctcaaagagaatattatttttgaattcttgctattgaagttaacatttacatctaaaagaaaatcatcatccttattggacaagtagaactcaaacaaacaaacaaaaaaactctagtcataataatgaaaatactgagtttctgatgtacaaagagtaaaatattcatatactggaaaaatggtgcagtataaatgggcaaaatttcactctttctagtaggaagtcaataaataattgatgtatcaaaaagtagcggtataatcatacaatttggaaatataaattcttcaactactagaattgaaagaggaagtttcttctgtcaatgtgaaagagggactgcctctttttttgtcacaagccttttagaactgtaagattttttaaaactgtttgcatataatgtttgaaggtgggaatgggaccagagaggcgacaattttacctggagaaacaacctcccgaaaccatttgtaagtaan

SEQ ID NO: 23844 - DNA, 1799 bp, Homo sapiens
  misc_feature 1, 2, 3, 4, 5, 6, 1777, 1778, 1779, 1780, 1781, 1782, 1783,1784, 1785, 1786, 1787, 1788, 1789, 1790, 1791, 1792, 1793,1794, 1795, 1796, 1797, 1798, 1799: n = A,T,C or G
nnnnnnctaggtgtgatgcagttcagaataaataaattcaaatgacataggttgccttgctttgttgtagttttcaaaaatggacacaacagagttcatatttgataatacaaatagcccttgtcggtggcatgatagctttatccatcatttatagtttatgacttgtggttattttaaaacattgaaagaattttgaaaaaagtcataaatgtctgtaacactagcacttttaaggcagataatagacatctaaaatcttcagggcatggctatggctttagaatcatctgaataagttgaaaatatttaagaaatataggtctgttcatccaaagaattaaataatttgcctttgtcacgatggaataaataacatatcacaggttatttttgttgtggtagatgccttttaacaaaaggcaatccctggagactgttgtagaaaaggacaaagcaaaacgggtgttttggttttgctttattttgattgattgttgtttgttgtcattactttctttgtacaatcacttttccatggtcaccctcttttctgctttatactaattgccctgttgaggtgtttccatgtcaaatgcagctcttgtcggaactgaaaatggcagtgccaagggagctgtgcaagtataatcaaagctggaagatttcctccatccacccgcaaccccaaggcttaagcattcccttaggaaccaaagctgactctttgggaaagttttcacagccttattaggttacaaccctgaagatgttttgttgttttgaccttaaaattttgtgaactgttttgtgaactgtgtgtgtgtgcacacacatgtgcaaaggagttgcttgcaccttgagagagtcaatttttctgcctaagtgaaaggtcaggaactgcagttaacccagagtaaaatattggttgggtgaagggctcacttctagtatagtcagaatgggctcaagatcttaggaggatgataggtgatgaactgcttaaggtaggtactgttgtgtttgtgctttgtctcatgtggacaaattaccttgttgcatatgtgagttatgtggacataaacatatacagcagttactccctgactggctggctttcttaaagtgatagtcagaatatagcctgtactgtcagatatgaaagatcaatataattgaatgaaaaagaaagctgaaggacaatccaagaataatacaaacataagctattttaaaacattagagggagtgctttatgcaaaagagaaactgaatttattgtttcattctctcttctctcccttcacccctttcaagaaaacgcaaagccacaagtgagtggttgtatgtgtctgatggcttatgtaaacatagaagaagtcttcagatggctaaaataaacatgcgcgtgttaccaaaggatatgtttacacaaaccatttgctcagcctctgaaataatgaataaatgaagattttactaaaataattgggaggatttttgtgtttctgcggatgccataattgaatggcaccaaagagacttttatcagctattttccgtgttacatgtgttagcagttcctttctgtgggttgaatacttcattctgtagttactttacacatgtttttctaagaaattgtcgtttattactgcaattctagagagttgcttgatttctcaagagaaatttagcagccagtaaaggttatttggatctggttggtcaggagagggagggcaaagaaaaagaataaaagaaacccagcggaaannnnnnnnnnnnnnnnnnnnnnn

SEQ ID NO: 23845 - DNA, 1038 bp, Homo sapiens
  misc_feature 1027, 1038: n = A,T,C or G
attaattaaggtgggaaaacatgaaagtgctctaagcctgtgaagacagaattaaatgtgattttaaaggtgagggtttatagctatttcattagaatcatgaatgagacatgaatagaactattattatggttatttgatattgttttcttaggttgtacattatacaataaggcaagaaactaaaaacccatacaaatattggcaaagaagcagcaaattactttgtttatagattacagtattacacatttagaaaatataagagacttcggcagaaaacaatgtagtttacctcaggaaaacactaatattttaccagatggcatagaacagaaactgaaaaaagtgagagaaagaccatatttcttgataaaaatatttagtatcacaaaaatattaatgcttccacaattgtctaaaaaactcctccaatacaaatcacaattgcaatacttagttgggggaattggggaactgaaaaattagtttttgttcatatagctcttaagtttataagaaataggaaatcaagaaaaacattagtgaagggtgatttgctttattagatattaatatttaccacaaaacattgaaatagcatgagaaaagactaaaacaaatacagaaatagctacaaaaatatataaaaatgttacatgacaaaatagacatttatgtttcagtagcagagtgacttatttaataaatagcactaatgtaattagccagccataaggtgaataaatataaaagaatgttaatgcatgctattcaaaaatatattgcaaatagaatgaagtttgaaatgtcaaaagtaaaaattaactcactgtaagacaaaatgaaaaaaacaacttgtacgatcttggtttaggaaaaatcttcctaattattaacaaaaaaacccccaaagcctcaggaatcatagtgaaaaagataatatatttgattacatgaaaattaaaaattgcttcatgtgaaaatctatcaataaaatagaaaataattctcaattgggcaacanatttgtagcan

SEQ ID NO: 23846 - DNA, 812 bp, Homo sapiens
actttaagaaaattttaatgtcataaataggcaacaaatattaaagcagagaaataagattaaaattagtgaaaggttaggtaaagagaacctaacagcagcagcagaaacagaaaacactacagatacgctacatccagatgtggcaagaaattgaacatatgaaacaaagactgtctctgacactaaaagcacaatggtgtcataaacaggaggggaaaaagactagagattgtggtgagttcaagagatttgatataaattgttacatatgttacccaattatctttatgaaatattgttttacatgaatattctgtatttttctccaagatgttataaatcactaaataagcaattcgagatataattacaagtagaatacaatatgaaataatactcctactctgcatttagacaagcaatatagattaaaggaatctttgttttggaaataaatgccagcaaatgaaaaccttcacattgaagataatcagtcaaaaagtattcctcaaaaccctactacatatgaggaaatatagtgtagtcacagtatttatcgcatactttgatagcctaggaagttaccccctcctgttttcaggtaaaagagggataatcgcatctatctcatgtagctgctcacaagattgaatgagtaaatacatgcaatgtatatggaatagtaactggcatgtaataagcaccccaaatttgacttatcctgtgcaaggcactgggaaaaagccccctgcaaaataagtaagaatcaccggttctaataatttacaatttagggaggcaaacggacg

SEQ ID NO: 23847 - DNA, 800 bp, Homo sapiens; identical to SEQ ID NO: 23821
  misc_feature 1, 796, 797, 798, 799, 800: n = A,T,C or G

SEQ ID NO: 23848 - DNA, 2208 bp, Homo sapiens
  misc_feature 1, 2206, 2207, 2208: n = A,T,C or G
ngcataatagataattgagaagatagggtggcatggctcacaacagtaatgatggcttcatattttttttccttctttttaatatatttatcttgggcaaattctgtctgtctcggaatgtgtaccatttataactggcttctttccaagtaggttctcaggtggcatatttggaagacggctggaatgacagaattcttgtatcagagtaggtaagaagggagcaacctctcaatggctattatgtcatgctttttaagatcgtatgcggttcctatatacaaggaagcttccctgtggtagattcgtcataaatgccaaagatatttggtaatgtgagtgtagaaaaagtagtatgagggttggcaaatactgtttttgtcttggcagctctaatatctgcattgttcagaaaggattctgaggctaaggcaaagctctgtgggaaaaagggactggaccaaaaaaaactggatggtggcacacaagaagaggaaatgatgagatgtgtactttctatctctggttaggcttagtccccactagacaaattgattttaaatactatgtagtgatttttaaattccatccacacattcattacccacacagataatcatagaaatttgggggagtgcctagcttctgatgaagtggtgatatggcagttgccaagcagtggcatcgccagagtatctgtttggttagcaaatgagcagtcattttaggtcatgcagattgctgatatctgcccagtagccactgagcatttgctggttttttcttctggctttcttggaggttaagctctctgtagtcatacccagttggtacttgatctttagcaatatgtctcatattcatgtaaattgaagggagggttacatgtactgaaataatctgcatgctaggcattggcttagacaccgtacctatctcacttagatttgtggactaggaaagcaagattcagagatcatgtgacttgcatgtggcctagagataaaattcaaatctggttctgtagactccagggacatattcaccatgccatgggtggtggctattaaaccttgataaatttgtgtttatggttaacaaatgtgaaagctattaaacattgctggtttgaattttttacagtgcagaaatgtaaaatgaaaaaggatatttcctttcacagtgttaccgagaagtcatgataatttcgtttgttcttccagatttaggcatatacttatttaatcaataatgtgttaacagctgacacctgtggttgctgtgacaggcactatttgaagtgctttatcatggattaactcttaatcctcagctaccgtataaagtaggacataaccccatttcacatgcactacactgagacttgcctcctctccccccacattgaagatgttcttttttcataactatatactattccattgcatgaatattctgtaatttatttaatcccctatggattgataattaggttcattatagatagaagtgtaattaacattcctgtacatgtattttgctacttgtgtgggtatttctgtaggatgaataactagaaatttattggatcaggtttcacatttgcagttttgaaaactactaccaaaaagatttcaccaatttacaactccatcattagtaagaatgcctgtttgcctatagtctgccaaccctgaatccttaaaaatttttgccaatctggtaggcaaaatttctttcttttctttgaatattaatgaggaggaacatcttttcatgtttcttggccatttgcatttcctattatgaattgcttttgcccattttcctttttttaattatgaaagtctaatgactaccttctcattgtataaaaaacacagttctttgaatagagagacccttttctccaatgctaccaatcacattccacttaccacagtttaacatacatcctctagtcacctttccgtacgaatatacatacacataaaaacactttttacataaataggaatccattttctgtgcctttacaacacttggcctcaacaaaggttacaagggctaaactcctaagcgggcactgctcacatatatgtaaagcgctttatcccagagttgccccgcatatctgcccagaaccccatcggttgggcggtgcaattagccgcccacgggtgtgcacaggggtgacccacaccannn

SEQ ID NO: 23849 - DNA, 573 bp, Homo sapiens
  misc_feature 561, 571, 572, 573: n = A,T,C or G
aggcacccaccaccacgctcagctaatttttgtatttttagtagagatgggattttgtcatgttggctaggctagtctcgaattcctgacctcaagtgatccacccgccttggcctctcgaagtgctgggattacaggcgtgagccacccgcccggctatcagcactgttctgattgcagacgtttcacagcatgtttggcttttggtgaattcaatccaggaaagactagcatgtgcactttatctcataatcttccagtacatatgctctcagttgggatagcagttcatttccattaggcagacgtataaactaaggaatgttagtctgcagtattcattttaaaaatattgacatgcctttcccctcccctccatgaagtcagtgccagagtgagccagattgggaggttggggttttgtttggttggcttggttttcattaagggaaaaaacttgcattggacaatcaaattcccctgagtttcataatctcatcaatattttaagataggcgagcacacactaataattgctatgcctaccttttgggtggactncaactgtaannn

SEQ ID NO: 23850 - DNA, 906 bp, Homo sapiens; identical to SEQ ID NO: 23820
  misc_feature 1, 2, 3, 905, 906: n = A,T,C or G

SEQ ID NO: 23851 - DNA, 1545 bp, Homo sapiens; identical to SEQ ID NO: 23819
  misc_feature 1, 2, 3, 4, 5, 6, 7, 8, 9, 1541, 1542, 1543, 1544, 1545: n = A,T,C or G

SEQ ID NO: 23852 - DNA, 920 bp, Homo sapiens; identical to SEQ ID NO: 20829
  misc_feature 1, 2, 3, 4, 5, 6, 7, 8, 9, 10, 915, 916, 917, 918, 919, 920: n = A,T,C or G

SEQ ID NO: 23853 - DNA, 691 bp, Homo sapiens
  misc_feature 1, 2, 3: n = A,T,C or G
nnnaccaggactctcacacataagaatgttcagggaatattatttgtaaaaactccaaataaatataaccctaatatccaattagtagaattaatagcagtatattcaaagaatggactgtcatatagccatcaaatggacaaaatatagtaaaatgcaacaatgtgcacaaaaatacacagatatatatgcataaagtttgacagcatacaaaactaatttacattatttagtgatgcatgcataagtggcagttatttttaaaagcaaggaagtaattacaaaacttatgatagcgcttacttccagagggaaaaaaggaggggttggtgagggcttattgatgtaggccatgcacacaatttaagggggaatcaaaaagctaagtaatccagataaatgttatttattgtaatgcaataaaaatattcaaaataaggctaaaatctatgctgaagaaaataccacaattttaaaagaagattaatagggaacgtggaggtattttttctcttgacatgagtggtgcattgtatgcacatttgtttttcactgggctgcgtatttacatttagtgaatttttctatacatatattctatttcaaaaaattgcaaaaggaagtaaaaatggacacaggcaggctcttaatttcttgtgatctttgcttaagtcttatgtttctgttctgt

SEQ ID NO: 23854 - DNA, 660 bp, Homo sapiens; identical to SEQ ID NO: 20482
  misc_feature 657, 658, 659, 660: n = A,T,C or G

SEQ ID NO: 23855 - DNA, 747 bp, Homo sapiens
  misc_feature 1, 2, 689, 726, 735, 736, 737, 738, 739, 740, 741, 742, 743,744, 745, 746, 747: n = A,T,C or G
nnacgcgtccgtgatttgcccggaggccgcacccgcctccggcggggctctcagtgaaaaatgtactctgacctgaatcctgaattttccttgatggtcaaaagattaagaaatcatgagtggaggatctcaagtccacattttttggggtgctccaattgctccactgaaaatcacagtatcagaagacacagcttctttaatgtctgttgctgacccctggaaaaaaattcagcttttatacagtcaacattctttatatctgaaggatgaaaaacagcacaaaaatcttgaaaactataaagtcccagaatctattggttctccagatcttagtggtcatttcttagcaaactgtatgaatagacatgttcatgtgaaagatgactttgtacgttctgtttctgaaacacagaatatagaatcccagaagattcactcctctagactgagtgatataactagctctaatatgcaaatatgtggatttaaaagcacagttccgcatttcaccgaagaagaaaagtatcaaaagcttctcagtgaaaataaaattagagatgaacagcctaaacatcagccagatatatgtggtaagaactttaacacaaatttgtttcagttggggccataaatgtgcagctgtgttggatttggtttgttagtactgaaaaaattaatataggggnctgaaagttggtacaaaaaaaattttgtgcccacccnaaatttccnnnnnnnnnnnnn

SEQ ID NO: 23856 - DNA, 1407 bp, Homo sapiens
  misc_feature 1380, 1381, 1382, 1383, 1384, 1385, 1386, 1387, 1388, 1389,1390, 1391, 1392, 1393, 1394, 1395, 1396, 1397, 1398, 1399,1400, 1401, 1402, 1403, 1404, 1405, 1406, 1407: n = A,T,C or G
acacacagtcctttatttataaattccttaacagagaaaaacacctttgtaaggctcaacttacctattccagcaagcacactttttctgtcattttttctttcttttcaaatttgatattgtcattattttaaaatagtaagttttctttaatagtcttttgggacctaacataccctttctcatacaattcctaatgctctgtttatggcagataatctgtaatgttatgaagacctatcaaaaagttttaaaagtatttctgtcttcaaaggtagtaagacaggattaaatttttattagaatagacaaatcagtgaatggtatgcatgtatctagtggttactagaactcaggatcacacaatatagtagcatcacgatctgtgtatatttttgatcaagatgataataatggccttacttgggtttttatcgtttatcaaatcttacatacaaaagagtggaagtattcctttacaaaatttctaaggaaaatatttcttccaatctatcacaattatagaatggatatatgtttctgaaaagtttttgaaagaaagcaaaagttctagaactaaaagtaagctggtatttaatatcccgttgatatttagaaaagattgttaataagaaatggaggatgcatttagtactatttttatccactagttcactttcagtacagttatgtatacttgttttgattgagagtgtgacatacatgttaaatcagattagcttgtttcttttaaatatacatatacacaaatacatataattttttctcctttttgttgtgcatatctctatgcatttttaaacttttagatttgtgaatgacctatgtgtaaatttttgtttttataaaccagaaattatacaagttttaatgtgtgtcaagaacttgttccatacaactgtggtatcgagcaataatgttaataacttttggaattatataaactatgcttaataatttgtattgagaattggtaccactatacaatacttttttcctgtattaaatcttttaaataccagtttcattaatttatatacctgtatttttaaaagtatttctttgtacttgccaaagtactgtaatcctatataaatttgaatagtcaaatgccagtatctcatgtcctatatcctgtcttggatattaggagctatcttaaaaactaggatttaagatttttttttgcttgagaattatatgttttccttgccccccaagtaacaacttgaatttgtagaacacttttcctgtgaagagttcaaagtacaaagaactcaaatacttattttatttaacttgtatctagggtgtgtcctaccaccttaaagtagtgcaattaaaaataatgccatctannnnnnnnnnnnnnnnnnnnnnnnnnnn

SEQ ID NO: 23857 - DNA, 2843 bp, Homo sapiens; identical to SEQ ID NO: 20339
  misc_feature 1, 2, 3, 4, 2815, 2816, 2817, 2818, 2819, 2820, 2821, 2822,2823, 2824, 2825, 2826, 2827, 2828, 2829, 2830, 2831, 2832,2833, 2834, 2835, 2836, 2837, 2838, 2839, 2840, 2841, 2842,2843: n = A,T,C or G

SEQ ID NO: 23858 - DNA, 276 bp, Homo sapiens
  misc_feature 275, 276: n = A,T,C or G
acagaggccctgaggcagatttgagaaagggcaaagaagtcactgtagctgtggttgaggtggaaagaaggagagtggtagaaaatggagttagagaggtaatgggggtgggaagaatgtgaggggcctcacaggccttatggactttggatatttctctgagagaaatggggaacctctgaagtgttttgatcgcaggagatgtattagtcatctgttacagggtaataaatacagccaaccaaaatgtagtgggttaaaagaacactaagtann

SEQ ID NO: 23859 - DNA, 920 bp, Homo sapiens; identical to SEQ ID NO: 20829
  misc_feature 1, 2, 3, 4, 5, 6, 7, 8, 9, 10, 915, 916, 917, 918, 919, 920: n = A,T,C or G

SEQ ID NO: 23860 - DNA, 844 bp, Homo sapiens
  misc_feature 1, 2, 3, 4, 5, 843, 844: n = A,T,C or G
nnnnngccccacccccccgccccgtcgttgtgtccggcttcggcgcgcttgtggaagagctgtcccaagtgtcccccacgacttggtggagcggaacttccagtacctttctccgcgttgtccggcacgccattatcgaggaaccagtatgtccggcaataaaccggaccttgaactgtgagtatggtttaatagaaagaagcacaaatgccccacctgtgtaacttattgctacttgagtttactatccatgttataacatcataaaataatttcagttgggaaggttcaatgaaataatgtctaaagttatttctcatagctcttgctgctaatgtcattaacacccctgttagaaacgttagataatatcctgggtataccccgtgccaaatggcagagagaatgaacgtctggatagttggactgaaggaggttcgttcataacacacccttttgagccaaagagctgtctgaatattccaattatcaagaaacatcttgaaacttgttgacatctctatttgttgaattctcaaattggaaattaagtcccagcgagctgctccattttcgtcataccctctgaaaccaaagcctgcagcattattaatggcatcagctagcgtccatgcaaaatagtatttgggtctggcagccaaaagagagatatacagatagataatctttgttggccacgaagctgtagcttgaaaatgctcatcaatgttgtactccacaggtaatgttgtacagatggtcaagtgaaataacaaggacagcccacaactggtggaggtcaccggggattgaacccggggcctcgtgcaagccaagcacgcnn

SEQ ID NO: 23861 - DNA, 573 bp, Homo sapiens
  misc_feature 1, 2, 3: n = A,T,C or G
nnnacaaataatagttgaattatgttaacgggttagaagtagatggatttcttgcctgtaatttccaaggagttacttttttataatgtaggcattccatttagttttgttaaataaaaaataatgagactaacaaagtcaatgagaatatttagaagggaaaaaaaaggtactatgtattaagacacccatgaatactgttttatatttacattctaagccttcgataggcctgaagttaaattaagattccccaatctgcctatcagcattcattttctgtgtatgttgactcctcacctaaatttcacctgctcactaactgctatcaagcctttctttcagagaagtggctgatatcacatatctacatacaattaaacatgctgactctcgggtcttttgaaccttctttctcctatagagtggaagactgtctcttagagggacaccttccggctgcttataaacaggtgagcatagtattgaaggcttaaagaatttggtccaagggatccaaaacaggtctatttgtgctctgatcagcatggcttcaaatcccttattctgagt

SEQ ID NO: 23862 - DNA, 1982 bp, Homo sapiens; identical to SEQ ID NO: 23828
  misc_feature 1860: n = A,T,C or G

SEQ ID NO: 23863 - DNA, 1344 bp, Homo sapiens; identical to SEQ ID NO: 21726
  misc_feature 1: n = A,T,C or G

SEQ ID NO: 23864 - DNA, 2061 bp, Homo sapiens; identical to SEQ ID NO: 21065
  misc_feature 1, 2054, 2055, 2056, 2057, 2058, 2059, 2060, 2061: n = A,T,C or G

SEQ ID NO: 23865 - DNA, 1617 bp, Homo sapiens
  misc_feature 1, 1604, 1605, 1606, 1607, 1608, 1609, 1610, 1611, 1612,1613, 1614, 1615, 1616, 1617: n = A,T,C or G
nccagcctgggcccatgtttcccccacacaataaggctaagagcccaggtgtcaggcagccaggcagcagcttttgctcagcccctgggcagcccagcacaggggttgctcgacccacagttagttctggccctgtgcctaggcgccagaatggcagctccttttctcaggacctgtagcgatcaatcagtgggtccaagaagccaaccaatgactcaaatccctctaggcggacagtcagtggtacatgtggccctggacaacctgcaagcagctcaggtggccctgggcgacccatcagtggttcagttagttctgcaagacccttgggcagctctcgtggccctggccggcctgtgagcagtccacatgaacttcgacgaccagtgagtggcttgggccccccggggcggtctgtcagtggccctgggagatccataagtggctcaattccagccggacgggctgtcagtaattcagtcccaggaagaccagtgagcagcttgggacctgggcaaacagttagtagctcaggtcccactataaagcctaagtgcactgttgtctccgaaacaatttcttccaagaatatcattagccggtccagcaatggacagatgaatggaatgaagcctcccctatctggctacagagctgcccaaggtcctcaaaggcttcccttccctactggttacaaaaggcagcgagaatatgaagaggaagatgacgatgatgatgaatacgactctgaaatggaagattttattgaagatgaaggagagcctcaggaagaaatatccaagcacattagagaaatctttggttatgaccgaaaaaaatacaaagatgaaagtgattatgccttacgttacagggaaagtagttggaaagagcagcagaaggaagaagcaaagagcttaagactgggtatgcaagaggacttagaggaaatgagacgtgaagaagaagaaatgcaacgtcgaagggccaagaagctgaagaggcgttagctgctgcttttatttttgtgaaattctagagctgctctgctgcaaggatttcctgccttcagactgaagaagcccccttatcattttagatttatacttgggtactcaaggagaaggaatgcatactgtcatttgcaggctgtcatttgagcataaaatattttcagatattttccagggtgaaatctgtaatgcagatgatataatgcccacttgtgctcttatgaagttaactgttcacagatgccagccttgatcctgatgagctatgcactctaatgtggggccactcaccagtcagccaatcttttattgttcctttgctactttgaaaggaaaaaaaaggttgtctcttgatttctgtaattcttctgctgatctgtgagtagggcactgccctgctcccaatcaaacttagtctttttatgagaaacctggaccttccatgaatgttgccagcaataaagtgacttgtcctaatctatggattgagaacttgaaaatgtagagtagaatttataactatcatatggatgtcatcctgtgactttgaagtacaaagtagaataaattctgtattcatggaaaatatcnnnnnnnnnnnnnn

SEQ ID NO: 23866 - DNA, 2824 bp, Homo sapiens
  misc_feature 1, 2799, 2800, 2801, 2802, 2803, 2804, 2805, 2806, 2807,2808, 2809, 2810, 2811, 2812, 2813, 2814, 2815, 2816, 2817,2818, 2819, 2820, 2821, 2822, 2823, 2824: n = A,T,C or G
naagaatccttacaatttaaaatattttcacttttattttgaaaaagagccaactttctcaaaggaagctgtcattaacttctgttgtttggttagctaataaattctgttagtatgcaagttaaacctgtgtaaaggaggttataacgtggtaaggtataattttccaatatgagacaatggcttaaatttgcctttggagatggagaatattttcaacatacataattttaacaaatagttttgttgctttttgttaagcttaaaaaaaaaatttggatcagaaattataggattgagctggtaccaaaagaatcctaaagtacagaatggttttccaaaagagcagacatttcaatgaaaataaaaccccaaaacattttttttatatatcatgattgcatgcttttaaaataaggaggcttatcattgaattttagttccataaaaatgaaaatacatgtttattatttagaaatggttagtgactggtattgaagtattattcacacttatgtttgtaataatttatttaaagaatgccaacagtttagcacacttttgtaatctctagaacagttctatacattaaaaataaacattaaaaataaagcagttcctttaaacaacttactatgaaactataattgttaatgaaataagatattcctatgtatacattagtatgatttaagggtatgaaaaacagtgctaaaatgtggagttaattggaatgtgtgcagctgcatactcactttctgtgtttttatatttccttacctagttttaaaaatcatcacttttcggcacttcagctagacttatttcaatattataattatgattaatgaaggagcagtcagaagtagaggtgtggtattccgtgggcagaagtcaaatgaaaaaagctatattgtttacttgtttactatatcaatgttaatattatgccttattttgataaatcaaatagtatatcttaatcattgttgataaatatacaggcaaagtttgagcatcatatgtatttttatgaagctgcttaattccaaattgcctcccaccccactatctagcatagtttaagcaacacataattttgaaagaaaagtttgtaatccctcctttcttttttttgcccatttctaaatcctgtatgcccgcagtaaagatagtttggggattttaaaagttttctctattacccatttctaaatcctgtatgtcaaagatagtttggagattataaaaattttcatgtattggtgtaggttgagtatccctaatgagaaaattcaaaatctgaaatgcttcaaaatctgaaatttttcgagcacagacatgatgctcaaaggaaatactcacagagcattttacatttgtaggttagcgatactcagcaagtaaatataatgcacatgttctaaaatatccccccaaaccccagcaatccaaaacacttctggtcctaagcattttgagtaggggatactcactcaacctgtatatttgtgctaatacatgactcattagaatgattctttgtaaacttaatattttaaaagtacagcacttctgtagtatggaaggtttcagtaataattatattcattcagtagtctcttaccattatctcccagatggaaaaagaggactaatgtggaaaccccagagggtgtccagttggaccagggagatattagacacttaacagtattttcagtctgtccatctctttattccaatgtgagaaatggaagtgtttttttttttacgtttattggctcttcatatttctctacattatttttaatgtgcagtttcttcaattggttagtatttccatactatttgcaactttatggcctttaaatataggacatattatatagcagaaattttgactttaaatcctcttgagtagtatattttgagaagaaaagctatactgctcttctggatggtttccatcctttatttaggtcttttctttttgaattcaagtgttttgtatgcttagaaagtagacatgtataatattgagatcggttatttctgagctggaaattggaaactttggaaactcaggaaattgctctgacaatgttttaactgctctcaatttaagaaaatgacgaaatgtataaaaaagacaaaaataacgtgtgctgttttttccaagtgctttttctaagtgcttttccattgtgcaatgaggtgaagtttggtaatttttcggtgtagtagttaaatattgctcaatttttatttacatgtaaagaaaacagatttaaatgtttatgtggccaaaaggtgtcatttaaaaggtaaaataagtttatgtagaatgtatgttcatggtgcttatttttaaaatgtaattcaagtttacagtattacttaatgcttctttacagaatttaatagagaaacaaggctagaacacatctacatcctgaagagccgtttataacttcatattatatgatgacaaagttcattattttccttaaagttgagcaattgacttttatggtccaatgatgaacttattattaataaatgattgagttaactgtgaggcttctcattaaaatacaatattgcagctatcagttggagaatatattataaaattttcagacagtatatcagaaaaatgtttttatttgtactgtatagaaaatgtaattttgctgttaactctgtactttttaaattgaaaatgttttataaatttgcttttaaattttcttatgaagccatttgcaaattacatacttaatttaataaaatacnnnnnnnnnnnnnnnnnnnnnnnnnn

SEQ ID NO: 23867 - DNA, 2544 bp, Homo sapiens
  misc_feature 1, 1081, 2544: n = A,T,C or G
ngactactgatgggaagttaattgccagagcattgagaagttcagctgttgtagaggtaagaatcaagaataactactgtttatatttatagtttataattataaagaatgttaacgtaatgattattatatgattatagcttacaattataaataatattagttttattaatgtaatatactattttaaagcttgatttggaaggcaccagaatccggaggaaaaaacctctgggggaaagaccaaaggatgaggatgaacgcacagtgtatgtggtaagcttaagaacccgggtccccagtcagaaactggcacagaaacaatataattaagttaaaaatttattgacattctgattgtgaaaaactctaatattgcttttaatttataataggagttacttcccaaaaatgttaatcacagctggattgaaagagtatttgggaaatgtggcaatgttgtttatataagtataccacattataagtctactggagatccaaagggatttgcgtttgtggaatttgaaacaaaagaacaagcagcaaaagcaattgaggtaagtccagatcctaaaaaaaaaaaaagaaagaaaagaaaacaagtattaaaatagtaacttttgcaatcatttcagtttcttaacaacccaccagaagaagcaccaagaaaacctggcatatttcctaaaacagtgaaaaataagcccattccagccttaagagttgtgggtgagtatttttcaatatttaaataggtgtagttgaagtaagatgaactaataatgatggcacttttacagaagagaagaaaaagaaaaagaagaagaaaggccgaatgaaaaaggaagactatatccaagccaaagaagaaaacatggacacaagcaacaccagcatcagtaaaatgaaaagatccagacccacatctgagggctctgacattgagtccactgaaccccaaaaagcagtgctcaaagaaaaagaaaaaacgggacagagttgaagcatctagcttacctgaagtcagaacagggaagaggaagagaagcagctctgaagatgcagaatccctagctcnccgatcaaaagtaaagaaaattattcagaaagacatcattaaggaagcatcagaagcttccaaggaaaatagagccccatgtcttaacggagagcttttttatttatttcaagatatagaaatctctactgaagaggaaaaggatactggagatctaaaagatagctctctcttgaaaacaaagagggagacaactatccaagccaaagaagaaaacatggacacaagcaacaccagcatcagtaaaatgaaaagatccagacccacatctgagggctctgacattgagtccactgaaccccaaaagcagtgctcaaagaaaaagaaaaaacgggacagagttgaagcatctagcttacctgaagtcagaacagggaagaggaagagaagcagctctgaagatgcagaatccctagctccccgatcaaaagtaaagaaaattattcagaaagacatcattaaggaagcatcagaagcttccaaggaaaatagagccccatgtcttaacggagagcttttttatttatttcaagatatagaaatctctactgaagaggaaaaggatactggagatctaaaagatagctctctcttgaaaacaaaaaggaaacataagaaaaaacataaagagagacataaaatgggagaagaagttataccattaagagtgctatcaaagagcgaatggatggatttgaaaaaagagtatttagcgctacaaaaagctagcatggcttctttaaaaaaaacaatatcccaaataaaatcagagtcagaaatggaaacagacagtggagtacctcaaaacactggaatgaaaaatgaaaaaagtaaagatcactgatagtttgacaacattataatgtacttatatatgtaaatgctatctctgagttgttataagataaattttaattttaaaaaacttgattattctatttcattattagaacaattcttgatttgttaagttatccagatgtgttacttactcttgatataagaatatttaaaaggctcatttaaaacaattttttaaataacctgagttttctctacagttttcatcaagcacatgagtgcagagttggcagactgagcaagtttgtaggaatgaagattgtagtttctcacctgttaatttcactctgtagtatgcaccacaagcaggaacaagttaaagcagaattcctatgaattcaaaattaggatacattttaaattctcatttctgtaaaaataaatgtcacgtttgatatatgttttaaacacagtatcttaacttttttaacttatgagtaaaattatggtctgtcagggagggaattaaggtagaaggcttagcgaaatggtgatataaatttgggtataggttgaaagaggaaaaacttggtttaaacggtttttaaaaaaaaaaatgggggggcaaaaaaaaggggagaaaggtgagaaagggtaaagan

SEQ ID NO: 23868 - DNA, 340 bp, Homo sapiens
  misc_feature 340: n = A,T,C or G
acgcggggagacagagatggagacggaaagacaaggacaagaagatggaatctgagctaatggcggagacatggaaccagtagagaagagacccactgtcttcagagagtgctgaccaggaagaggagaagccttggggactggatcaggtgtctgtccctaggtccccattcctgactcttctcctgccaccctgatctgggtgtagcatcatattagatgctgtgattgccatccagtcccagactgtgggaggctggggagtgtgaggaagcttttcccaaccctggcaggtacatacacaatcacttaactggaacaatcaaaaccatctatgagn

SEQ ID NO: 23869 - DNA, 340 bp, Homo sapiens
actcctcatgatcatctacacaacattctgtgacacgttctctaacccaaatattgacctggataaattcagccttgttctcatactgttcataatattttctatccagctgagttttatgcttttaactttcatcttttcaacaaggaataattcgggtttcacaccagcagacacagtggctatcattttctgttctacacacaaatcccttacattgggaattccgatgctgaagatcgtgtttgcaggccatgagcatctctctttaatatctgtacgcgggctgattaatatatttaatatattgaatgaaaaatagacatgtagttggaaaaaa

SEQ ID NO: 23870 - DNA, 524 bp, Homo sapiens
  misc_feature 518, 519, 520, 521, 522, 523, 524: n = A,T,C or G
actgaagagtaaatggtgcaatttggatgtgcaagtcagtaaattgataattggcactcttgaatgcaaaatagaaactagattctcaactatactgaagcttccattatccagaatgtcactgcatatacttggtgaattataaagtcaaacaagaaattcttctaactttgtcctttcttgtcaaaaatcctctcattaatatgctttcaatgtgcaaagtaaacaacgttgcattgattgtgtttttcaaggtctaaatattcagtataactagtcctgaatatttaagagatttagttggatgtatataagatataactgaaggttcttttttcttttttagttcattttgttttactgtaatgcttttcctacagttaaaatgagtaaaacattcttaatcgaaaaaaaaaaaaaaaaaaaaaaaaaaaaggtccttgggcccggaccccccctagggccaattccaacccactggcgggcggtacttagggatcccaacctgggacccaacnnnnnnn

SEQ ID NO: 23871 - DNA, 694 bp, Homo sapiens; identical to SEQ ID NO: 23775
  misc_feature 1, 2, 3, 4, 5, 6, 7, 8, 9, 10, 11, 12, 13, 14, 15, 16, 17,18, 19, 20, 21, 22, 23, 24, 25, 693, 694: n = A,T,C or G

SEQ ID NO: 23872 - DNA, 579 bp, Homo sapiens; identical to SEQ ID NO: 20440
  misc_feature 1, 2, 578, 579: n = A,T,C or G

SEQ ID NO: 23873 - DNA, 3772 bp, Homo sapiens
  misc_feature 3769, 3770, 3771, 3772: n = A,T,C or G
gacccacgcgtccggtctgtgtctgtctgtgtctcgcagcggcgcgcggccccggacaagcgctggggattcccgtttgaggcgtcactactgtcactgccatcaccccacggagccacttctagaggggagtagacccggcccttcgccgggcagagaagatgttgcccctgtccatcaaagacgatgaatacaaaccacccaagttcaatttgttcggcaagatctcgggctggtttaggtctatactgtccgacaagacttcccggaacctgtttttcttcctgtgcctgaacctctctttcgcttttgtggaactactctacggcatctggagcaactgcttaggcttgatttccgactcttttcacatgtttttcgatagcactgccattttggctggactggcagcttctgttatttcaaaatggagagataatgatgctttctcctatgggtatgttagagcggaagttctggctggctttgtcaatggcctatttttgatcttcactgctttttttattttctcagaaggagttgagagagcattagcccctccagatgtccaccatgagagactgcttcttgtttccattcttgggtttgtggtaaacctaataggaatatttgttttcaaacatggaggtcatggacattctcatggctctggccacggacacagtcattccctctttaatggtgctctagatcaggcacatggccatgtcgatcattgccatagccatgaagtgaaacatggtgctgcacatagccatgatcatgctcatggacatggacactttcattctcatgatggcccgtccttaaaagaaacaacaggacccagcagacagattttacaaggtgtatttttacatatcctagcagatacacttggaagtattggtgtaattgcttctgccatcatgatgcaaaattttggtctgatgatagcagatcctatctgttcaattcttatagccattcttatagttgtaagtgttattcctcttttaagagaatctgttggaatattaatgcagagaactcctcccctattagaaaatagtctgcctcagtgctatcagagggtacagcagttgcaaggagtttacagtttacaggaacagcacttctggactttatgttctgacgtttatgttgggaccttgaaattaatagtagcacctgatgctgatgctaggtggattttaagccaaacacataatatttttactcaggctggagtgagacagctctacgtacagattgactttgcagccatgtagtgaatggaaagaaattatgcaccttttatggaccaaatttttctgccagtaagaatttcagttgtgggcctccagtcttctggaatgtcttcactgcagctgctggaaatcactgctttcattcccacaaaaccagtattacttttttttaaaaaaagaaagaaattggaaatctgtgctatacgtaatgtcataattgttgacgttcttcagtataatcatgtttgttaaattgtttgtaccttgcaaacttatgaaccaaaccatattgggttttcaaagtgcctttgtatccaaaaatgtatttgccagcatagaaatgtaccatcaagagtcatgtatgttttatttttgtttttattttttattttttgagatggagtctcgctctgtagccaggctggagtgcagtggcataatctcagctcactgcaacctctgcttcccgggttcaagctattctcctgcctcagccttctgagtagctgcgactatgggcgtgtgccaccatgcccagctaatttttgcatttttagtagagatggggtttcaccatgttggccaggatggtcttgatctcttgacctcgtgatccgtccacctcagcctcccaaagtgctgggattacaggtgtgagccaccacgcccggctatgtttttttttttttttttttttttaacaatggatattctgtaaaatatcctgtacaaaacaagactattgccagtaatgtatacaaattgtctttttgtgtacttccagcataggtttggatatatgaacatttttcttttattgttttatcttcacagaaaataaaaggtgttaatttgctttttaaaacaaatttaattatcacattttaaattactttgtggactgtgttttcaaaactttgcaaattcatctgttacacagaaaattttgacttaaaacatctgctgaattccaaatttctgtaatagctactgtatctgtgataaactttcctatatctttccttgccatttctatggattttataatgaaagaaaaaggcattggagactgaaggcagaaatggttgtgacagtgctgtttggctttttcattcttcaaatgccaagtcatccactttgttttcctgtttaggctttgcacaaatacaattgctttcaggaatcctaaagcagcattttattgagtttgaattattaaaggtacagaggaaatgtggtgatgtagaacttttcctaacacaggtatctaggaagtaagtgctgagttgattttctaggttcttacgtatttgaaaaataaaattgcaattcgagataagtgcttgagcactctacttaagtattctctgtgttttatgaagagaaaatgatctgattttcccttatacttcattttacaatacatattcccttttaacttaaaaaaattgtaaatgtgggagaaaaaaccctgcaggatggaaacaattattaagaatgtagatcaataagtactttttagtgatgtggcagaaatccctgttgattctaagttttagagtgtcttttcccctatttctgacctacaactataaactactctctattaggagaactagaccactttcttcattcttttctaaactgctgcagattgccgtgaactctatcaatagtctcttttccgcaggcaaagtggcattttctaaacatgtttgcttactgccaggtggtttgaaatctatgatttactgcagtagtatgtgcttaaaacaactgttgaggtcttttaagcaggaaagttcaaaaggaagtgtcctgataatggtactggtttttctacaaatataagtagtcatttagaagtttgcaaccaccaccaagtctgagagaactctgggatattctgtgggttttggcatattagatagagaaaatgacagatctagatgaagggagcttttggatgtgtgcctttaaaaactgattatgtataaatactgatatttcacatacggagatatttgaagacccaagtctgcctttcacagagccctccattccaagtttagtttttgtcaaaatatgaatcattttatttgactgtactatcagtacacaaatgcatgagtatgtttatacagtgttagactgatgtgaatttgcatttgttacattacattgccagcgcatatcatttagcaagttggcattaacatttatgctttaattaaatgccagtatacctatgtgtgcagcagtaaaaaattagtgagaaaaagcaactttttgtcactcttaggaaatattttgtcttattagtgttcttggcacatgtatattactaaagtagataattccaatgagaaatactaccagattattgttataaaattaatttacaatgtccctgatattgagctaactcttaaaaaaaccaaacaaaactcgtatctgagtgtaactttgccaatatttttaaagcccaaatattctcnnnn

SEQ ID NO: 23874 - DNA, 4699 bp, Homo sapiens
  misc_feature 1, 2, 3, 4698, 4699: n = A,T,C or G
nnncgtccgcggagactggcgtccggcgtgtaccgagagactggcgtccggtgtgcaggtggccacatggatcctggcagccggtggcggaacctgcccagcgggcctagcctaaagcacttgactgacccctcttatggaatcccgcgggaacagcaaaaggcagcgttgcaggagctgacgcgggcgcacgtggagtccttcaactacgctgtgcacgagggtctcggcctcgcggtgcaggctatacctccctttgaatttgctttcaaagatgagcgtatctcttttactattctggatgctgttatcagtccacctacagttccaaaagggaccatctgcaaagaggccaatgtttatccagcagaatgccggggccgaaggagtacctaccgtgggaagttgacagctgatatcaactgggcagtgaatggaatctcaaaaggaatcattaagcagtttcttggctatgttcccatcatggtgaaatccaagctttgcaacttacgtaaccttcccccacaagccctcattgagcaccatgaggaggcagaggaaatggggggctattttataatcaatggcattgaaaaagtcatccgaatgttgattatgcctcggagaaattttcccattgcaatgataagaccaaaatggaaaaccagagggcctggttatactcagtatggagtttcaatgcactgtgtgagggaagaacattccgctgtcaatatgaacctccactactttggaaaatggcacagttatgttgaactttatttaccgaaaagaactgttctttcttcctttgggatttgcacttaaggcacttgtcagcttttctgattatcagatctttcaggagctcatcaaaggaaaagaggatgattctttccttaggaactctgtttctcagatgttaaggattgtaatggaagagggttgtttgacacaaaaacaggtccttaactacctaggtgaatgcttcagagtaaaactcaatgttcctgactggtacccaaatgagcaagctgcggagttcctgtttaaccagtgcatctgtatccacttgaaatccaatactgaaaagttttatatgctttgtctcatgacgcgaaagctctttgctttagccaaaggagagtgcatggaggacaatcctgatagtttggtgaaccaggaagtcctcacaccgggtcagctcttccttatgttcctgaaggaaaaactggaaggttggttagtgtctattaaaatagcttttgataagaaggctcagaagaccagtgtttccatgaacactgacaatttgatgaggatttttacaatgggcatagaccttacaaaaccatttgaatacctttttgctactgggaatctgcgttctaaaacaggtcttggcctcctacaagattctggactttgtgttgtggctgacaagctgaacttcatacgctacctctcccatttccgctgcgtgcacagaggggctgattttgccaagatgaggaccaccacagtacgcaggctgctgccagagtcctggggcttcctttgtcccgtgcataccccagacggggagccctgtggcctgatgaaccacctaactgccgtatgtgaggttgtcacacagtttgtgtatacggcatctattccagctttactgtgcaacttgggggtcactcccattgatggagctccccaccgatcatacagtgagtgctaccctgtcctgctggacggtgtcatggttggctgggtggataaggatcttgctccaggcatcgcagattctcttcgtcattttaaggtgttgagagagaaaagaattcctccctggatggaagtggtccttatacccatgacaggaaaaccaagtctgtacccaggattgttcctttttaccactccttgtagactggtacggcctgtgcagaacttagcattgggcaaagaagagctaattggaactatggaacagatcttcatgaatgtcgctatctttgaggatgaagtttttgctggagttaccacacaccaggaactctttccacacagcctgctgagtgtgattgccaacttcatccctttctctgatcacaaccagagtccacggaacatgtaccaatgccagatgggtaagcaaactatgggctttccacttctcacttatcaagaccgatcggataacaaactgtatcgtcttcagactcctcagagtcccttggtgagaccctccatgtatgattattatgacatggataactatccaattgggaccaatgccatcgttgctgtgatttcttacactggctatgatatggaagatgccatgattgtgaataaggcctcttgggaacgaggctttgcccatggaagtgtctacaagtctgagttcatagacctctctgaaaaaattaaacaaggagatagtagcctggtgtttggcatcaaacctggtgacccacgcgttctgcagaagttagatgacgatggattgccgtttataggagcaaaactgcagtacggagatccgtattacagctacctcaacctcaacaccggggaaagttttgtaactggatgttgtttaacttgatgttgaccttttggattaagaggactatcagattaaagcaaaatgtaattttaattcaatgaagatatcattaccaggttactcttgagatttttcaacggtgttagaactctcaaccaagacctgaaaaccaagtatgcaaggtttctgaatctctctggtagattaactattgacaatgattttctgttatctttgttcaaaaagttcatgtcttctcaaaatatgaaatattgataaatggaagagcatacggtgacaagtctcctttccaaccccaggttccctacaccctgctctcagcaggcagtgagtgtcacacacctgttaatccatcttgagcaggacagtactatacaaatagaatgcaagctgtaatgtaattttatattttcttatagccacgttgaagtaaaaacaaacaggtacagtgttttttaccagctttatagaagtacagttgttacatatttaatgaatacaatttgatgggtctgactatatgcacacacctttgataccatcaccacaatcagggtaataaacatacctgtcatctccacaagtttcctcctgcccctttgttttttgctttttggttgctgttgagtttttgttttgtcttctgtggtaagaacacctaactcaagacctaccctcttaacaaatctttaagtgcacgatatagtattgttaattccaggcaccatgttgtacaacagatctttagaccttacttgtcttgcataactgaagctttatacctgttgaacaactctccatttccctggcccctagcaaccacccttctaccctgtttctatgagtttgactattacagatatctcatatagtgggatcatgcaatatttgtcctgtgactggcttatttcacttagcatagtgaaataagattcatccattttggaagccaggcatggtgctgtgcatctatagtccctgctatttgagaggctgaggtgggaggatcatttgagtgcaggagttcaaggacagcctgggtaatataggaagaccctgtcttaaagaccctgacctcaagtgatccacccacctcggcctccgaaagtgctaggattacaggtgtgagccactgtgcctggcctccggtgagtattttatatttagtctacacttccatacttggcttttttctgcttttatattgatctgctttcatagcagtgtgtagagtgccacttatgttttctttcttgtgtacagtattttattgtatggatttaccatcccctgtgtatttaagttgttccattctttggccattataacttttttctgcaaatattctggtgacttatctttggccattataaactgttgataatagatcatcttgtatatacttctgcaattataagatgttttttgatgatgaaagctttcctaaggtaattctttcctgagtttggttcagatggtctgtcactaattataaggcagataggaacagacagaaaaatctatcatttcaagataggcttagcaggatgggcgcagtggctcacgccactaatcccaacattttaggaggcctaggcaggagcaatcacttgtgcctgggagttctagactagcctgggcgagacttcatctctacaaaaaaagcaacaacgacaaaaaaaattagccaagcatagtggcacacccctgtagtcccagctacttgggaggctgaggtgggaggattgcttgaacccaagaggtcgaggctgcagtgagccaagattgtgccactgcactccagcctgggtgacagagcaggaccctgtctctattttataaattaaaaaaggctgggtgtggtggctcacacccataatcccaacactttggctcagcagattgcttgaacccaggaattcaagtccaatctgggcaacatggggaaaccccagctctacaaaaaaaattagcctggtgtggtggcacatgcctgtagttccagctactcaggaggctgaggtgggagaatctcctgagcctggaaggtccaggcagtgagccaagattgtgccaccacactccagcctgggcgacagaatgagaccctgtcnn

SEQ ID NO: 23875 - DNA, 1490 bp, Homo sapiens; identical to SEQ ID NO: 21073

SEQ ID NO: 23876 - DNA, 1262 bp, Homo sapiens
  misc_feature 1, 2, 90, 111, 1254, 1255, 1256, 1257, 1258, 1259, 1260,1261, 1262: n = A,T,C or G
nnagtggcacaaacttggcttgctgaaacctcgacttcctgggctcaagtggtccttccatcttaccaagtagctgggactacaggcatngtgccaccacgcctggcttanttttttgtatttttagtagagacaggatttcgctttgttgcccaggatggtctcgaactcctgggctcaagcagtttacccccatcagcttcccaaagtgctgatattccaggcatgagccacctcgcctgtcctaattgaacactggaaattgatagtttccgagttggaaattgatagtttctgagttgtgtttttaggtggagagcgttttatacatttctatcttaaactagctttttgtgtaactttgaagctgttttccttcactttaatgaatattgaacttttttcctttaacctacagtgttgtgcacagaagtgcactcagtgtttgtagtctataactcatcaagggaattatgtgtgtcgccaatgcatgttttagagttgactaagcttttaagaaagcatattagcaactttagtatggatttgctcgtatagccaagttgcaagggaaataatgccaagtaaataacctgaaggaaaagcaagtgtggcatgtcgtaggccttactaaatttgaaatttgaaatgtcatacatttaaaagttggataaggaattaaattttattaaattaattgtcccacaaaagctgtcccacattaaattgtcccacaaaaggtgttatgaagctaaaaatctttatataacttaaaagtacatagtttcaaagattacactaccatggcaaacaatgtacttaacatgcacacccatttacaaaatcaagtgtgttctcagcatatatagtctatcaaatgaaacttaagtcatgtgtggaatgaacattttccatgatcagcttttttttcttaaacttctgttgccagtttttcaatactactaatcagataatgtagagtcatatattgctgttttacttggtcactttttaccaacaagtagttagtgaatatctctgatatatgcaggaagcaagaaacatggccctcgcccataaagaacttaattgtgaaattactgcagtggatacgtgaaataattaatgaaccaagagtgttctaaattatgaagcataattgagtataatgatgtccaagtggtccaaatttatgtctttttttaagagtaatgctggggtgctatttaatataatccatgtaattttaaggannnnnnnnn

SEQ ID NO: 23877 - DNA, 831 bp, Homo sapiens
  misc_feature 831: n = A,T,C or G
acaaatatttttgtttattaaaaaattagattgtcttgtttattattgaatagtaagaatgtttatatattctggatacactctttttcagatatgtgtgtgtgactattcttagtctttagcttgccttttcattttcttaattatgtctttcaaagaacaagtttttcattttgacgaagcctagtttatcaattttttttatggttggtgctttttgtgtgttccaagaaatctttgcctactcatttaattacctgtgtgcccttgtcaaaatcatttaattttgactactcacttaattaccttgcctactcatttaattacctgtgtgcccttgtcaaaatttactgtttatctgtgaatctggatgatctatttatgtcatttatctatgtgtctcttcttatgccagtaccccactgtcttgattatgtggctttatggtgtcttgaaattaagtatgttaagctttgcaatcttttccaagatgtttggctataggtcctttctttataaagtttatattaagcttctccatttttcttttaagaaaaaattctgtggaatggcactgaatcttaggtcgatttgcgaagaaattgaccaatattgaccctttcaatcgatgggccatggtatggtttctgcatttattggggctttttaaatttatcctcagcaatatttgtagtttaggggagaagctgatataatctggtaagttccctacttttggggacgctgggacaacgctaatctataaggactggggtagaaaattctgggtggggtttgggattaaatggaaagatttaatagcggcgagcn

SEQ ID NO: 23878 - DNA, 340 bp, Homo sapiens; identical to SEQ ID NO: 23868
  misc_feature 340: n = A,T,C or G

SEQ ID NO: 23879 - DNA, 920 bp, Homo sapiens; identical to SEQ ID NO: 20829
  misc_feature 1, 2, 3, 4, 5, 6, 7, 8, 9, 10, 915, 916, 917, 918, 919, 920: n = A,T,C or G

SEQ ID NO: 23880 - DNA, 963 bp, Homo sapiens; identical to SEQ ID NO: 22715
  misc_feature 1, 2: n = A,T,C or G

SEQ ID NO: 23881 - DNA, 1084 bp, Homo sapiens
  misc_feature 1, 2, 3, 1083, 1084: n = A,T,C or G
nnnactaaacatatccattcacccctagtttatgtgccaaccttattttatattacattcccaaattatatatagctctgtttctaagctctattctgctctattggactattgtctgttcttatgctaatcctaccttattttaatgtctgtgactttagtcataggacataccttgaagaataggaactcccttactgtttaaacagttcatttggctatatgtggaattttattctttctatataaactttaaggtttgtttatagagttccttaaaaatttgattggaattgtatgaattaatagggagaaagttgatatctttatgatatttgttccatccaagagcatggaatgtctgtattttaaattatcatctatattgtttattaggtcttacatattcatgattagttcctaggttctttataggattaggtttttgttgtttgtttttccttctgtgaaatgtctttatatatggtctagttagtattgctggtataaaagttagtattgctggtataaaagttaacagtgcctgagttgaaacactggccccgtgacttactagatgaatggctttgatcacgtaacttaatccacaggtaagatggggacaataaaagtaccaacttttagggttgttagaagaattttaaaatagttaacatttgtgcagttactagagtagtacatggcaaatagtgttatatgagtaattaaattaatgaatattcataggttaatttcagatcaggaacattgttgtactctaatagtttgtatggttttttaaattggatgatatcatctgtaagctaatagttttatctcttccaattcttaacgtatctttttccaaaaagagaaaaatgttgattagaactttcagtcctgtgtcagacagtatcagtctcagtcaacatggttatctttagctaatttcactttttgctgttggtgttgttgtagagaagagtctcattctggcacccagactggagtacagtggtgtgatcatagcttaccacacagccttccaactcctgggcttaagcagtccgcctgccttaaccnn

SEQ ID NO: 23882 - DNA, 1490 bp, Homo sapiens; identical to SEQ ID NO: 21073

SEQ ID NO: 23883 - DNA, 833 bp, Homo sapiens; identical to SEQ ID NO: 23737
  misc_feature 1, 2, 3, 4, 5, 6, 7, 8, 9, 10, 11, 12, 13, 14, 15: n = A,T,C or G

SEQ ID NO: 23884 - DNA, 1214 bp, Homo sapiens; identical to SEQ ID NO: 20119

SEQ ID NO: 23885 - DNA, 1859 bp, Homo sapiens; identical to SEQ ID NO: 21466
  misc_feature 1859: n = A,T,C or G

SEQ ID NO: 23886 - DNA, 2007 bp, Homo sapiens
  misc_feature 1989, 1990, 1991, 1992, 1993, 1994, 1995, 1996, 1997, 1998,1999, 2000, 2001, 2002, 2003, 2004, 2005, 2006, 2007: n = A,T,C or G
cccttagcgtggtcgcggccgaggtactataggatacaaccagcgaaacagaattgatactctcatgtatctactagcatatccacaaaaacccatggttaagacaaaaaccattgaattgatagaatttgagaaactgccagctggacagaatgcaacagttgctgtgatgagctatagtggctatgatattgaagatgctcttgttttaaacaaggcctctttagacagaggctttgggcgttgccttgtatataaaaatgctaaatgtacgttgaaacgatacaccaatcagacttttgataaagtgatggggcccatgttggatgctgctacaaggaaacctatctggcgacatgaaatcttagatgcagatggtatttgttctccaggtgagaaagtagaaaacaaacaagtgcttgtaaataagtccatgcccacagtgactcagattcctttggaaggaagtaatgtaccacagcaaccacagtacaaagatgtacccataacctacaaaggagcaacagactcatatattgaaaaagtgatgatatcttcaaatgctgaagatgcttttctgatcaaaatgctgctgagacagacaaggcgtccagaaattggagacaaattcagcagtcgtcatgggcaaaaaggtgtttgtggcttgatcgtcccccaggaagacatgccattttgtgattctggcatctgtccggacatcatcatgaacccacacggcttcccatcacgaatgacggtggggaagctcattgagctgctggctggcaaggccggtgtgctggacggcagattccactacggcactgcgtttggaggcagtaaagtgaaggatgtgtgtgaggacctcgttcgccatggttataactacttggggaaagactatgttacatccggcatcacaggtgagcccttagaagcatacatctattttggccccgtgtactatcagaagctgaaacacatggtgctagataaaatgcatgcccgggcccggggcccacgagccgtccttaccaggcaacccactgaaggacggtctcgtgatggtggcttgcgtctcggggaaatggaacgtgactgtttaatcggttatggagccagtatgcttttgctagagagactaatgatttcaagtgatgcctttgaggttgatgtctgtgggcagtgtggacttctggggtattctggctggtgccattactgcaagtcatcctgccacgtgtcttccctccgtattccgtatgcctgcaagctgctcttccaggaactacagtctatgaacatcatccccaggttaaaactgtccaagtacaacgaatgaggatggaaaaaatgattattaaagagaacaagtgatacatccaatgcaacggaaagcagaagggatttaggactacgtctcctcctgtgaagaattcccttgcgtattctctctctaaaacaaccaaaaaaaaatggagaggctttttatatactctaagactggctaaacaaccttgatcattgagcctcgagccatgggagagatgctgaccatgtggactgcaaggctgcttgattcacagatggatgtgacctaaaggataaataagctattacttatgtgctgatctcttgacattcactcattagaagaccttactccttcaagcaaatgtttggggtcaaatttaccatatcttctggctaaccatattcaagattcttctgaaacttggaggatgtaaagaatccatttgatttggtcagcctggcttttgtcgtggtggctggctcggataaattttcccaacaattaaatcttgcctttacacacccaaactttgtaattttagtcttggtgaaatataatgaatttgttcctaccttgtcaagcaagaatgtcgtcttctcctatggactcaattgctattattttaaacctgcatgattgtaccatgcaatactattcgttaaatatctgaatcnnnnnnnnnnnnnnnnnnn

SEQ ID NO: 23887 - DNA, 1380 bp, Homo sapiens; identical to SEQ ID NO: 20118
  misc_feature 1380: n = A,T,C or G

SEQ ID NO: 23888 - DNA, 920 bp, Homo sapiens; identical to SEQ ID NO: 20829
  misc_feature 1, 2, 3, 4, 5, 6, 7, 8, 9, 10, 915, 916, 917, 918, 919, 920: n = A,T,C or G

SEQ ID NO: 23889 - DNA, 920 bp, Homo sapiens; identical to SEQ ID NO: 20829
  misc_feature 1, 2, 3, 4, 5, 6, 7, 8, 9, 10, 915, 916, 917, 918, 919, 920: n = A,T,C or G

SEQ ID NO: 23890 - DNA, 800 bp, Homo sapiens; identical to SEQ ID NO: 23821
  misc_feature 1, 796, 797, 798, 799, 800: n = A,T,C or G

SEQ ID NO: 23891 - DNA, 1384 bp, Homo sapiens
  misc_feature 1: n = A,T,C or G
ncgtattgtctgattggtgttgatcattttgttgatgatcttgttgaccatgtgcgtgaattacagatgcaacatgcattgttagaatcgtgtgatggtcttttgtgatactgaatttgtacatatcccagtctctgtatgtatctgcatagacaaagggatacaccggtgtttccctttgtctgcactgtactggaatgcctattaaggcatgtgctgataagttgaaaagagaaatagagctgtatggttgcccccctgattttccagatgaagaagaggaagaggaagaaaccagtgttaaaacagaagatataataattaaggataaagctaaaggaaaaaagagtaaagctgctgctaaagctggatcttctaaataccagtggggcattatgaaatcccttggcctgtctgatgaagagatagtaaaattttctgaagcagaacattggcttgattatttcccgccactggctattcaggatttaaaaagaatgggtttgaaggtagactggcgtcgttccttcatcaccactgatgttaatccttactatgattcatttgtcagatggcaatttttaacattaagagaaagaaacaaaattaaatttgggaagcggtatacaatttactctccgaaagatggacagccttgcatggatcatgatagacaaactggagagggtgttggacctcaggaatatactttactcaaattgaaggtgcttgagccatacccatctaaattaagtggcctgaaaggtaaaaatattttcttggtggctgctactctcagacctgagaccatgtttgggcagacaaattgttgggttcgtcctgatatgaagtacattggatttgagacggtgaatggtgatatatccatctgtacccaaaaagcagcaggaatatgtcataccaggggcttaaccaaagaccatggcgtggtgcctgtaggcacgcgactcaccggggcgacggaaacaccaggcgccacacacacccggcacgtataacagctcataaacgagggcacacaagagacaccacaaggacccacacataaggaacgccaacagcgcccgccggcatgcaccagaggcggtgccaaacgaacaaccccagagacagaattagcgagaccaacacaaacagaaaccagacaaaagcaccaacagacacaaaacaacaacaactagagacaatgaagaaagacaacaggcacaagacacacgacaacgcaggtcacaacgacgctaaaccccagacaaaagaaacacacacaacggaaacaccaaacacagaagccaaccaaacgcagacataagcaaaacacaagacacacagcacgaaccacgaagcgacagacaagacaagaaca

SEQ ID NO: 23892 - DNA, 579 bp, Homo sapiens; identical to SEQ ID NO: 20440
  misc_feature 1, 2, 578, 579: n = A,T,C or G

SEQ ID NO: 23893 - DNA, 1380 bp, Homo sapiens; identical to SEQ ID NO: 20118
  misc_feature 1380: n = A,T,C or G

SEQ ID NO: 23894 - DNA, 1762 bp, Homo sapiens
  misc_feature 1750, 1751, 1752, 1753, 1754, 1755, 1756, 1757, 1758, 1759,1760, 1761, 1762: n = A,T,C or G
gcgtccgttcagaatttgcctcccaacttcctgctgaaggtggtgctttctacacagcagagactagtgaaaatgcaaaattgcattattacaactcctgggcacttatcctccatgctacagcattgtggcttacaagcacgggttttgttgttgctgacccagatgaaggagcatctaatctctccaggcctgtaacaccaacttccatgtgtcagggttcatcatctggggctaccataaagtcccctgaggatgtctacactgatagattccatcttattttaggaatcagcgtggaatttctatgttccttacgttcagatgcaaccatggaaagcataactgcttgtttacatgcattgcaagcacttctagatgtaccttggcccagatcaaaaattggcagtgatcaggacttgggtatagaattgctgaatgttctacatcgagtaattttaaccagagaatcaccttccattcagttggcttcacttgaagtggtaaggcagattatctgtgctgctcaagaacatgtgaaggaaaaaagacgaagtgcagaagttgatgatggggctgctgaaaaggaaactctgccagagtttggagagggaaaggacaccggaggacttgtgcctggaaagtctttggtctttgcaacactggaattgtgtgtatgcattctagttagacaactcccagaattaaaccctaaattgacaggtagcccaggagtaaaagctacgaagccacagatactattagaagatggaagtagattggtttcagctgcattggttatcctttccgaacttcctgcagtgtgctctcctgaaggaagcatctcaattctccctactatatgtacctcacaatcggggtcctcagagagactgctgtgaagttacctgggggccagttatcttcgacagttgcagcttccctacaggctctaaaaggaatattatcttctcccatggcccgggcagaaaagagccgtactgcttggactgaccttctccgaagtgccttaacaacaattcttgactgtgtgggatccagttggtgaaacacaccaagaacttgatgaagtcagtctacttactgctatcacagtgtttatttgtctaccagtccagaagtaactaccatcccatgccttcagaagcgctgtattgataaatttaaagctactcttgagataaaagatcctgtggtacaaatcaagacctaccagctcctacattccatctttcagtatccaaatccagctgtttcctacccatacatttactctttagcatcctgtatcatggaaaaactgcaggaaatagacaagagaaaacctgaaaacactgctgagcttgagatcttccaagaaggcataaaggtcttagaaaacactggttactgtgggtgaagaacaccatcgcgctcaggtggggggctgtcttttgccatcctcatttcttcttttgttgaaatctctgggatcaggaacttccataatggaatttcctgacttgctctccacatctcttgcaattgggctccagatcacctgggttcacagttgggcttcttttccagccaaaagccggctgaaggtgttaatgggcccggaaggtgagtcgaaccaccctatttttgaggctgggaagacacgcccctaagacagctcgtttgggagggaccataaaaggcgcccgggggaggagaagccccgtggtgttcattcccaccctcccannnnnnnnnnnnn

SEQ ID NO: 23895 - DNA, 1262 bp, Homo sapiens
atgtccaacagggagcagggactatcaatctggaactcagagacgaaaccatggagtgacaggtgcaggttaagagcctgttaggtccaaaatggtgccccagaaattcaagttaagtcaagcccatgttggaagaccaccagatgttcttctctaatgacgagctctgaggaatccccaaacgatgtcctccttgttctcccctggtacactgagtctgcagaccatccagaaggatcctgctgcccccatgtgcctttgttcttggtatgtcagtgccattatactccaaattctccatttgatggagagaatctgtccctctggaattacgagatttatatgcacagtttgcaaataaagcatcatagcctttattttctgtatcaaaatcaccctgatccataatatgagtctttgctttgggatacatgttgtcattttgatgaacattcctgtccccttcatggtatttgataaattccttatcttcattgacaccattcgaatctgaaaagctcacaggctgaccatcaggataactcccaggaacatgatataaattgctgtgttctctacaataaaaattagttgcccaacaatcctcaagattatggttaacattctcatggtctatataccacaactgaggttgacctaaattcgctgaagaatcatccaaacccctacagtcagtcaactgttcagcttttttagagtcctcaggattataattcagattcttacagtctgagtagccatttgcctccccgtatccaccagctttcgaggtcacatctgggcttctcgtaggtgaattatccttcgtcccagggctgagactctcataatctacattttctggactcctataaccatcatgacctccgtggtacacacagccctttccactttcatgtgcttccccacagtccatatagcttggttcactctgttcaaaatcccagtatccacaatccctttttctgtagggctgatgctgtcccttggcccagtacctgggatccaagtcattttctctgtagagtccatccagcactgtaaggttccttttccgtacactcccgtagtcttcatactcccagctggagtcccagtgccttttctcctccacttccctttcttttctagccttctgggtttcacacatattctatgtgcttaaagacaaaggttttactattcttttccatgggcctgggctgggctgtggacaggtgcagtctagcctaaggctggat

SEQ ID NO: 23896 - DNA, 916 bp, Homo sapiens
  misc_feature 915, 916: n = A,T,C or G
acagtgccaggttcttttctgatgtaaaacaaaataggagaaaataaaaacccagcctggcaaaatagcttatctccaccaatcagcagaaaatggtaaaatagagacgcacgtggcactaactagacaggaaatcagaggtgggaagcaaaatgccagcctttattctgctctctaagatggctctggaaggtcatgttcattgtcactgaaaatgcctgcagggagcgatatgaaaagtcattgtctcttcttttttttcctcctgctatttttagctcttgctaggaagatcaattttagttaactgcagagaagggtttttaaaatggtgcttgagtttcaagttgcatgtgtctgctatatttagatttttttccaaattcttctgtatcaaaacatgacatagtaaggcaattttgctggtgttactgcttggtatggtgttttccccaatgggaaaagatattccattaactaatgtaacctatactaaagaaacattttctattccaggctctgattcagaggtagaaaaaaattcagtttttaaaatatagatgaacacctatgtttttggtgcatgtggtatgaatattatataaggcctcgattctcatccagcaattgctgtattctctgatcacaaaaacaataggcaagtaaaacagtgagtgtccagtgttcccattagcacagtctctctgtgtcataccccacataagggactcagattgggatcctggagcacgtgttcaaattttcccattgcctttgaaagaattgtccctggaaaaaaaaggttttttcagaggcttttcttcccagcatatattccattaatctatcttccatcactatggagtagcaatattaaaatacttccttttctaaatttacaggtaaactgtgtann

SEQ ID NO: 23897 - DNA, 923 bp, Homo sapiens
  misc_feature 1, 2, 3, 38: n = A,T,C or G
nnngagagctaaacattggaaaagggtactttactccncgtgtagagtgctccagggatatgttctagagaaatgagtatttgaagaatagaaaaagtacttgacatgattcctcattataaaatcagattgtcataattttgatagaaatgcattttgttgtttacatcttttctggcttatctgtggttccatttctgatttgaattattttgtactcgtgataaagaatcaatagcaattcaaaggttccttttgttaggctgtatcccaaagagtagggaaagatctttacttcatgtcagtgggtgataccactattaaaggtaacttgtgtttttaaaacaaaatacttttatcacccagaattacaatttcttaaaaatattgttatgctgaatccctcaaacaaaaatggtttatcaatttctttggacataggtagcagggaagaaaaaccactttaggtaaaaaaatttaaatatacttatggagataaataacccaagatgaggatttcttgaaatataggaaatttattaattgaattaatcttgaaagttaaattatgaatgtgataaattcacattttaaagaattttctctgttaattagctcatatgttcaaatgatatttgttaaataatctcttggaatttctgaatctttagtttatataagattcaaattattggctggttcttggtattgcacattcttgttcataaataatgcagtggttcttagaattgaggcacattgagaataaaatcagctaatggtagctttaatatcatgtgaaaaatatatactaatcaaaaaggaaaaagaactaattgattatcagccttgttcacaccattctctagcaaaatataaaatacgccaatttcataatttttagagaaacttgatttgatggt

SEQ ID NO: 23898 - DNA, 1490 bp, Homo sapiens; identical to SEQ ID NO: 21073

SEQ ID NO: 23899 - DNA, 738 bp, Homo sapiens
  misc_feature 1: n = A,T,C or G
ncaaactataacctgtgagctaaatctggcctgccacctagtttgtacagcctggaagctaagcatgatttttacattttaaatattatacataaaaattatacaaaattcaaatttcagtgttcataaataaagttttattagaacatagctacctacactcattcatttacatattgtctgcggcttctttgttaccatgttggcagagctgagtactggcaacagagaccatatgctccacaaagcccaaaatatttactatctgcccttcacagaaaaagtttacctgcccctggcttccaacgtgttcaatttttaatgttttaggtgttcttgaaaaaaatctgtactctccagataacatatgcagggttttatatatgtttattagattaatcttactgactgtattacacaaatttatatacttataacattttgtctgcttaatctaccaaatactgagaaatgtaaactaaatttcctactttggcagtggatctgttaagtttgtattttttgtttgtttgttttggggctttttttatagttctgtcaattttactttataaattcatagtttaggtaactagaagcaaataagtttagaattgttatctcttctcactgagctaagcttttatcagcatgtaatgatgatctctttttttaacgaatagtgtctatgttaaggtatattttgcctgatatgaatataccagctatcttgttaac

SEQ ID NO: 23900 - DNA, 340 bp, Homo sapiens; identical to SEQ ID NO: 23869

SEQ ID NO: 23901 - DNA, 3844 bp, Homo sapiens
  misc_feature 1, 3843, 3844: n = A,T,C or G
nagctccactcagggaccagtgcgcaagcaaagcaaaactttggaagacccaattattacaagctgcctgcagtaacttactcagggcattctgcaggagctaggtctaattgcaaactttcttccttacaggacatcatcaaaaccattactctttctaatgtaacataaacctatcaatgagctgaaattaactctaaacacatggtcattcaaaagtatagctttgaccttattccagtatctccacacatggatacatttgtttacatgaaattaagaccttttttttggatcgtttcaaacgtgcttatttgataaaaaggaacagtgtacctacagttgtactggggaagagtgagaagtgcatttgcaaaacattcctgaaaataaacatcagcagtttaatagtacagaagagagcaaacaaagcaggctatcaaaaatccagagaccctcccatgggcccgccccactcccgactccctcccaaaaatgaaaacatgttacctcaggtagcatatgtctaacaccacctgcagagggaaggcggccagcccccaagaaccaccgagtgccacctccagctgaggtcctgcaacgccggagcacacactcacacaaggcacattcagcaacagtattaaataccaggaagtgggaaggaatgtacttttattgaaaatgaaaaaatataaaagtaccatcttcaaagagcatctcacaaacactgtacagcaggtgaagcattgcagtaacatacattgaaacatacagagtcgagttatacaggactagccatctaacaggtcatctggtctccgacggttgtttaacgacacacagtagaaatagagaatagaacccatatctgtttccagagtccaaagtagtatatcaggctgacagcactcaatcagtgagggctcctgaggttgcaatgattctgcaacggagtagattctctaggaaaaaagaccttgctgctaaggaaagagaattaaaaacaaaacaaaacgaaaagctccccaaagaggtactctgctcaaaatggctggtgctactggtgcactaagttgtgaggaattacctctgctcgggacagaataaaaaatcctaggcctcaaggaaaaactggtggcatccttctgggtcttttcaagtccttgcatctaaaaatcaatcttgacaaaaataaaacaaaaaaccacaacaaaagaaagccaaaccaatcccccaccctaaaggaagaaaaaaattgatgtgaagcccatccacccttctacccaggtgccttatagcaaaggtgactgcagctgtaagtcagagctgaatgacagacaaaaatggaggccagacaccacggtctggaggtagctacgctgaattccagaacccagactctctctgggttaatttcttgtttttcctgagattaaattaataccagatgtccactaggtcctaggagatccccaccaatcagatttttgccaagtcccaggaaataacctgatcaaataggagacttcagattccaagaactactgtattccacctctcccctccctcagatttttaggtttatatccattgcttgggtcaccactgtatacagccgggttgctggtttactagcaagaagattggcttcttttccagtatgcaatccaaaatgtggaactgagtcacagggccaaagcccccttttcctcacgtgaagcaactcagtaagatggcggtgcagtgaagcctgttcccacacacctcggcactgatggagcagtctccaaaggaaggctgaaaggacagcaggtggttgccttgggctccttccttcccatacctttagagtgccatttttcagcactgggtaatagcatcagcgcctcccagatgggaggagcagggaaggtaaaagacatagtgaatgtttacactatgcgaaactttcaaagggggggaaaaagaggaaacagcagattaaagaagttccaacacatcgggtttttaaataacaatgacatttcaaaccattttttaggggataaagaaaaaagaggttttcatgaaaaatccaaccaaaatttagtttttaaaaagttacaaatgtatcatttaaatctaaacaaactggaagaaaacttgagactgttagcatagctgtctggctgtggaaagcattcccagtgaataaacattaccttacctgaactcttggcgagagattctgcccagcttgactctctcattctgaccgcagaatacagccatcctgaaaattctaaagaacagcttctgtcactggttccactacagagagactccccccaaatccagatcctgacagcaccaagcaagctgcaggtggagagaggttggaagggtgggaaacttacctctctaagggttttacactgtcctttccccaaaaggccctcgagcagagttagcattcaccaagagagagcactgcaggaggcggccttctcttgcagatctacagtgcgatgctaattctttatacacagatcataggtgaggcctggtcttttagaactgtcttaatccaaaaaggccccaaagcatctctgtaagtgtagcaatgtggctacacaggaccacactgttagagattctggtactccattaacattactatgacccccgggcaccctgcacatatagcggcagtccccaccggcgtcaccaaaaccttggatcatcttggtgtataaatgtcagcatcagctggctggcaggtaaaaacaaacagaacacaacaacttgactgtgtttcatttgttctgattatggctaccaaggttcggtgaaacccgagcagggacaagaaataaaaatgccattttatttggggagcccgtatgtgggcagtctgtccttacacaggtttctgtaagaacagattaagctagtttgaaagtcgtgccagattagaaaacttgtaaaaatctaaaacgaaatgttcctcaaaaggatttaagtccacagacaggaggtttactcactgctagtactaatctcaaaaccagcctggtttttcaatttccaatgaaaaagaaacatattagaattggagttccaaaaaaggaagtgtgtattgtttacactttcaaatctataaaagagattatggatgagtccattactttctcagctctagggcagaatcccatgaaataacactggccttaaggtgctcttccctgaaacggcagagagaagaaaaagcatgctgctgctttcctgttaaaggagggctcttagctttccctggcagctagaacagtttcctagaggttagtaccccagtgttctgcaccataaatgagagaataaggaatatacggatgttcaggggagggactgtgaagccaccaagctgaatacggataggtaccatttttttcaaaaaataaaaaataaaaatcccagcaatccatggaattttttttagaggggagccaatgaagttcttgcattggccaaatggaatcaagaaagcccatgatcactttattcgcaaagcctgcatatggtgctacccagaggaatgaattctatgagatcagagcagccaccagccctgtagtgaaacaatgacagaagctcttcttgggggaagctggctctatgaaaatgtttgccattttggtaaattacataacacaacatttcagttacatggtccttcttacttaaaacttttatataaagtatgttagttggtcaattattaataatatacccacccaataccagaaaagtacgtgttctctgcttcagaaaagagatcaatcatttacaagaggcatcaaacgnn

SEQ ID NO: 23902 - DNA, 1490 bp, Homo sapiens; identical to SEQ ID NO: 21073

SEQ ID NO: 23903 - DNA, 920 bp, Homo sapiens; identical to SEQ ID NO: 20829
  misc_feature 1, 2, 3, 4, 5, 6, 7, 8, 9, 10, 915, 916, 917, 918, 919, 920: n = A,T,C or G

SEQ ID NO: 23904 - DNA, 435 bp, Homo sapiens; identical to SEQ ID NO: 23786
  misc_feature 1, 2, 3: n = A,T,C or G

SEQ ID NO: 23905 - DNA, 923 bp, Homo sapiens; identical to SEQ ID NO: 23897
  misc_feature 1, 2, 3, 38: n = A,T,C or G

SEQ ID NO: 23906 - DNA, 870 bp, Homo sapiens
  misc_feature 866, 867, 868, 869, 870: n = A,T,C or G
acttttctttttttttttttttttcctttctcactgccctgcggtgttttgaactgccttcttacagacgtcatacagcccttgaggaatagtttctgcctggtgagattgaatgatagttctcattcacaaaaccctggattctaagcagggacacacagaaattactttcgcaggtaaatcagcccacccagccaaagtgtggagagatttgttccttggctgacttctttgatccacggagaggagtgttttcctgtgcttgccctgaaatggaacttccttgacagctctcccgtgttacagtacctcccggtcattttctttttctctctctctacctgcgctcttcgagtgtcagaaacctttaaagctgttactatggaattgcaaaaaagagatcaagtgactctttcactatgctggtttcccttgtgacccagatgaagaatcaattcagaattcagttcctcccttggcattgcaagacacagaagaaactgtcacttcctaacagcctagtactggagtaaattcagtatgaaggaagaaagcgctcctgcgtgttagaaccttgcccatgagctggaccgaggacaggagatggactccaggaaaatgggatttcttcaagcagcctcccttggaaatggaatatctttaaaatcttctttgcagaaagacagttagaatgtattaatcagaatagttgaagacttattttcctttttattttttttcaaaatgagcattattatgaagccaagatcccgatctacaagttccctaaggactgcagaggcagtttgggaccgtgcctccctctcttgcccaagctggattcaaacaaatctgcctgctcagcnnnnn

SEQ ID NO: 23907 - DNA, 1490 bp, Homo sapiens; identical to SEQ ID NO: 21073

SEQ ID NO: 23908 - DNA, 2297 bp, Homo sapiens
  misc_feature 2291, 2292, 2293, 2294, 2295, 2296, 2297: n = A,T,C or G
acgcggggaagctcttgagctcctctacctcttagaaagcacaattgaatcagatatcatatgaaagacatacacacttcatgtaatgctacctccgagtctccctagaaaagcagtttttgtaggtgaaaacaatgaagccaggtaatattgcaaggaggctgtaattttagcagacctaccaacaacactgatgtaggaagctcattattttaatttctggagccttttaattttttctttagaaagtgtataaataattgcagtgctgctttgcttccaaaactgggcagtgagttcaacaacaacgacaacaacagccgcagctcatcctggccgtcatggagtttcttgaaagaacgtatcttgtgaatgataaagctgccaagatgtatgctttcacactagaaaggagctgcaaatgaacacttcatagcaatgtggaactccaacagaaaccggtgaataaagatcagtgtcccagagagagaccagaggagctggagtcaggaggcatgtaccactgccacagtggctccaagcccacagaaaagggggcgaatgagtacgcctatgccaagtggaaactctgttctgcttcagcaatatgcttcattttcatgattgcagaggtcgtgggtgggcacattgctgggagtcttgctgttgtcacagatgctgcccacctcttaattgacctgaccagtttcctgctcagtctcttctccctgtggttgtcatcgaagcctccctctaagcggctgacatttggatggcaccgagcagagatccttggtgccctgctctccatcctgtgcatctgggtggtgactggcgtgctagtgtacctggcatgtgagcgcctgctgtatcctgattaccagatccaggcgactgtgatgatcatcgtttccagctgcgcagtggcggccaacattgtactaactgtggttttgcaccagagatgccttggccacaatcacaaggaagtacaagccaatgccagcgtcagagctgcttttgtgcatgcccttggagatctatttcagagtatcagtgtgctaattagtgcacttattatctactttaagccagagtataaaatagccgacccaatctgcacattcatcttttccatcctggtcttggccagcaccatcactatcttaaaggacttctccatcttactcatggaaggtgtgccaaagagcctgaattacagtggtgtgaaagagcttattttagcagtcgacggggtgctgtctgtgcacagcctgcacatctggtctctaacaatgaatcaagtaattctctcagctcatgttgctacagcagccagccgggacagccaagtggttcggagagaaattgctaaagcccttagcaaaagctttacgatgcactcactcaccattcagatggaatctccagttgaccaggaccccgactgccttttctgtgaagacccctgtgactagctcagtcacaccgtcagtttcccaaatttgacaggccaccttcaaacatgctgctatgcagtttctgcatcatagaaaataaggaaccaaaggaagaaattcatgtcatggtgcaatgcatattttatctatttatttagttccattcaccatgaaggaagaggcactgagatccatcaatcaattggattatatactgatcagtagctgtgttcaattgcaggaatgtgtatatagattattcctgagtggagccgaagtaacagctgtttgtaactatcggcaataccaaattcatctcccttccaataatgcatcttgagaacacataggtaaatttgaactcaggaaagtcttactagaaatcagtggaagggacaaatagtcacaaaattttaccaaaacattagaaacaaaaaataaggagagccaagtcaggaataaaagtgactctgtatgctaacgccacattagaacttggttctctcaccaagctgtaatgtgatttttttttctactctgaattggaaatatgtatgaatatacagagaagtgcttacaactaatttttatttacttgtcacattttggcaataaatccctcttatttctaaaaaaaaaaaaaaaaaaaaaaaaaaaaaaaaaaaaaaaaaaaaggggggggggctttaaatttttaaaaaaaaaaacccccccccccccccatggggcggaaagaaatagaagcccaccagcggtggcgtcccgctttttttggggattttatggggggaacaaaaaaaggacgccgccaaagactccaaaaaaaagggnnnnnnn

SEQ ID NO: 23909 - DNA, 718 bp, Homo sapiens
  misc_feature 1: n = A,T,C or G
ngtacttcatttaagagtcctggcttccagaaatcctttttttcatgtcttatcttctaattatgctttgtagtccagctaaattacatctcttgacattttggaatgttcccatctttacacctgtcttcaaattgtttattccacatggaatattcttttccccttatctccaattagagtatatggagtttggggaagaatcatgtcgttcactgtggcaggagggacagagtgagaaggtggacaggagccagataattggagagactttttacataatgctaattttaggagtttgcaattaacactgtggatttgatgaaaacagtggaggttttaatcagggggatgaatgataggattagaattctattttatataatataatccagatacatcatgataaattaaaagatcaaagctgaaagcagagtggtcagtcaggagtttattataatgatttagacataaatgtttgtaattagaatcagtggatccccccatgcctcacattcctgtccttcatggtcaccatttccaatttaaacactccccactgtgtattgtgtccatattctcatccttgcattgaaaggctttttctcctctgccccatcatatgcctttcccattacatccaaaacctttttaagccaccttctgtgatgcctattttatctgatgtccctcttctatatccttagtcgccccgcgt

SEQ ID NO: 23910 - DNA, 393 bp, Homo sapiens; identical to SEQ ID NO: 23815
  misc_feature 392, 393: n = A,T,C or G

SEQ ID NO: 23911 - DNA, 973 bp, Homo sapiens
  misc_feature 1, 948, 961, 962, 963, 964, 965, 966, 967, 968, 969, 970,971, 972, 973: n = A,T,C or G
ncaggtttcccggcagcacagagaacccttccacaaaagtagaagggaaagcaaatagttttactaaagaagcagcttcaaaccagaccgtgagccaccacgcgcggccccatcatacgaagttactgaagttattgcgtaaacattctgctttagtcatccttgaggatcgttttaactccttgatctgtaaaactgtcttaagcatcttaacatgttacatcacagggttttagctcagatttccaaagagccatattttttgatgcatatttccagttgaattccagtgtgaatttccagttgtactttgcattctgattctttgatatttgaacttggccatctgtgggtgctactctcgtaagactaaaaggcacctactaaatacgaacaaggataaccagttctaccaaaaacattaccaaccaaacctcccctgttcttttttcagactttccttttgctttcaacctcttaaactgtaaaggagagatttaatgtttccctattattctgctttgactcacatactaaaatgaccacatggcactccattgaatcttttcagttgttcacgaattaaaataatgcccatgttttacagtttttcgagtagtctcagcaatggatctgtagtttcaggacctgtttttaaaagatcaagatacttttatgtgtttcagaagtagctgttttttcattttttgtgggtttgttttttttgtgtttgtttggttggttggtttttggtttttttgctttttaaaggtcacagtgttgtgagcctggtgtaaatgccaggaatattatatggacttagtatctgcatctcgttaattgtacccgtcctgcctccgccattcaaataatgaatatctggtcaggatacgaacttataccctctgtgtgttttttttttttaagatacgtgatttctgaaataanctttatatccaannnnnnnnnnnnn

SEQ ID NO: 23912 - DNA, 1271 bp, Homo sapiens
  misc_feature 1249, 1250, 1251, 1252, 1253, 1254, 1255, 1256, 1257, 1258,1259, 1260, 1261, 1262, 1263, 1264, 1265, 1266, 1267, 1268,1269, 1270, 1271: n = A,T,C or G
gcgtccgctgagctgtaaaatagtaattcctaagagagctacaaactgcttccacacagaaaatagcgcagggaggacagttattagtacccctattctagaagagaaagctgaggctcaagccattaagtgacttgccaaaagctgtgacatagctgggaagtggcagatttggggatataaccaggtcttgcaagtccagtgctgtctccaagtagccacgctcacagctgagaacaccttagaggacaatatcgacttcttacagactaccaagcccccagtcatccagggaaattcagagaccaattgactgccaggtggcaaatccacatgtgtactgcggtctttagagatcatttagagcttgcacacatctgtgtcttcttgtgggaaacctctaggtattctgtctgatcagcactgtgaggaagttggtgggaaaaggccactgataagaacaaacaatgggcagaaggaagcacattgcaataaatttccccagagagagttcctttacattccattcaccaaaaacctctctggaactgtcaggttcagaatatcaaccaagaccatatcatttagaattcattggcatgtagaggtgactcgattcctaaaagaagcctctctcccatgaaccacgatgtacgttccacagaggcagaaaccgccgtaggttagcaatgcattttagtctttctctccattcacatttactgagagcacaccacgtgcatgttgctgcaacaggcatttccgatagagccgatccatgagctaacaatgtctgaaaacaaatgttatggaactgttggcatttctgagatttggcctttgccatttgatagactttgcttcccaggatgctgtcattttgtgattttttataattacaaggaatttggtaccatgttgttttcaaaaaacctcctagaaagtctccatgtatgctctagaagttgctctacgtaacagttcagcaagcaagtgttccttctcttgagctgcgtccctcaggaagctgtacctttagggtgtgctttccactttttatttcctctcatttcactcctttcgttgtttgctatatcctaaaatatgtgaagtgagagaaaaaatatcatttcttctcattaaatctcctgcattaaatctaagaatcctttaaaataatcacaccttataagggttttaatcaattccctcccattcctaacctgaattcaggattaaagttaatgannnnnnnnnnnnnnnnnnnnnnn

SEQ ID NO: 23913 - DNA, 1347 bp, Homo sapiens
  misc_feature 1, 2, 3, 4, 5: n = A,T,C or G
nnnnncctgtgcctggtaacccctgaataactactgtgtatgtttatcctttattgcctctgtaagagaatgctggaggtcaaacatagcagagattaataataatatgagtgataacggataaaacgcgtagcactgactacctaccaggcactgtcctgagtgctttacatgtattaacccatttaatcatcagtcaacacagcatgatgttattggtagatattattattacgtatatattctacagatggagaaactatgacctagagtgaccccaatgtcaccagctaagggtggggctgggtttaaaccaggccagtctagcttgtaacctctatgtcatattggaatagactctagcacagtggttataggttcctactaaaagagtgttaaaaaccatgacagctatgctttaagaatacatacttgaatgtaagtgttagccctgacatccaatttgtcttcctaacgcctagtatataatatggctcaagaaatgtttattaaatatgtgtttcattttttttttcttttttgagatggagtatcactctgtcacccaggctggagaactcaagaaagtctggtcacttcagtgagtgttggtgtgtgaggagaatcaagtgagaagtgcttttagaaacatccatgcaggtatgaaggagctctaacatgccaggtgagtggacaaggcttggggaaggttgacgatacctagagacatgtcagcctttgggtcagagcctgcctaatctcatggggaactgatgggtggaataggcactctaggctccccctggcatgggcagggttgcagagaattcagaaatttgtgtgtgttcacggaggggaggccaagcttctgactgttgaagttagggtcagaatggagaggcaagcatgtgtgtgagggactctgagatgggagactgacaattaggacaatgggctttgcccatggagccagaatgtcaccctgcgagggtgaatggcactgggccacatatctcagtggtcagatccaggatctcagcagtcactcctatcaatcagagatcggaccatggcaggcacactcagcaaagtcccccatgatccagaagacatgtgcgaattctgcatcatcttcccctccataatcctgaggacagtgagagccaaggtaaggaccttgacacacagattcgttaccaggaggaattctttgcctactgaatcattctgaatatatcggatttgtctaaatagatcccacctgccctcccatctactcttctccagtaaagaggcttacgtggaagattagatctgttaccaaaaaaaaaaaaaaaaaaaaaaagt

SEQ ID NO: 23914 - DNA, 1067 bp, Homo sapiens; identical to SEQ ID NO: 22309
  misc_feature 1, 2, 3, 4, 5, 6: n = A,T,C or G

SEQ ID NO: 23915 - DNA, 1545 bp, Homo sapiens; identical to SEQ ID NO: 23819
  misc_feature 1, 2, 3, 4, 5, 6, 7, 8, 9, 1541, 1542, 1543, 1544, 1545: n = A,T,C or G

SEQ ID NO: 23916 - DNA, 1715 bp, Homo sapiens; identical to SEQ ID NO: 23747

SEQ ID NO: 23917 - DNA, 2270 bp, Homo sapiens
  misc_feature 1, 2268, 2269, 2270: n = A,T,C or G
nacccacgcgtccggaaatagtatgtgccaagttcctgctgtgggaaggagattggctgttaagatggcctgaaagaatgctaagagtgaggggagagtggtatgaaatgaagctggaaagaaatacacatggcttgataaaagccattatgcacttactacaaatgcaagctcttaaggaaggacaaggtggggaaaagaatattcagagtatatataccattagaaatcatcctcatcctttgataactgtgcttgaacacagacctgattgctggccagtgtttttgcagcagctgacagcgtttttccagcagtgccctgaaaggtcagaagtttcatgcattcaaataatggcaccatttctgtggtatctgtattgtgaaccatctcagttacaagaatatgctaaactccgactagccctgctgaaagtcttacttcaaccccaggttctttgtgacaaagatcaaccatcaatactggaacagcagatacttcaactgtgttgtgacatagttccatgtttgcaggtaaaagatttgatacagacaacagaggcgatgatgtttattgaggaagtatgtttaagccttttgcgtcatcctgttttctggaaaattcagcttacccagatgagtcttcagctgctgtgtgtcagtgaagtcagcttaaagataactggtgaatgttcatcttcaattcaccttttagagcacagtgttgaacttctgaaggaggagggtcctgttgaactggtcataattggaatagctttactacttctacagactccagcaagtcagcagaagccaatcttaaatctagctttgaagctcctctctgttactgaggatcagaaaatcccaaagtcctctctgctgctagtgatgccaattctgcagatactatcttctactgccttggaagactgtatatctgtggatgaagaaggtccctctaggcagcagttggctctaaaccttttggaaatgatacagcaggaatgttacagagatgaccaccaaaagctctcctacaagcttgtgtgccctgtaaccagtatgtatggtacaatatttacagcctggaggattcttgaagtaatgacagactcgtctgctgcaagtgactggttggcttcagtagagtcattgcttcctattactgctgtgatccctgcgcctgcctttcttctgctggctcacctccttgttgaagacaaaggacaaaatcttcaccaaatactcaaggtcactacagaattagcccaagcagattcctcccaggtgccaaatctgattccagttttgatgttcaaattgggaagaccactggaacctatattatataatgatatattgtatactttacctaagcttggtgttcacaaggtgtgtataggacaaattctacgaataatacaactacttggaaccacaccacgactaagagctgtcactttgcgcttgctgacatctttgtgggaaaagcaggaccgagtctatcctgaactgcagcgtttcatggctgtgtctgatgtaccttctctttcggtgggcaaggaagtccaatgggagaaactgattgcaaaagcagcatcaatcagagatatatgtaagcagaggccatatcaacatggtgcagatatgttggcagctatttctcaagtgttgaatgaatgcaccaagcctgatcaagctactccagcagccttggtattacagggtcttcatgcactctgtcaagctgaggttgtttgcattcgctccacttggaatgctctctctccaaagctgagttgtgacacaagacctctcattctgaagacactgagtgaactattttctctagttccttccttaacggtcaatacagctgaatatgagaattttaaagttcaagtcctcagcttcctctggactcatactcaaaacaaggacccaattgtagcaaatgctgcatatagatccctggccaactttagtgcaggagaacacaccattcttcatctgcctgaaaagataagaccagaaattcccattcctgaagagttagatgacgatgaagatgttgaggatgtggatctttcagttcctggctcttgctatctcaaactgttgtcactcactccccctttggttttaccagctttggaggaattttttacatcacttgtgaagcaagaaatggtgaatatgcctcgtgggatatatcactctgcattacaaggaggtgcccgctcagaccaaggaaagactgtagcannn

SEQ ID NO: 23918 - DNA, 2735 bp, Homo sapiens
  misc_feature 2553, 2696, 2734, 2735: n = A,T,C or G
cacgcgtccggaatatagcaaacttattaaaaagaaggaattataatgaattatgtcaacttttgaatggggttgacttaaatgaatacaaacaaaatataagttttctttctttttaaagcattccagaaaatgagattccataatctttaatacagtttttaaaaactggtgattttttttatgcatagcacaaactcctcctgcttcatttaaattggatctgcaagtctctaacttttatcatttggacacatgcacacatacagtctctaggttttttgggttagccttattagatcttaaaggggaaaataattttgcccatgtgtttaggcattcccccccttttttttaaccacctttactctcttctacatgaagagttggtggcttaatatgaaaatccaggttattttgtggccttatcccctaaaaatattttaggcattaccatatcagtttttatttttatgtttatttattattattattttttgagacagagtctcactgtcttgcccaggctggagtgcagtggcctgaacttagctcaccgcaacctccacctcccgggttcaagcaattctcctgcctaagcctctcgagtagctgggactacaggcgtgcgccaccatgcccggctaatttttgtatttttagtagagtcgggggtttcactatgttggccaggctggtctcaaactcctgaccttgtggtccacccgcctcagcctcccttaagtgctgggattacagtcatgagccaccatgcccagcctaccatatcagtttttaataacttgaactgaaattattggcttggtaatatttgggcaggccattaattctcattagaaaattacttaatatttcaaaaaattgaataaaactggtaatctttgtggaggcccattttgcaagtggaaacctgtatttatacattagtttgtctttaactatttgttaacagattttaacagttcaaatgaaagatgttaacgagatgcagtttgagtctgggatactcagaatagatccagaacctttattcagggacactggttgagttggtacagatgcattcagttgtcattcattcgtgttaagccaagatcctggatcttctatcattaatgttaagaggaaacatgaattacaactatattgtatgactgccatattttattgaaactaaggtcaatgttgaaccatatcttgatttcagaatttaaaatgtgttaccttagaaataatgaaatatagtgtaacagttggtttctaaatgtggttttatttcaggggccattatttaacctgtgtgtatgctatgatggagttcttttgtgatttctttacttctaaatttaaatagtaattatgtttaaaaacaaatgtttttgtctttagttgcaaagcagcatatatctcatttccttcaaccttgcctcctcatacacaaatatattttcatttcttaaaagatcactgggccagtagttcgaagaagtatacaaacagcttgatttataaggatatttgtcgggtattgggtgtcctttttccctatggaatagacacatagttcccttaaatattattaatagacattctacagtctttcagtgtaagtttaaaagcaagagatcaaatgaaaatgtgtactatgtacctatgatgtgtcatatcgtgattacatcatgcagagagaacagttcctgtaattcaagtaattaaaatttcaagttgtaaaaatgttaccattttcacattggaagcccttctaagtaccattttcattgggggcagggagaaggtgtatatttaaattttatattaccagacatataagtacagtgcactactgatgattttgtttaaagtttttgaaatgttttgtttactaagttcttgtaatcattattttagacaagcttgaaaacttgaaattgttgaaacttataatttaaattaaattggaaattactttcagaatttggtagtatacaagatgtgcccctttgtctaaataaatgttggcttaatttgcagaatagataaaacaattgatgtttttgtgtgttcaagaatgcattaaattcttttaatagtaaaaagtcaaattacgaccataatgagtattttaatcttgttcttgttcagtattttgcgtagatttttattgtaattgtcctgagttctacagtatgtgaacaatatcgtgtgaagtgtgtttttgcatttgtgcatttaaattatttatgtaactagggctgtgagtaacacttttttttttttttttttggttaaagaaaagctatatttaaatattcaaataattatatatttccatgtaaaactaatgtgaagactaatgtattttttatattgcagtgtaaaagctaaacttgtttttgatgttatcaagataaaatttattaaaccttgaaaaatgtctgaaaaaaaaaaaaaaaaaacatgtcggccgcctcggcccagtcgactctagactcgagcaagcttatgcatgcggccgcaattcgagctcacttngccaattcgccctatagtgagtcgtattacaattcactggccgtcgttttacaacgtcgtgactgggcccctgcgttacccaacttaatcgccttgcagcacatcccccttttcgcagttgccgtaataacgaagagccccgnacccgatcgcctttccaacaggtgggcgcctgtggcgnn

SEQ ID NO: 23919 - DNA, 1490 bp, Homo sapiens; identical to SEQ ID NO: 21073

SEQ ID NO: 23920 - DNA, 873 bp, Homo sapiens
acgcggggccttacctcctgttcatgcaactttgcttgttttgcttctactaaaatggttctaggtgctgtgtggacaggtgatacaaaagcctgactcacacgggtgacattcattcattccattttcatttctctttgagtgatcctgacaagcagagggtctcaggtggatattactgtgtctttgagacctctctaatccttatctatctctcattttaatacagagagtttcatacgcagaccttaagtagacatagtatccagctaaaagggtctcactctgtcacccaggctggagtgcagtggcgcagtcatggctccctgtaacctcaacctctcagactccagcaatcctcctgcgacagatgtcaaagaaagaaatgcagatccttcagttcaactctcagttgcagtaaagccacctacaggatcaggtcatactaaactgaaatgttgttattatccttttctgtaagggaggcagtcaatggtgaatgctggcctcgctgattactcacctggagacctttctgaggatcagttttctcatctagaaaatgggacaactgccagaccactgaagaaaatacagaaaacagccccacacatcagcatgtttggttgctgccagtctacttggatctgagtattttttcttgccatgaatgtgacgtgattatcttctcctacatcacactgaagttttatgaatgatgctttgaagtgggaagggccagagagttaatattttcggcttcttgggccagctggtctcggtggcagctactgagctctgccactgcagcagagaaccgggcacaggcgatatggaaatgataggcgcggctgtgttccaataaaactttat

SEQ ID NO: 23921 - DNA, 892 bp, Homo sapiens
  misc_feature 1: n = A,T,C or G
nagtagctggtattacagatgcttgccaccacgcctggctaatttttgtatttttagtagagacagggttttgccatgttgatcaggctggtcttgaactcctgacctcatgatctgcccttggcctcccaaagtgtcggaattacaggcatgagccactgcgcctggccccatgtttggttattattagtgcttaggaagaggcacttgcttacatagtaggagttgagaagcttggtttgttctttcctacccctagatctattctcacctcctgaccatgctctttctgccacatctattatcattacaagttgccttatctgaaattagtgaatcagaaaataaagcaggggatactttgtgtagtttcaacgttagggaaagttcagaatactgtctgtctaaactatctctctagaaggcctgatgggccacaacctgggccagaagcattcagttcagatatgagaatggtgggtgtaggggcaatggccaatgggccatggccggaaggaaattgttacagagtagtgggaagcctgcaaagactggcttctgtccgttttgccttggtttgcccatgtggatattctttgccaatattttctgcccaagagctgtgcttgctagagttggaaactggatgaaaaggtgaagactttttttcttctcaacagctcacaaagaaagtgaacaacatagagacgggctgggccttgggggccacctttcacctgttgcagtctctgggcatctcccattgaggccacgtacttccttggagacctgcatttgccaacacctttttaaggggaggagagagcacttagtttctgaactagactggggacatcctggacttgagcctagagatttaggtttaattaat

SEQ ID NO: 23922 - DNA, 1490 bp, Homo sapiens; identical to SEQ ID NO: 21073

SEQ ID NO: 23923 - DNA, 444 bp, Homo sapiens
  misc_feature 1, 2, 3, 4, 5, 444: n = A,T,C or G
nnnnngaaaaaaattccatttgaatgggataattagagtagcccccccttaggacgtaaattgtaccccactgcagccaggaccagaatgctatcactctcaggaatgaaatcattcagagcatagctgcatcgggggcatgaccagcactatcctctccctgaccgcattccctgacctggctgcacaacccacttgatcgaggttaatgcaagccatctttctcctgaagacagtcactccctttgggcacatttaaattaaagcacctatcagaatgcaagtccagaggccctggcccatccgtcacagtgtatagaacggtctctttctacagagtaagagtgaccctatcctggtgcctttaaatctaaaaactattcagttcctttggtgggcaatcttcctggaagcactgacaacttcctctcatgggtgaaccan

SEQ ID NO: 23924 - DNA, 920 bp, Homo sapiens; identical to SEQ ID NO: 20829
  misc_feature 1, 2, 3, 4, 5, 6, 7, 8, 9, 10, 915, 916, 917, 918, 919, 920: n = A,T,C or G

SEQ ID NO: 23925 - DNA, 444 bp, Homo sapiens; identical to SEQ ID NO: 23923
  misc_feature 1, 2, 3, 4, 5, 444: n = A,T,C or G

SEQ ID NO: 23926 - DNA, 1282 bp, Homo sapiens
  misc_feature 1282: n = A,T,C or G
actttttttttgaaaaaaaaaaaaaaaagaaaggataaattgtagaataaaatttttagatcctaagtaactacaaaattattgaaaagagacctaacaaggatagctccctgatgtgccaccataccagggcctcactgggctcatcacgcgacccgatcacaagggaagcaccaggcgtgcttaggacactgagtagaatttggcagcagcatagaaaatggaggaggatcggctcgtctcattgacaaatgatatctgtccacatgaatgtccagaagtcggttttaaagagtctgaacacttaatccatttttatacagactttttttgttttgttttcctaatcatttgattcagtgcctgattgaatcaagctgattgttggatcgtttgagagttgttcattgaagtagtctatttacgccttgctttgaatttatatatttaaccagaatcacagaatttttaaactggaaggggcctcagaggttcttctgggcaaaccttcatttcttctgaaaaagttaagtgactttgcataactaatacagctattgcatgacaaagctgaaactgtaacctcgtctctaggcttcacttttttaatctctgtgatatcttggtgcaataggagctttttgattcaatattttaattttggagggtcatatgaattaataattcaaatcggatgtggagactagtgatcaagtaggcttaggcaattacaggccataataggtgggaagaactacttctttttatatggtgagggttttgcagttataacacatttttgcataatctgttcagacataggaaaaatgtcaatttgctatgagtgttcagtgaagtgtgagttaaacagagccaagtgtggaatcctgtggtttatctgtgaaagtggtttgttcaaatgaattttctttttccctctaattatacagcagtctggtaatgaaatacgattgagcactaggtatgaacttacacagcgtatgacaggaatcgtcaaatgtaagcatcccagagcaaaacacgcttcaatcattattttgttttgctttttcctacagcggtgatttttatctaagtattttaagagcagttgatcaatggcagtatactcagttgtgtattgatgagatttttcactttaagagttgctcatagagtttttccctcactggctttgtaccaggcaagcaacttaatttatgcttcttggccagtattcacaaaagcagcaatgctggtgtaatgaatggtgcttatagan

SEQ ID NO: 23927 - DNA, 1490 bp, Homo sapiens; identical to SEQ ID NO: 21073

SEQ ID NO: 23928 - DNA, 402 bp, Homo sapiens
accccagtggactctatcaacaggcattgagcaataggcacacggtaaacggcagctgttgttactggtttgcaaggccttttattaattttaccataaaccacaagatggaaaagacaactaatacagacacagttaagttccagaagacttctggacttcaaatgatggactaaaaccagcataaatttacataaaaagaaacgaaatacctacatattttcataactcaatgagcctaatgcatgatagaagggacttgtttttatggcaattaatatgaggaagagcagggagttttttgctgagaacaagatcagtgtgagtcagtgggatggccttgttacttaaagaaaacataggctgcattatttaaaacattctcaatttaagggaaaaatt

SEQ ID NO: 23929 - DNA, 2668 bp, Homo sapiens
  misc_feature 1, 2, 3, 4, 5, 6: n = A,T,C or G
nnnnnncatctccagcagccagttttgttttgtcaagaaatttattaacctttataaacactattttcactcaatcattcataaaaaatgatttgtgattaaatctgtaataaaaccatataacgttcatcaatgcattcaataagaccagtttcttccatggaacataataaaccactttaaaacagcagttttcattcatgtcatataaggctgtcaaactaaaagtattccttataatgagttgttacccaagaaatccatctcacttcccgtgatgtggagcctggtgatgtgccctctaagagttgggtctgaaagaagactctgcccctttatggccacctccccagtctctctcaaacaagtttcacaacaggaaaatatttatgagcagagaaatcaaattcaggaggaactttagattcctttttgtgtcctcctgccaataacttcataaccacaaagttgggtttggcaacctttaaaattctattaacctcatggtccgggttaggaatattttccaatatcatttttgcctgttgaaagtgcttactagctgccacatacagttcaggagactgaggaggagggctatatttattgaggtcagacatttccttgaactgtaagtagtgcactggcggcggggtcatcacactgttgaatggagcaaacctgtgttcataccgaacttgttcactatcaagctcaaacttcggtttacgtactttgccgtccatgtcaaatgctaccatggttttaaacattccagcacacatgttctgatatgcttggctcattgtgatctctcggctcaatgggcgaactttcttttttttctttgtttttttactactacggcctttctgctgctcttccattatcctttcctctgccatttgagagccatcggcacgactcaatgttgacatcaaccatgcgtaaaggaattcagagagataccaatatatgtaatagtatctcgtgcatactgtagagttccaattcaaagccacttagaaggtactgtatcataatgcgaaggttatggtaaaggacccaggtacctaaccaggccaaatgttgcctttggggttcctgtttcaacagcatggtgtgaagcgctgcatcaaccttctctgcctcatcctgcaaggtggcaaattcctcaagaatatgaccaagcttatctctctgtcgagccctgttatgtccatggatctgaataagactacagaatggccgaacacagtgagtaacaaaggagtcgatacagtccttagcctggtgattattatataggtagcacttgggggaaagcaccggaggactgacaaaagaccgaagtgcatctttcaccatgtcttgcatgagatgagttccaaagacctttttgttatccaccaggaaagtggtttgtaacagagatcttgaaagaacacatggtgactgttcactaaattcacagaaaaaatccaggatacaatgtaaatttgttaaattcacaacctcacagacagtttttattctatctattaatcttgcaaaatagttcaccatttcttcccttttaattatttttgcatatcgagggaaggtaggtggaagtagcctctggttcacaaggggttcaaaacccatcataattggatgatctccttttgtagtatcattctgggcctggatgccatgatgcaatgaattatgaatggcagaaagaagatctgctgcttgaaccatcaatttttgagcttctgcaacagcactggtctctttcttagtaaaggctataagcactgtcagtaacacacgagtaaatttcactctgctgaatactgctaaacattgttggtgttctagttcaacttctggatctctttcttctccttgtcgacttcgagtactctttactcttctttgcatgtcatcctccacatcttttagcatgcctgtaactcgaagatctgtcacactgttagccattttaaatccataagtcattgactgaaaatcttcctcttcaaaaacagcagctttatttactttttcccttgcaatgtcacagattttcaagattcccagagcaaaagccttcatagcaggatcttctataaagtctggattatgaatgtaaaggcacgtaaatactgtctgtgccagtgaatggccttctaaccacgttatcaaacagcaaaaacatgtatccataatccctatcagttcaggcaaggtgagatctttaattttaatagtgccatccttgatagcttgttcaaaattgagaacttttcgattaacttggtttccaatcatgccagcatccatcttgggatccatcatttcaatagcagacatggcttcaaaaagaccaaatagcttatcatgaagtagttctcccaactttaattctcgacaagcttcttcaaaatcttgggtaatgtccacccagtttgtattgcttttctccattttttctggcatactgagctcccatcctgaatcgtcatcatctacagaagctttcataaccattatgcctacttctcccgtggtcacccgcgccgccacgcactgtccggaccacggaaataacgacgccgcctcggccgccgccgccccctcccctctcagcccagcccgaccggcagcgtgcacgcatgcg

SEQ ID NO: 23930 - DNA, 3049 bp, Homo sapiens
  misc_feature 3049: n = A,T,C or G
ggtaccagctggagactggccttacccgccaccccgaggagaagcctgtgaggaaggacaagcgggatgagttggtggaagccattgaatcagccttggagaccctgaacaatcctgcagagaacagccccaatcaccgtccttacacggcctctgatttcatagaagggatctaccgaacagaaagggacaaagggacattgtatgagctcaccttcaaaggggaccacaaacatgaattcaaacggctcatcttatttcgaccattcggccccatcatgaaagtgaaaaatgaaaagctcaacatggccaacacgcttatcaatgttatcgtgcctctagcaaaaagggtggacaagttccggcagttcatgcagaatttcaggcctgctgatgaagtttttagatgtgtgcctttaagcccttgattgtgcggtgttggatcttagaagctgtgatggctcagatgcacatattggctgaggataaccagctaagtgatttcaccagcttgttttaaacatagaaaatcctactgtctaattataaatcttgaaagatcaagctgattttttatttctttttttttgagatggagtcttactctgtcacccaggctggagtgcagtggcacgaactctgctcactgcaaccttcacctcccaggttcagggagatgtgcattgagcaggatgggagagtccatctcactgttgtttactttgggaaagaagaaataaatgaagtcaaaggagtacttgaaaacacttccaaagctgccaacttcaggaactttaccttcatccagctgaatggagaattttctcggggaaagggacttgatgttggagcccgcttctggaagggaagcaacgtccttctctttttctgtgatgtggacatctacttcacatctgaattcctcaatacgtgtaggctgaatacacagccagggaagaaggtattttatccagttcttttcagtcagtacaatcctggcataatatacggccaccatgatgcagtccctcccttggaacagcagctggtcataaagaaggaaactggattttggagagactttggatttgggatgacgtgtcagtatcggtcagacttcatcaatataggtgggtttgatctggacatcaaaggctggggcggagaggatgtgcacctttatcgcaagtatctccacagcaacctcatagtggtacggacgcctgtgcgaggactcttccacctctggcatgagaagcgctgcatggacgagctgacccccgagcagtacaagatgtgcatgcagtccaaggccatgaacgaggcatcccacggccagctgggcatgctggtgttcaggcacgagatagaggctcaccttcgcaaacagaaacagaagacaagtagcaaaaaaacatgaactcccagagaaggattgtgggagacactttttctttccttttgcaattactgaaagtggctgcaacagagaaaagacttccataaaggacgacaaaagaattggactgatgggtcagagatgagaaagcctccgatttctctctgttgggctttttacaacagaaatcaaaatctccgctttgcctgcaaaagtaacccagttgcaccctgtgaagtgtctgacaaaggcagaatgcttgtgagattataagcctaatggtgtggaggttttgatggtgtttacaatacactgagacctgttgttttgtgtgctcattgaaatattcatgatttaagagcagttttgtaaaaaattcattagcatgaaaggcaagcatatttctcctcatatgaatgagcctatcagcagggctctagtttctaggaatgctaaaatatcagaaggcaggagaggagataggcttattatgatactagtgagtacattaagtaaaataaaatggaccagaaaagaaaagaaaccataaatatcgtgtcatattttccccaagattaaccaaaaataatctgcttatctttttggttgtccttttaactgtctccgtttttttcttttatttaaaaatgcactttttttcccttgtgagttatagtctgcttatttaattaccactttgcaagccttacaagagagcacaagttggcctacatttttatattttttaagaagatactttgagatgcattatgagaactttcagttcaaagcatcaaattgatgccatatccaaggacatgccaaatgctgattctgtcaggcactgaatgtcaggcattgagacatagggaaggaatggtttgtactaatacagacgtacagatactttctctgaagagtattttcgaagaggagcaactgaacactggaggaaaagaaaatgacactttctgctttacagaaaaggaaactcattcagactggtgatatcgtgatgtacctaaaagtcagaaaccacattttctcctcagaagtagggaccgctttcttacctgtttaaataaaccaaagtataccgtgtgaaccaaacaatctcttttcaaaacagggtgctcctcctggcttctggcttccataagaagaaatggagaaaaatatatatatatatatatatattgtgaaagatcaatccatctgccagaatctagtgggatggaagtttttgctacatgttatccaccccaggccaggtggaagtaactgaattattttttaaattaagcagttctactcgatcaccaagatgcttctgaaaattgcattttattaccatttcaaactattttttaaaaataaatacagttaacatagagtggtttcttcattcatgtgaaaattattagccagcaccagatgcatgagctaattatctctttgagtccttgcttctgtttgctcacagtaaactcattgtttaaaagcttcaagaacattcaagctgttggtgtgttaaaaaatgcattgtattgatttgtactggtagtttatgaaatttaattaaaacacaggccatgaatggaaggtggtattgcacagctaataaaatatgatttgtggatagtatacaan

SEQ ID NO: 23931 - DNA, 1490 bp, Homo sapiens; identical to SEQ ID NO: 21073

SEQ ID NO: 23932 - DNA, 2301 bp, Homo sapiens; identical to SEQ ID NO: 23163
  misc_feature 1, 2299, 2300, 2301: n = A,T,C or G

SEQ ID NO: 23933 - DNA, 412 bp, Homo sapiens
  misc_feature 412: n = A,T,C or G
accctagtcctatcttagtggtgtcaggtgcaaagtcactcattctgagaaattttacttctgtagccattcagattaaattttttaaaatagggagttgaactcagcttgaaattgaaggcttcctataatctgatcctaatgcatcttctctgagctttgcttctggcaattcacattatattatctatatgagtaagccaaacttgtctattcattattccaggaataagtgatatactcgtctacctcaattacttttaatgcaaacctctctcccttctacttacggaaattataatgggtttttagggttcataattctatttccattaggcttcagaggctgataatgcttcacagagatacacctttaccccagtctaatttaacaaaccttttgcctattcan

SEQ ID NO: 23934 - DNA, 1651 bp, Homo sapiens; identical to SEQ ID NO: 21898
  misc_feature 1, 2: n = A,T,C or G

SEQ ID NO: 23935 - DNA, 1200 bp, Homo sapiens; identical to SEQ ID NO: 23727
  misc_feature 1, 2, 3: n = A,T,C or G

SEQ ID NO: 23936 - DNA, 800 bp, Homo sapiens; identical to SEQ ID NO: 23821
  misc_feature 1, 796, 797, 798, 799, 800: n = A,T,C or G

SEQ ID NO: 23937 - DNA, 1490 bp, Homo sapiens; identical to SEQ ID NO: 21073

SEQ ID NO: 23938 - DNA, 1490 bp, Homo sapiens; identical to SEQ ID NO: 21073

SEQ ID NO: 23939 - DNA, 1253 bp, Homo sapiens; identical to SEQ ID NO: 23717

SEQ ID NO: 23940 - DNA, 577 bp, Homo sapiens
  misc_feature 1, 2, 3, 79: n = A,T,C or G
nnnctgcagtgagccaagattgcaccactgcactccaccctgggtgacagagtgagactgtctcaaaaaaaaacaacanaaaaacagattcttctccagccaaccatgtcccgccactcagaagtggtttcatgcttctactgataagccaacttaacatcagatccaatacagattttttaaagataaaataccatctctactggacctgtttagtggctcaggctgccctcacaggacatccctgagaccaccctgtcactcttgatgttggaaccagggcccaggcctgctcctcattgtctcctgccctcctagtccccaggagaggaaaagaaatactgttttagagaaataacattttcaacaaaacatccctggagtcagattttgagttggggtgggctaatcagggagtcggggctctctgcgtgatgtcagttctatggctaactggtttttctacaccagccagctgcctatcaaaacagtacaacttttctaggaaatgcaattggcaaagacacttacgatgctgagaagtacacaaggtgaaactgctacagtttttctcata

SEQ ID NO: 23941 - DNA, 1650 bp, Homo sapiens
  misc_feature 1, 2, 3, 4, 5: n = A,T,C or G
nnnnnagagtttaagagggtcaaaaaacagtaccatggaaaagggaagaaagagggtgatgctgtcacgctgaggacctagtcacaggctgcccgtgaacttggaatcagtgaatgattacaggaaaaaaaagtacataattcactgtactaaaaacgtgaaatttcctcatcactgaaaacacgctcatctgaaatctctgtaaaaaaggatttggctgttgaaacttgttatcaatgcctcttctcgtagccaccatgacaataaatttggctaaacatttaaatttaccctcagttttggttttcctttaaaaaaatatgtaaacaaatgaacaggaaatctctgcttgtaagaaaaatctgaatataacaggggaaggtcagcagacggtcaccggggaaagcatccaggcatcttgtcgcctcgctgggctggccggggctcagtcactatctgactcctccttgtacttggcccggatggcctggccgttctgcagcggcatttcctcatagtcactcccataaatcacatcatcatccgagtcattcagcatggagaaggcaggattgtctttcagctgggactcatagagggcattcttcgatggagaatatacaaaggccaaggtgtagagatagaagttcaacaggccatagaaagataagaactcggctgaattctggtagtgagttgacagctctgctacaaaattgtcttgtagtacttgcgccccaaatctcaaataaaggatggcgatgctaatgacaagtactgcgaaagtcaatgcagtcaaaaatttcaacctgagatccacataaggcatgtgacgtagctcggaacacgcccgcactatcaagaacaagaggtacagaatgtacaccgctgccaccaccatgaagaagaccttcattccctgaaaatttccggtatcaactcgatactggtacattggatcatgtaattcgttaactgtttgccatattcctagcgtaacagaagccaaccacaatagtccaacaatgaagaatttaggcaaatagaaagttaaacactttctttctccctggacacgaatcccgtggtacacgcacagccagaagagcagcagggcgcacaggaacatggactgaaagaggtcatccagcatccctgggagccagctgttgaccaggaaggagagggggaagaacggatcattgtaaagtagcagcagaggcaggagaacagacatccacttctgctcgatgccccagtctctcatggaaaatttccggagggaatgcgcaaacaggcaagtgacgatgaaggtgagcaccacaaagaaaaaccggaaccagatttccaaccgggagaaggcagggttataagtcttccatgtgaagttcattcccttgatggggagcttcaggtgttcaaatcccactatcactgtatactgagtgtagttcaggtagccaaggtgagccacaataatctccgcacatttccctgcacatgtgagggtccttgtccggttgtgaactttgttatgaatgtacatcgtggttccatcttgagctacaccatcgactttaacagtcatgggaaagcttgtcttaatagaagtttcttttgattgatccaactcaacaacacatgtcagcc

SEQ ID NO: 23942 - DNA, 6135 bp, Homo sapiens
  misc_feature 1, 6115, 6116, 6117, 6118, 6119, 6120, 6121, 6122, 6123,6124, 6125, 6126, 6127, 6128, 6129, 6130, 6131, 6132, 6133,6134, 6135: n = A,T,C or G
nggttatgggtataagcagactttggcttatcgtggcgcgggcgaggtactttgaacgatagcaacccttctttgtgtaactctgaagctgaaaatattgagccttcagttatgaagatttcttcaaatagctttatgaatgtgcatttggaatcaaaaccagttatatgtgatagtagaaatttgacagatcactcaaaatttgcatgtgaagaatataagcagagcatcggtagcactagttcagcttctgttaatcattttgatgatttatatcaacctattgggagttcaggtattgcttcatctcttcagagtcttccaccaggaataaaggtggacagtctaactctcttgaaatgcggagagaacacatctccagttctggatgcagtgctaaagagtaaaaaaagttcagagtttttaaagcatgcagggaaagaaacaatagtagaagtaggtagtgaccttcctgattcaggaaagggatttgcttccagggagaacaggcgtaataatgggttatctgggaaatgtttgcaagaggctcaagaagaagggaattccatattgcctgaaagaagaggaagaccagaaatctctttagatgaaagaggagaaggaggacatgtgcatacttctgatgactcagaagttgtattttcttcttgtgattagaatttaaccatggaagacagtgatggtgtaacttatgcattaaagtgtgacagtagtggtcatgccccagaaattgtgtctacagttcatgaagattattctggctcttctgaaagttcaaatgatgaaagtgattcagaagatacagattcggatgatagcagtattccaagaaaccgtctccagtctgttgtggttgtgccaaagaattctactttgcccatggaagaaacaagtccttgttcttctcggagcagtcaaagttatagacactattctgaccattgggaagatgagagattggagtcaaggagacatttgtatgaggaaaaatttgaaagtatagcaagtaaagcctgtcctcaaactgataagtttttccttcataaaggaacagagaagaatccggaaatttcttttacacagtccagtagaaaacaaatagataaccgcctgcctgaactttctcatcctcagagtgatggggttgatagtacaagtcatacagatgtgaaatctgaccctctgggtcacccaaattcagaggaaaccgtgaaagccaaaataccttctaggcagcaagaagagctgccaatttattcttctgattttgaagatgtcccaaataagtcttggcaacagaccactttccaaaacaggccagatagtagactgggaaaaacagaattgagtttttcttcctcttgtgagataccacatgtggatggcttgcactcatcagaagagctcagaaacttaggttgggacttctctcaagaaaagccttctaccacgtatcagcaacctgacagtagctatggagcttgtggtggacacaagtatcagcaaaatgcagaacagtatggtgggacacgtgattactggcaaggcaatggttactgggatccaagatcaggtagacctcctggaactggggttgtgtatgatcgaactcaaggacaagtaccagattccctaacagatgatcgtgaagaagaggagaattgggatcaacaggatggatcccatttttcagaccagtccgataaatttcttctatcccttcagaaagacaaggggtcagtgcaagcacctgaaataagcagcaattccattaaggacactttagctgtgaatgaaaagaaagatttttcaaaaaacttagaaaaaaatgatatcaaagatagagggcctcttaaaaaaaggaggcaggaaatagagagtgattctgaaagtgatggtgagcttcaggacagaaagaaagttagagtggaggtagagcagggagagacatcagtgcccccaggttcagcactggttgggccctcctgtgtcatggatgacttcagggacccacagcgatggaaggaatgtgccaagcaagggaaaatgccatgttactttgatcttattgaagaaaatgtttatttaacagaaagaaagaagaataaatctcatcgagatattaagcgaatgcagtgtgagtgtacacctctttctaaagatgaaagagctcaaggtgaaatagcatgtggggaagattgtcttaatcgtcttctcatgattgaatgttcttctcggtgtccaaatggggattattgttccaatagacggtttcagagaaaacagcatgcagatgtggaagtcatactcacagaaaagaaaggctggggcttgagagctgccaaagaccttccttcgaacacctttgtcctagaatattgtggagaggtactcgtccgagagtttaaagctcgagtgaaggagtatgcacgaaacaaaaacatccattactatttcatggccctgaagaatgatgagataatagatgccactcaaaaaggaaattgctctcgtttcatgaatcacagctgtgaaccaaattgtgaaacccaaaaatggactgtgaacggacaactgagggttgggttttttaccaccaaactggttccttcaggctcagagttaacgtttgactatcagttccagagatatggaaaagaagcccagaaatgtttctgcggatcagccaattgccggggttacctgggaggagaaaacagagtcagcatcagagcagcaggagggaaaatgaagaaggaacgatctcgtaagaaggattcagtggatggagagctagaagctctgatggaaaatggtgagggtctctctgataaaaaccaggtgctcagcttatcccggctaatggttagaattgaaactttggagcagaaacttacctgtctggaactcatacagaacacacactcacagtcctgcctgaagtcctttctggaacgtcatgggctgtctttgttgtggatctggatggcagagctaggtgacggccgggaaagtaaccagaagcttcaggaagagattataaagactttggaacacttgcccattcctactaaaaatatgttggaggaaagcaaagtacttccaattattcaacgctggtctcagactaagactgctgtccctccgttgagtgaaggagatgggtattctagtgagaatacatcgcgtgctcatacaccactcaacacacctgatccttccaccaagctgagcacagaagctgacacagacactcccaagaaactaatgtttcgcagactgaaaattataagtgaaaatagcatggacagtgcaatctctgatgcaaccagtgagctagaaggcaaggatggcaaagaggatcttgatcaattagaaaatgtccctgtagaggaagaggaagaattgcagtcacaacagctactcccacaacagctgcctgaatgcaaagttgatagtgaaaccaacatagaagctagtaagctacctacatctgaaccagaagctgacgctgaaatagagcccaaagagagcaacggcacaaaactagaagaacctattaatgaagaaacaccatcccaagatgaagaggagggtgtgtctgatgtggagagtgaaaggagccaagaacagccagataaaacagtggatataagtgatttggccaccaaactcctggacagttggaaagacctaaaggaggtatatcgaattccaaagaaaagtcaaactgaaaaggaaaacacaagaaatcagcctgaataaatggaatgacttgtctgcctcacatattctaaggtgcagagtcagaatatgaactgttgcaactgaacgaggaagggatgctgttggcttcagagatcaaacacctgccccgaagactcctaataggtcaagagagagagacccagacaagcaaactcaaaataaagagaaaaggaaacgaagaagctccctctcaccaccctcttctgcctatgagcggggaacaaaaaggccagatgacagatatgatacaccaacttctaaaaagaaagtacgaattaaagaccgcaataaactttctacagaggaacgccggaagttgtttgagcaagaggtggctcaacgggaggctcagaaacaacagcaacagatgcagaacctgggaatgacatcaccactgccctatgactctcttggttataatgccccgcatcatccctttgctggttacccaccaggttatcccatgcaggcctatgtggatcccagcaaccctaatgctggaaaggtgctcctgcccacacccagcatggacccagtgtgttctcctgctccttatgatcatgctcagcccttggtgggacattctacagaacccctttctgcccctccaccagtaccagtggtgccacatgtggcagctcctgtggaagtttccagttcccagtatgtggcccagagtgatggtgtagtacaccaagactccagcgttgctgtcttgccagtgccggcccccggcccagttcagggacagaattatagtgtttgggattcaaaccaacagtctgtcagtgtacagcagcagtactctcctgcacagtctcaagcaaccatatattatcaaggacagacatgtccaacagtctatggtgtgacatcaccttattcacagacaactccaccaattgtacagagttatgcccagccaagtcttcagtatatccaggggcaacagattttcacagctcatccacaaggagtggtggtacagccagccgcagcagtgactacaatagttgcaccagggcagcctcagcccttgcagccatctgaaatggttgtgacaaataatctcttggatctgccgcccccctctcctcccaaaccaaaaaccattgtcttacctcccaactggaagacagctcgagatccagaagggaagatttattactaccatgtgatcacaaggcagactcagtgggatcctcctacttgggaaagcccaggagatgatgccagccttgagcatgaagctgagatggacctgggaactccaacatatgatgaaaaccccatgaaggcctcgaaaaagcccaagacagcagaagcagacacctccagtgaactagcaaagaaaagcaaagaagtattcagaaaagagatgtcccagttcatcgtccagtgcctgaacccttaccggaaacctgactgcaaagtgggaagaattaccacaactgaagactttaaacatctggctcgcaagctgactcacggtgttatgaataaggagctgaagtactgtaagaatcctgaggacctggagtgcaatgagaatgtgaaacacaaaaccaaggagtacattaagaagtacatgcagaagtttggggctgtttacaaacccaaagaggacactgaattagagtgactgttgggccagggtgggaggatgggtggtcaggtaagacagactctagggagaggaaatcctgtgggcctttctgtcccacccctgtcagcactgtgctactgatgatacatcaccctggggaattcaaccctgcagatgtcaactgaaggccacaaaaatgaactccatctacaagtgattacctagttgtgagctgttggcatgtggttagaagccatcagaggtgcaagggcttagaaaagaccctggccagacctgactccactcttaaacctgggtcttctccttggcggtgctgtcagcgcacagacccatgcgcatccccacccacaaccctttaccctgatgatctgtattatattttaatgtatatgtgaatatattgaaaataatttgttttttcctggtttttgtttggttttcgttttgcttttagcctctacatgctaggatcacaggaagactttgtaaggacagtttaagttctcctgcaaggtttaatttgttatcatgtaaatattccaaagcaggctgccttgtggttttggccagccttgtgctatgttgataagattgatttactgcttaaaatcactttactttatccaatttttactgaactttttatgtaaaaaaataaaatcaattaaagaacttggcatgtgtgttccctaaaaggannnnnnnnnnnnnnnnnnnnn

SEQ ID NO: 23943 - DNA, 1804 bp, Homo sapiens
  misc_feature 1, 2, 3, 4, 5, 6, 7, 8, 9, 10, 12, 1802, 1803, 1804: n = A,T,C or G
nnnnnnnnnncncccgccccgcccgggggggtccggcctggaacccggccccgcccccggtgttcaacccgggcccccgcttttttggggaaaccccccttccagccaggttcccggaccgtggcccgtttctaccctcggccccgcccccacagaaggtttaaaactttttcggcccggccgccgccaaatttttttttttgttgtgtgttgtgtggttgagatccttaatatttgttataatggcataattaacatcatgtaattgaattgaaaacataaatgctttagatataaatagtaattttaaacatgggactaagtacaaaagacttcaaggcacccacagcttaagactccttatgtaccataaaaccaatcaccatacaaattaatgctggatttgttcccacacattttttgatcaaagtaattatgaattaaactctcagttttctaaaaccatcacaaagaccattctgttaagatgaagacattataatgaaaaacacatctataattgtatgtgtagatatatttgttgaatttatgaccttcatagtctaaaatttaggaaagtaatgtttttgaattgatccaacacagctaaattaactaaattcacatacttaaaatttgaaattctagcaaagatgtatataaaaaacaattagacaatgtccagctgaattttagaattatccaaagtattgctaagaatttgtagatgggccctcattttaaacaatacctggaaatattccattatcatttatgcccaaaagcaagcaggaatcctttaatccagttacacagaaaatatgaaatcataggtagggcttttgattttttgcttttgtggggtttgttcatctgtaagttaaaggttgtttccattaagtgtaaatttaatcaatataaccaatatttgcaacaagggcatttcagaatgcaaagagcacctttcttgattaactgatcttgaagaatgctttacccttagtcctccacgtgcctacccttaggaaagcatgctctctgcaaaggttgtatctttaaatcatatttgcacacaacgtaaatgaatgacctgatcccatttatgtgaattcccctcagaaatctcagggcttgtcaaaaagaaacataacattggcaaaggcacctttgttttctccagattttttttttgagcagattgttatgcttggccaaaataaaaccaaacatacggcattgagaaatatatgaaaagacagtgcactctgaaatgcctcatgatctcttttccctctgcttgcctgttgccactttttgctgccctaggagtaggcctgtgtcttgtaaatatgaaatgcttttacggagacagaggatttcatatcgaagactaatagatttcacactttctagtccttttccaaagggtccgctgtccctggagactcccaacctgatgatgtcatagtcctcttccaggagctgtttttagttccactttggctgatatcatgaagtgtcaaatgcaccaagcctgctcacttgataaggtcacgttgagtcccagcaggagaaacgtttgaacctgggaggtggaggttgcagtgagccaagatcacaccattgggctccagccttggagacagggcaagactccatctcacttgataaggtcacgttgagtcccagtgcatctcgtagtacaattttatcattcagctctatgaatctgcttaactatttcccattagaggaagttgcagacacaggttacggcatagggcaaaaggttgctgcctaannn

SEQ ID NO: 23944 - DNA, 1895 bp, Homo sapiens
  misc_feature 1, 7, 1894, 1895: n = A,T,C or G
ngaatcncaaatgaaaactaaagggcatatgaaaccctttcacaactatatgagcctaccttgaactgtgtttgcgagttttacctatgttgtaagcctgttccctagcattttaaattggtcacttatgtttctgggagtggtaagggcaaagagaaaatagttttagatattttccttttgtaatctctttttgtctttgcaaaaaggtacgttcccttcccatatgtcataaaccaatgtattttaaagaaagcaaaagctaagtatttgaaaacgttatctttcttctaacacttgctgtgaaaggagtaaattcaggcaagcagttgaaaacattctttaaaatggccagtaaaagcaaaactctttgtgctatacggaacactcgggagtattacaaaaccagggagggagtaaaagaatggccatttctctataaccaaattgaagacagtaaagtagaaaatataatttccattgtgcaccaaatactcagaacacaaattaaagcaaaaacaaaatggatgtgcacaccaaaacaaaggtttttctgtagcatttatatgaagagcatgtgtaaaacattctcaatctgcccctctgaatggattatgaaagatcagtatgtactcagaaaacggggtgctaaacaaagaaaagtctcagatcccactgaaaatctgttcagtttcacaggctctctccagaaaaatgcatatgtaccaatttgcatgtacaatttcagagccttcaaatacattctggggtccaatcacatacttcaggttcagactcctagctcccaatattcctacagttctgaagaattagcagtcctctcatttctacagtctgtatttcttctactgaatcttggtgggagggactccaaaccagaataaactaaaagataacttgctttaaagagtaactgtttacttatttgcccttggaggaaagaacatcccaatctctagttgcttctatcaaatgccgttggccatgactcatccactcttcctggtcttcatacagtcgcccacaagaccagcacttaaatacacactgtgaagaatcatcaggcaaggaatccactacctgtatgttgtttttatgaacttttttgagtttcattttcaacatcatttgccttttaatttgactggcttcttccgcattctggtaggtcaggcgtacatgatgccgtctgatgcctagctgacacctagtcctctctgataaaacaactttgaggacattgcctttgtatttatttattaccttcatcacattggtcacttctggcgagtccacatcagggtggtttaacacaatgactggctggttccgacggggacacttaatcaactgatctggcttagctgctatcagtcttagttgccttgcaacctgaaaaattgaaggatccttgagacagcggctaggttcagcttgaattttgtttttcttcctggataagtgtacttgtttggttttatttctacttatagaaagacttctggaaagcagtctcccttgcttatttaattcactgcttccttgctgtccatacaagaggccagtttttctatggatggtgctacagacagcactctcttttctcagtttaggccgcagaggtgtctcgatatttggggacatatctattggccccctttcacttcttaaaggctgtaagtctgagtccgcctgtctcaacagggcaagatggaattgcttttattaactgtctttcactgcaaggtatgctgacaggtgcttcacatctagcctctatgatgtgggcattctcagatggaagtaagaccctcaacacagcccctatggggattgacatctgaagtgtcatctaaggatccgtagattcacnn

SEQ ID NO: 23945 - DNA, 618 bp, Homo sapiens
  misc_feature 1, 2, 3, 615, 616, 617, 618: n = A,T,C or G
nnncacacataccccatctttgggcaagccctaaactattacaggttcccatacaactccttccccagtaggtaaatttagaacttatgaataaggaaaataagtctctagcttctgcttttactgaaggaagccaaacatagccgctaatactattcactccttatttcaaagagtgaattgaaaaagaaaataagttatttactccattgctatactctgaacttctataaatgggtgctagaaaatcttaatacatagtatttagccatactttgtatttatttaatatgaactgaacacatcttgcaagcattctccctctctagctcactttgcatttggagtgtaataatcctagatgagaatatttctgaaggtaaatcactacttcgggactcaaattttttttaatcaaaaccttcttgcctgggaagtctcttgcatgtgaacattttttctaaagattgtttaaagcttgtttatgtttttttactttcttgattgcagattcatttgtttggttaaactccatgagcttgcagtggtaaaatttgagcaactgaatttcccaagtcactgctaattcctgtgcacacacttgtttgtggatgnnnn

SEQ ID NO: 23946 - DNA, 2887 bp, Homo sapiens
  misc_feature 2877, 2878, 2879, 2880, 2881, 2882, 2883, 2884, 2885, 2886,2887: n = A,T,C or G
gtcttgatctcctgacctcatgatctgcctgcctcggcctcccaaagtgctgggattataggtgtgagccaccatgcccagccccttctgtcccttctaacgtgaggacccagcaacaaggtaccatcttgaaagcagcaactggggactcagcagacaccaaaccaactggtgcttaaccgtgacttcccagcctccagagctgtaagaaaataaatttctattatttatagattacccagttgaagatactttgttaaggcagtacaaatggactaagacaagggggaagaaatttgcattcctgatcttcccaacttcttcaaattcacaacacttgaatgacagtcttatttcagcacttactgctatcacctattacttttatgtgtgtcttacctatttgagatgccagattccttggaagtagagaccgtgtctgaatcatcattgtattaaaccactcatccttaacaaatgcccaagccatggttaaagttcaataaatactttgttgaatttattaataaaatggcagaaatgtcattctcttccatatatgtttaataaatccctgataggtgctaagcactgcactaggtaaaaattctcttctgatgctgtctttttggccaaccattttttttatcatttattcattagctgacatttgctaagtgctttggaggggtcaaaaggggaagtaatgagaaatcaaagatggtccctacatcaaggataaactatctttttttagtcactcaaagtcataaccctttggaaacaaaacccaccagtaccccagattttgaccacagatgaatcagtactacaaggactggttagagggttgaatgaatctgtatactcagcacttaacacagcactctgggtaaaagaaaaaagatcctcaaagatattagttggttacatcaagaaaggacaaacttaggttaatctataacttcatctcagaggaacaggaactttggagataaacagggctctgccacttgcaagttgcaccatccctggtttctccatctgtaaattgattaaaacactgcctatctaataagattaaataagttagaagcattcagttaaatgtcaactgaaactattgttcatgtaaattgtgcttgatgctttttctttctagattcaatgattattgtcattttacctccataggccctcaatagaaatcagttgcagagggcagaagcctagatattttcaccttaaaattggagggtgaaagacattgaggtgaagtagagatagagggtacacagaaaaatcgtataagtaaaactaacatcgttaacattatttactgtaagttatctttgtaagagtggtaaaatacattgtgttgttaaataatttcatttaaaaaatgcatcactttgtgtgtttttatattgctaaaaccataaggccagtctacaaggtttgtagataaaatagaaacataccttccttgaaaagcagaataaattttttaaaggcaggaaggaagtgtttgaaccatgtgtcaacaagctttactgtcaaagcaggcttttggtatgggaagaaaaatacttataaatacttgttttaatatttgctttattaaaatacatttaaaatacagcatttttaaatctctaagctcaacttgaagatataagaacagtaaatttgataaaaatgagaaattacattcccatttctttaacaatttgtaaattccaattatcctgaacatttaacaccatttacatattttattaatcacattttcttaaacatttgataagagatttaatattttgatccaactaccaaaaaagcagacttgtgtacttgacagatttttctaaacacttcacaactcacgattcaaacaaagacaaaatagcatatcaaaagttaatcactcagttggaaagcactcataccataggcttttattcatttcttgaataattttgttatatcttcctcttttaggctgcaatgagctataattgcactactgcactccacgctgggtgacagagcaagaccctatctctaaaaataaaaaagtatatatatataaaaatatcttcctctattataatttaactcattaagccatttatttagatgtaaacttgcccccctgacatgtggtatgaaacaaatagaaacctagaaatttagtgcatattcaaatattaagacagacactggtgtggtgacttttgtctgtcgcttcattgggacgttttcttctttctgatcaacttaatgaaattataatttactataattcaagtgtagccatttttactgtagagttcaatgatctttgatgaacgtgtacacccatgtaaccaccacccccaatcaaagtaaagaacattttcttaccagaataaatttcctctcagtttgcagtcattctccccaggccctaggtcaacactgatccaccttctgtcacctggcaaggttagtttcttccctgatttagaattcatatacattaaatcagatagtatatactcttgtgttagtttcttaagcttacaatgttcagagatattgctgaagcctgagtctgacagctcaagtctaatgctgaattgtattccatgcatattcccagcggttatgtatggcggacacatcgcgtaatccagcgtggatggtatgactaagtgtacaacttaaccacacacaacaccaaacactggccgcccgcccaaacttaaaaaaccacggggggcaacaaaaccaaccgtcacgcacggaacagggtgatcccaaaaccggcaagcgagaatcggctgctagaaagacccacactgacaatacacagacacacggaaacacgacaannnnnnnnnnn

SEQ ID NO: 23947 - DNA, 800 bp, Homo sapiens; identical to SEQ ID NO: 23821
  misc_feature 1, 796, 797, 798, 799, 800: n = A,T,C or G

SEQ ID NO: 23948 - DNA, 399 bp, Homo sapiens
  misc_feature 398, 399: n = A,T,C or G
accctaataaagtaatcaatagaagcctggattgttgttggaaaaagtaaggtaggaccaagaaacggaaaccaccaaattgccaagcaaagcagtatgataacactaaaggatataacacaagtctgcccttctgcattcatttagtgtcagttataatttcttccaaaggagaccttgaattttttaattatgttctcaaattacaacatttgaaatggtaactctagttgaatactccttcttctaggcgttgtatcttctaagaaatgtcccccattccagctctgtacgcgggggaacaaaatgaaaatgttcccatcatcagtgaagatacatctaaactgtatgctttgaaacaaagcagtattttgaaccagttgctactataagagtann

SEQ ID NO: 23949 - DNA, 760 bp, Homo sapiens
  misc_feature 757, 758, 759, 760: n = A,T,C or G
accacagtttgcttaaccattcactttttgaaggacatctggattgtttccagttactgactactataattaaaactactacacatatttttgggtaaccttttgggtgggcataagttccgtttctgtgggataaatgcccaggtctccaggttccttatttggcctctgttgactctcaagttgtagcagggagtctgtctccaactgctagggttgggacttccaactccacacgaggtgtctgctggtaactcactgactgcgatggatatgagtgccttgtcatggctccctaaatggcctctactaataataccaccacaactaccaacactactaaagtcatgtggactctgctaacagtaaggtggactccttaccacccagtgagaatgaaactaccaattccttactcagctttcccagacgttaccctggaaggaagggtgagtgccttgccacagtcaggcatgagtggaaagcttggcttccccacttggcttttgccatgggtggggtagagccacagtttttttgttattgttgttgtggctggctggagtagagctgttattgtctaaaagttttctgtcttactagtcttctcaagactgtcttggatttttggctagagagaacaggcttttgttggagatttgtttattgttttgtcagtgtccattggtacttccaggttgacagctgctttagctccaagtcttggaagccttattaagaatgacagaatgttcannnn

SEQ ID NO: 23950 - DNA, 478 bp, Homo sapiens; identical to SEQ ID NO: 23769
  misc_feature 475, 476, 477, 478: n = A,T,C or G

SEQ ID NO: 23951 - DNA, 800 bp, Homo sapiens; identical to SEQ ID NO: 23821
  misc_feature 1, 796, 797, 798, 799, 800: n = A,T,C or G

SEQ ID NO: 23952 - DNA, 1380 bp, Homo sapiens; identical to SEQ ID NO: 20118
  misc_feature 1380: n = A,T,C or G

SEQ ID NO: 23953 - DNA, 538 bp, Homo sapiens
  misc_feature 1, 2, 3, 4, 5, 6, 7, 8, 9, 10, 11, 12, 13, 14, 15, 16, 17,18, 19, 20, 21, 22, 23, 24, 25, 26, 538: n = A,T,C or G
nnnnnnnnnnnnnnnnnnnnnnnnnnacctgtatttaataatttcaaaatgggtgttttaaacattaacatttcacatacaaactcatgaaatttatgattcagaacacgtttgttaaatggtgccttcatttcctagtactatgttttcaataatgtgcaaatatttaaacaacttaaatataaaatattcacttatatttttaatggatgtggtatctcaatccatttgtgtcactccagatcacaacataatttcttaagtaagatgcatattgagtcatgtaagtaacacataaaaagttataaaataaattgtgatcacacttgggctaaatatagaatacactaaatatctgatgggcatccacacattatagaaattagacattcaaccctatatagtaatttaaaaactaccgacaaatgcctctaaatcaatatcattaaaaatcagttaacaacaacgacaatgacaatgaaatctctgtacaatgaaaagatttctgaatccagatgataatcaaatcattttgaan

SEQ ID NO: 23954 - DNA, 555 bp, Homo sapiens
  misc_feature 1, 2, 3: n = A,T,C or G
nnnacatgtaaatatacatcatcccaagttaaatttgataggccttcctgacagtagccatatagataaatagaagttttcgttggtttagtggcaaaactgaattcttaatgtaggtatacaagttaaatatgatggttagaaatgaagttttctgaaagtagttcgttgtatgctccctaaaagaattagctttatatttatcttaagaatatctctaaacctatgcaaaaatatggcaaatagtcttctttccattagtctagttcaacaaaatctgactcagagacagtaaagaaagggcaagtagaagatctaatgccaactaagaagataattatttctgaaatatttagttgaagataactttctttcttaagacattactgtggttatgatgcacaagtcaaagaacatgtggcatttccaaagagtattaaatgcatgttacttttttataaaaataagataaatgagattaatgggcttggaactgcaatcttggtaaataaagttactgtatgtctttcaaaaaaaaaaaaaaaaaaaaaaagt

SEQ ID NO: 23955 - DNA, 487 bp, Homo sapiens
  misc_feature 487: n = A,T,C or G
acttgcaaagtaatacagaaacgtgactttcggcagccacccaagatgatgcctattttcagtgttgatgtattcaggcagggaaaaggtttacttggtggaaactcctgttagaatttcattcggggtggaaagaatcttctcgagctctctgtaagtgaggatctaagaataaaaggctcagcctagtcatttttttctgtgccctactgtatgagttgggcagaattgagtgccacctaagccgggcttctgtgtgccaaaatgctggtgggtgaaattagtgaaattctttctattcattcctttgcccttctcccaagaaaacccatggggaaacaaattacaggggatgaattcctttagaactttccccacttagagtgtttgagattcagtttcataaggcactccatctgtgtgtgtggtttagagagccttgttttgtaaatctcattaaattccttttttagggcaggagctctgn

SEQ ID NO: 23956 - DNA, 1214 bp, Homo sapiens; identical to SEQ ID NO: 20119

SEQ ID NO: 23957 - DNA, 1001 bp, Homo sapiens; identical to SEQ ID NO: 21314
  misc_feature 681, 682, 683, 684, 685, 686, 687, 688, 689, 690, 691, 692,693, 694, 695, 696, 697, 698, 699, 700, 701, 702, 703, 704,705, 706, 707, 708, 709, 710, 711, 712, 713, 714, 715, 716,717, 718: n = A,T,C or G

SEQ ID NO: 23958 - DNA, 919 bp, Homo sapiens
  misc_feature 1: n = A,T,C or G
nggtagtctagaggatcccaatcagtttacacaaaaaccaatctatacacaatagtcacagaacaattgttacactttgtgatactaactgtaagtgcaacagggaatcagaagagagatgagtataggctggaatacttaaagagatgattggaggacttggagtgggccttgagcttggcctttagattaacaggggccagaagaaggacattttacatggaaaatcgggaatagcacaatgaaaacagagtaggcatggtttaaatataaggaacagtgtagttctgcctggtttgaagaaataagatgtaaggtcgagtggagatttgtggttcaacaataggcttagatttgagtcaagtggaagctcttgcacatttcggaaagacaagtgattttatgaaagcagtgtttaaagattagttttgtactagaattaagggtagattcctagagaaaagaggatggcaggtaccagtgggtaccagtggtaataggaaaaggcaaatctaggatgctttggaaggaaaaatgagaattagagtttaggagaaagcagatcactgaagttttaaaaataatgtggaatagttggtaagaacaacttattttatgaaagctgacatcggagtctcactggaacattgtagaggagaggttttctaggcatgtggaaatgcagtaagaggcatgggtaaaagcaccttttagtttttaaggaattaggttaaagaattagctgcatgcttgagtgtttattttggttatttctgatatgcagttctgaacctcaggaataatttgttatctaactaaaatagtaagttttaaaaataaagctcatttatattttcttctagaataataactgcttattacaggaaatttgcaaaatgcagaaacgtaaaggcaaagt

SEQ ID NO: 23959 - DNA, 1641 bp, Homo sapiens; identical to SEQ ID NO: 20385
  misc_feature 1, 2, 1626, 1627, 1628, 1629, 1630, 1631, 1632, 1633, 1634,1635, 1636, 1637, 1638, 1639, 1640, 1641: n = A,T,C or G

SEQ ID NO: 23960 - DNA, 2551 bp, Homo sapiens; identical to SEQ ID NO: 22616

SEQ ID NO: 23961 - DNA, 876 bp, Homo sapiens
  misc_feature 876: n = A,T,C or G
gcgtccggtatagtgtaggtcaggagcctgtggaggggaccagtattttgcaagcagttactaaagtcacatttctcactgactcttgacggtgcattgttcaaaatctcatggcttaaccttagtgttaaatgctttcaagaaaaactgtaaccatttcaattttacaagtactttctcattttacttgaacattttacaagtactttctgtatttacttgtaaatatttcctctagcccttgaacccgcgcatcacttttttggttttcctcattccaccacagcatttaggtgaccgttaccatttatgtttcattaagcttcactaggaatgtaaggataatattagagcatttgcagaaaattgttatctccttttgtaggggattcgagacatatttgtagctacttcacggctgtagagttagtgggtgatcgggtattctgcattgttccttatccctttgtcagtgacagacacattgacataagagattcctacaggattataaggagagataaattattaaccatttttttacttgatccaactactccatgtcccatcaactagtggtaactgatgttgataggattttttttaagtccagtaactattcttgcagtatcagatgtttaccccaaattaggcaataacccagacttcgaatctgtaggtttatgattcctacattcccctgccgctctcaatggcttgttgcctcccttctgttgctctcagaaaacagatggagatcaggtaaagatgaaacgtgcactatatgttcagaaaagcaaacatccattgtcctcatttagattccatccttcaatttatgctctagaacctaaacctaatacccattgactaccn

SEQ ID NO: 23962 - DNA, 450 bp, Homo sapiens
  misc_feature 1, 2, 447, 448, 449, 450: n = A,T,C or G
nnatacggcgaattggagcttaccgcggtggcggccgaggtacataaaggtcaccgaggacagttctggtggaatgatgagggcagaagcttcattggcatgggttcgagagagaaatgaaagaggattgaagacagtgagtatagacagctcaggaagtttagctgtgtaagtgaacacagagatgagtggtcactagaaggagaggtgagccaagagggaatgatgggagaagttataatatgttgatggtcaagatagaatgactgattaaaggggaattgctggggctctgttcctgagtaggcaagagcaggtgagatagaagacataggtggagggattggccctaaatacatgcgtggacagatcctccttatgaaaaaaagaaggcaaagtgtatgaactcacacagtagtaggagagtatataggtggtacctgcccnnnn

SEQ ID NO: 23963 - DNA, 1385 bp, Homo sapiens
  misc_feature 1, 2, 1308, 1317, 1325, 1327, 1330, 1354, 1357, 1358, 1359,1360, 1361, 1362, 1363, 1364, 1365, 1366, 1367, 1368, 1369,1370, 1371, 1372, 1373, 1374, 1375, 1376, 1377, 1378, 1379,1380, 1381, 1382, 1383, 1384, 1385: n = A,T,C or G
nncgctttccatcatggtacacccacagtcaggctctgcataatcaacttcaatgtaacaccgcctcccattgagtagtctcatccttgctaccaagaaatctacaacgtccgcaggtataaagtatgcgatgtgcccttggatcaactgccacggtcggaaagcttaaaggatgttctggagagactccttccctattggaatgataggattgctcccgaagtattacgtggcaaaaccattctgatatctgctcatggaaatagcagtagggcactcctaaaacacctggaaggtaccagctttatataccacttattagaggttgccaagtgtgatatctaggccttaatctagaaattaagctcgatgaggccctatttacacaatagactcctctatccccctttgtcacttcagatttaagaattgtcttgttctataaatcagatctcttgtgtgttttctgttcccgtgacccgaagcagctgttttcagactttagcaagcatcagagtcacctggagaggttggtgtatcacagattgtgggtcccaccctcagagtttcggaatcagtaggtctggggcgcaccctgagaaatctgcatttcttagaagttttaggtgatgctgatactgctgattggggttccacactttgagaagcactagtctaaaggactgtatggcttgttgtagtgaaatgaaaggaagctaggaaaggaaggaattgttgaaatggccttgaaagtaaattagagtttttcaagtcaagtaaattatctagacttcagttttgctcacgttcttccaactttaaacaatgattgctgttcctagacgtaggtttcctgagcagttcttttgtttcaaacttcttttcagaacaggcttagtcattgactggaagaaagttagggggaaggaaactaaaaggatagttggtttatttatcttgactctaaaaatttggaaatcagcagcagccataattttaactactttatgtcatgttctacatgtatactaaaacatactgtattgttacctttttaagtaacatgaaccaaatgaactcttgaggattcaggttcaccggttttgagcatcagtgattgcactgtgacaccttctggatttctcactgttctgtggatttctcgtttccctctctgcctccactcatcccagatggttgtgctttttgcgtgatatgccctgtctggtgttttcctgcctttcatcactgtcagcagttagcttactggtaataaatagaagaaatttctcccccattcgttttcantctgctttnattttctntnagnggctgtgacaaattaaaaggctgnccnnnnnnnnnnnnnnnnnnnnnnnnnnnnn

SEQ ID NO: 23964 - DNA, 2843 bp, Homo sapiens; identical to SEQ ID NO: 20339
  misc_feature 1, 2, 3, 4, 2815, 2816, 2817, 2818, 2819, 2820, 2821, 2822,2823, 2824, 2825, 2826, 2827, 2828, 2829, 2830, 2831, 2832,2833, 2834, 2835, 2836, 2837, 2838, 2839, 2840, 2841, 2842,2843: n = A,T,C or G

SEQ ID NO: 23965 - DNA, 1641 bp, Homo sapiens; identical to SEQ ID NO: 20385
  misc_feature 1, 2, 1626, 1627, 1628, 1629, 1630, 1631, 1632, 1633, 1634,1635, 1636, 1637, 1638, 1639, 1640, 1641: n = A,T,C or G

SEQ ID NO: 23966 - DNA, 4699 bp, Homo sapiens; identical to SEQ ID NO: 23874
  misc_feature 1, 2, 3, 4698, 4699: n = A,T,C or G

SEQ ID NO: 23967 - DNA, 1641 bp, Homo sapiens; identical to SEQ ID NO: 20385
  misc_feature 1, 2, 1626, 1627, 1628, 1629, 1630, 1631, 1632, 1633, 1634,1635, 1636, 1637, 1638, 1639, 1640, 1641: n = A,T,C or G

SEQ ID NO: 23968 - DNA, 1214 bp, Homo sapiens; identical to SEQ ID NO: 20119

SEQ ID NO: 23969 - DNA, 2205 bp, Homo sapiens
  misc_feature 1, 2, 3, 2199, 2200, 2201, 2202, 2203, 2204, 2205: n = A,T,C or G
nnncgtccggtttcatagccttctccctgatacccctcaccagtgtcacatttgaagacgagcactgaggatgaggaaccaactgaagaatatgaaaatgttggaaatgcagcatctaagtggccaaaagtggaggatcctatccctgaatctaaggttggtgacacatgtgtttgggatagcaaggtagagaatcaacagaaaaagcctgtggaaaacaggatgaaggaggacaaaagcagcatcagggaagcaatcagcaaagccaagagtacagcaaatataaagacagaacaggaaggtgaggcatctgagaagagcttgcatctgagcccacagcatatcacacaccagactatgcctataggacagagaggcagtgagcaaggcaaacgtgtggagaacattaatggaacctcctaccctagtctacagcagaaaaccaagtgctgttaagaaattacataaatgtgatgaatgtgggaaatccttcaaatataactcccgccttgttcaacataaaattatgcacactggggaaaagcgctatgaatgtgatgactgtggagggactttccggagcagctcgagccttcgggtccacaaacggatccacactggggagaagccgtacaagtgtgaggaatgtgggaaagcctacatgtcctactccagccttataaaccacaaaagcacccattctgctgggaagaaagcccatgtaaatgtgaggagtgtgggaaatcctttagttataactcactacttcttcaacacagaactattcataccggagagagaccttatgtatgtgatgtgtgtgggaaaacgttcagaaacaatgcaggcctcaaagtccacaggaggctccatactggggaaaaaccatataagtgtgatgtgtgtgggaaagcctatatctcacgctctagccttaaaaatcacaaaggaatccaccttggggagaagccctataaatgtagctattgtgagaaatccttcaactacagctctgcccttgaacagcataaaaggcattcataccagggaaaaaccctttgggtgtgatgagtgtggtaaagctttcagaaataattctggccttaaagtacataaacgaatccacactggggaacgaccttacaaatgtgaagaatgtgggaaagcatacatctctctctcgagccttataaatcataaaagtgtacaccctggggagaagccctttaagtgtgacgagtgtgagaaggccttcatcacataccgaacccttacaaaccacaaaaaagttcatcttggggagaagccctacaaatgtgatgtgtgtgagaaatcttttaattacacatcgctcctttctcagcacagaagggtccacactagagagaaaccctatgaatgtgacaggtgtgagaaggtcttcagaaacaactcaagccttaaagttcataaaagaatccatactggggagaggccctatgaatgtgatgtgtgtggaaaagcctacatctcacactcaagccttattaaccataagagtacccaccctggcaggacaccccatacatgtgatgaatgtggaaaagcttttttctcaagcagaactcttataagccataaaagagtccatcttggggagaaacccttcaagtgtgttgagtgtgggaaatctttcagttacagctctctcctttctcagcacaagaggatccacacaggggagaaaccctatgtgtgtgataggtgtgggaaggccttcaggaacagctcaggcctcacagtgcataaaaggatccacacaggtgagaaaccctatgaatgtgatgagtgtgggaaggcatacatctcacactcaagtcttatcaatcataaaagtgtccaccaggggaagcagccctataattgtgagtgtgggaaatccttcaattatagatcagtccttgaccagcacaaaaggatccacactggaaagaagccataccgatgtaatgagtgtggtaaggcttttaatatcagatcaaatctcaccaagcataaaagaacccatactggagaggaatctttaaatgtgatatatgtgggaagttatagtggcacatcccagaagagaacctatgagggagggaatgccctggatgggggcaggatgaggatgcctctgtagcaggcagagcttaccaagtctctccgaactcaaannnnnnn

SEQ ID NO: 23970 - DNA, 559 bp, Homo sapiens
accacttggcacaatgcgagctacaggagactttgtgactgtgaaagatggagagattttttttttgggacgaaaagacagtcagatcaaacgtcatggcaaacgtcttaacattgaacttgtgcaacaggttgctgaagagcttcagcaagtggagtcttgtgcagttacatggtataatcaggaaaaattaattctcttcatggtgtctaaagatgcttcagtaaaagaatacatctttaaagaactgcagaaatatcttccaagtcatgcagtcccggatgagcttgtattgatcgactctctaccatttacatcccacggcaaaattgatgtttctgagttaaacaagatatatttaaactacataaacttgaagtctgagaataagctcagtgggaaagaggacctttgggaaaaattacagtatttgtggaagtctactctgaatctcccagaagatcttttgagggttcctgatgagtcactcttcttaaatagtgggggagattccttaaagtccatccggctcctcagtgagattgaaaaacttgttggt

SEQ ID NO: 23971 - DNA, 940 bp, Homo sapiens
  misc_feature 1, 2, 3, 938, 939, 940: n = A,T,C or G
nnngtgctcccgtgggtgtcgctgttctgtttgtgtggcaggtcgttgtgtctaggtgttcctccttctgttgctgtgggcagctcttatcatctagctctgtgtacgtcctcacatgggtagcctagctctaacctgtttcgcatcgttgttgtatgctgctccgggtgtagtcttccgtattgccgggtatctctgcccactcagcatctggcctgaccggtgctgcttcctacggggctcaagcacgtgatacatctatcagcgtggttaggattcgaaggctgcatgtgtacactgctttgatatacctctcatcattgcttctcctaagggccattgaatctctgagcacaacagggacccttggtagtcagtttcattagagtaaagagccaggttaattccagcccagcgaggaggctcctgaatcaaacagtccgcctcttccctccagagcttcttcaggctgacccccaggcagcctttctatcaggggaaagattggacagcccggcagttatcgacagagacggccgacaggacattgattgggactgcatctgcgagtctctttcatttccaagtaccagctatgagagagtgatggacgtgtcctggtgagattctgagtctcctggagctgagtgatacagagactcatgagcaatgtcctgcctgtctgcctcatgggcagggacagccatcagccccaatgatgttgctgacctttagaagaaaaatcatcataagctcagcatgcagcacctgattgaaggatctgtcgggggtcagattctttcccaagtcaagacaatggtgactgccatgtcagacttctgagacctgacccctcgtgctcgtatacatccacgcgtccgacgagactcgagagtttgttgttgtgtggtttgttgtttgttttgtgtgttgcgtcnnn

SEQ ID NO: 23972 - DNA, 848 bp, Homo sapiens
acgcgtccgcaaaacgatgacagtctgaaatctctctggtgccaacctccaaattctcgtctgtcacttcagacccccactagttgacagagcagcagaatttcaactccagtagacttgaatatgcctctgggcaaagaagcagagctaacgaggaaagggatttaaagagtttttcttgggtgtttgtcaaacttttattccctgtctgtgtgcagaggggattcaacttcaatttttctgcagtggctctgggtccagccccttacttaaagatctggaaagcatgaagactgggctttttttcctatgtctcttgggaactgcagctgcaatcccgacaaatgcaagattattatctgatcattccaaaccaactgctgaaacggtagcacccgacaacactgcaatccccagtttaagggctgaagctgaagaaaatgaaaaagaaacagcagtatccacagaagacgattcccaccataaggctgaaaaatcatcagtactaaagtcaaaagaggaaagccatgaacagtcagcagaacagggcaagagttctagccaagagctgggattgaaggatcaagaggacagtgatggtcacttaagtgtgaatttggagtatgcaccaactgaaggtacattggacataaaagaagatatgagtgagcctcaggagaaaaaactctcagagaacactgattttttggctcctggagttagttccttcacagattctaaccaacaagaaagtaccacaaagagagaggaaaaccaagaacaacctagaaattattcacatcatcagttgaacaggagcagtaaacatcgccaagtggctaaaggga

SEQ ID NO: 23973 - DNA, 362 bp, Homo sapiens
  misc_feature 356, 357, 358, 359, 360, 361, 362: n = A,T,C or G
accaactaatatatttctttttttttttttctttttcttacctattaacccactaaaatttctaatctaaaagcaatattcaagttacattttattacagaaattggaaagcaatttgcctgggaagcaaaatgttgatatgattcacgtgattttaacattaaatctaacttgtaacaaacaacggattatttatagataaataaattgagactattatttgcatagcacagaaagtcaaacatgacccacacatttatgcacatataattaatttcaataaaatgtttatatttatttcgaataaataaaaaaacataagaaatcattaaaggtacctgcccgggcggccgggnnnnnnn

SEQ ID NO: 23974 - DNA, 1641 bp, Homo sapiens; identical to SEQ ID NO: 20385
  misc_feature 1, 2, 1626, 1627, 1628, 1629, 1630, 1631, 1632, 1633, 1634,1635, 1636, 1637, 1638, 1639, 1640, 1641: n = A,T,C or G

SEQ ID NO: 23975 - DNA, 1022 bp, Homo sapiens; identical to SEQ ID NO: 23803

SEQ ID NO: 23976 - DNA, 1715 bp, Homo sapiens; identical to SEQ ID NO: 23747

SEQ ID NO: 23977 - DNA, 4992 bp, Homo sapiens
gagagatttggctctcgcccacgcgtccgggatcttgaggctggggttcagagcgcaagcagcgggttagtggtcgcgcgcccgacctccgcagtcccagccgagccgcgacccttccggccgtccccaccccacctcgccgccatgcgcctccgccgcctagcgctgttcccgggtgtggcgctgcttcttgccgcggcccgcctcgccgctgcctccgacgtgctagaactcacggacgacaacttcgagagtcgcatctccgacacgggctctgcgggcctcatgctcgtcgagttcttcgctccctggtgtggacactgcaagagacttgcacctgagtatgaagctgcagctaccagattaaaaggaatagtcccattagcaaaggttgattgcactgccaacactaacacctgtaataaatatggagtcagtggatatccaaccctgaagatatttagagatggtgaagaagcaggtgcttatgatggacctaggactgctgatggaattgtcagccacttgaagaagcaggcaggaccagcttcagtgcctctcaggactgaggaagaatttaagaaattcattagtgataaagatgcctctatagtaggttttttcgatgattcattcagtgaggctcactccgagttcctaaaagcagccagcaacttgagggataactaccgatttgcacatacgaatgttgagtctctggtgaacgagtatgatgataatggagagggtatcatcttatttcgtccttcacatctcactaacaagtttgaggacaagactgtggcatatacagagcaaaaaatgaccagtggcaaaattaaaaagtttatccaggaaaacatttttggtatctgccctcacatgacagaagacaataaagatttgatacagggcaaggacttacttattgcttactatgatgtggactatgaaaagaacgctaaaggttccaactactggagaaacagggtaatgatggtggcaaagaaattcctggatgctgggcacaaactcaactttgctgtagctagccgcaaaacctttagccatgaactttctgattttggcttggagagcactgctggagagattcctgttgttgctatcagaactgctaaaggagagaagtttgtcatgcaggaggagttctcgcgtgatgggaaggctctggagaggttcctgcaggattactttgatggcaatctgaagagatacctgaagtctgaacctatcccagagagcaatgatgggcctgtgaaggtagtggtagcagagaattttgatgaaatagtgaataatgaaaataaagatgtgctgattgaattttatgccccttggtgtggtcactgtaagaacctggagcccaagtataaagaacttggcgagaagctcagcaaagacccaaatatcgtcatagccaagatggatgccacagccaatgatgtgccttctccatatgaagtcagaggttttcctaccatatacttctctccagccaacaagaagctaaatccaaagaaatatgaaggtggccgtgaattaagtgattttattagctatctacaaagagaagctacaaacccccctgtaattcaagaagaaaaacccaagaagaagaagaaggcacaggaggatctctaaagcagtagccaaacaccactttgtaaaaggactcttccatcagagatgggaaaaccattggggaggactaggacccatatgggaattattacctctcagggccgagaggacagaatggatataatctgaatcctgttaaattttctctaaactgtttcttagctgcactgtttatggaaataccaggaccagtttatgtttgtggttttgggaaaaattatttgtgttgggggaaatgttgtgggggtggggttgagttgggggtattttctaattttttttgtacatttggaacagtgacaataaatgagacccctttaaactgtcttattttccaccagattgagaaccagatgttctctacacactatcactgttcaatagagctttcttcagtgatggaaatgctctgtaatctacactgttcagtacaggtagctacagagcatctgaaatatggctagaaactacatttttgttttgattaatttaaatagccatacagttgctaccatactggtcacggcagctgtagactgactgggtccatagttcatcacctcaaaattctttcaaaatttattatctctttctctccttacatgtttatttcccaggcctaccctggtgattagaacagctgaagggcctttcttgttaggctgtccatgccctaaggatgggttcctgtttatccttgccacgcagctgagcttactgcatgtttatatctcccaaggactgttctctgctcagaaatgccctgtcaagggtgtggcatcacgcagtttcatccaagttgtttcaggaattgctgacactgctgggtgcagttctatcccctaaagcctagggtgtggccctttaacttccccttcagtagaactgggaaaggcagtaccattcctagttatgagtgaagcatccactttcttttgtaacaatgaggaacagaaaggataagactgaagagtgatcttttgtccaactaaaccatttatctccttttgtaggtaaattcaaatcctgcccagttatagttttcagtcactggagaattccaggtaggagccctactttaggtgatcctaggaactcctatgttcagaaaagaattttcttcctactatataattacagtatttagctgtcaattttaagatgaatttggtagagccttatagtaaagtatgtatcttggtcacacacaaagcttggaaaaagtaaaagatgtctaaaccataatcttgtaactcataacatctgggctggggcccggggatctaattgtttagagagccccaaaagtggctcagatgtaaagccagggttaagaaccatctgccttggaagatttaagggaaacatataaacttgtacaaaggacacagaagcagtcagttttaattttttagccatgttggtaaaagttcattttcagtacatgggtaacacccaggccctttcccattatatccaggtatgctacaagttcttttaactcttatcagaagttattattactgtttccttagagaggctaccaggctaaaattcacttagtttggtttgtctaatgtcctcattattttatcctgaagatgatgtcatttctcaggacttgaaaatgacttggctgaactaaaggtaaaaaagccaagcctctgtcacttttcctagactcctaggcacagctatggagtctttgcacagtgcccataccctaaaaattaataatgaaaaccaaacctcaagaacctagagcagctctctacttgccaccatggactccagtggtcagcataagaaaagcagatagttgcattctatttagtttatagctgctttgttcctttgtgtttcactaagcagaggctcaaaaattcccttgataacttcagctgcccctgttcttttcctcaaactccaggatgagacctttaatgtgggacaatttctggtgaaggtactcacagcgacgcttttcttctctgtaacttgggtactgctgcagagaaaaagcatccatgtcaaaaagtaaaaattctcattctaccttgcttccgttcccagaccttgtcttaccttcctgaactttttatattcctggattatcttgtcttccaggaccttgtattctggagttcctcgccgaactcttttaatctctgctcccagctctatgaacctttggcttgcagtcccaacacgggcatgcaggatgcggtattcagcataatctgtctcaaagtcctgctcataggcatgttgctgttctgcactgtggatggccctgtattgcaggaggtagtctggtatatcttcaggacttggggattcagaatcttcttgaactgaggaactgtgttctaatctggggtccatgtcctcatcttcttgctcccaatcttctccctcttgtaaatcctgattggtcaggccttgtagggggcttggcactaaaggcagagttctgaacctcttttcttccagttctacagtggctacaggcactgaacgtttcttgtccagacgtttccggctggcagaggaaggcagtgcctgaacaggttctctgtttggaacatgggtctggcttctcacttcccactgtgccatgtgctcccttgaggatcctgggagtgactgtccttggttgcttgccagtggatctgacgctgacacctcctctagtgccatctgtggctgtgatactgcatctccttcagaatagcctcctgtgttctgccaactctcaggatgtctggcatcttcagtcaggttgtgtccccgaactgatgatggggctgggatagaatccatggctgcccaaataatgaggcgctccctgagtgagcccaggcagtggaggctgttaggcccagacctgaggaagcgttggcacacaaggtccaagctaccaccagcgccctcctgacaacactgggacactatgaaggagaagaggcaggaccaaccagggcctgggagtctcagataccctcggtggccttggaaagcaatcaccggccgtacctgttgccgctgacactcttgcagcgcccgcagggcagcgtcgttgagcctgagcagtaagaggctagtccgggcagcttgcgtgaagcagagccggagctgtcctctcagaggctcctggagctcctccatggcgacgagttcgagtgcaagcagcacgggggccacaggcgagggccaccaccgccacctcctctgttcagggtttggttggcacacccggtaacccacgtctgccccaccctccgccaggaacccgcccccggccccacctcccgccagcggacgcgtggg

SEQ ID NO: 23978 - DNA, 2636 bp, Homo sapiens
  misc_feature 1, 2, 3, 4, 5, 6, 2636: n = A,T,C or G
nnnnnncagtgacagcagccatgcatttcagaatgatgagttagtttttgttcttggccaggtgaccgcttcaggtctgtcatagatgatgcctggtggtttggaacaatcgaaagccaggaacctcttcaacttgagtaccctgatagtctgtttcaatgctacaatgtttgctgggacaatggagatacagaaaagatgagtccttgggatatggagcttatacctaataatgctgtatttcctgaagaactaggtaccagtgttcctttaactgatggtgagtgcagatcactaatctataaacctcttgatggagaatggggtaccaatcccagggatgaagaatgtgaaagaattgtggcaggaataaaccagttgatgacactagatattgcctcagcatttgtggcccccgtggatctgcaagcctatcccatgtattgcacagtagtggcatatccaacggatctaagtacaattaaacaaagactggaaaacaggttttacaggcgggtttcttccctaatgtgggaagttcgatatatagagcataatacacgaacatttaatgagcctggaagccctattgtgaaatctgctaaattcgtgactgatcttcttctacattttataaaggatcagacttgttataacataattccactttataattcaatgaagaagaaagttttgtctgattctgaggatgaagagaaagatgctgatgtgccaggaacttctactcgaaaaaggaaggaccatcagcctagaagaagattacgtaatagagcccagtcttacgatattcaagcatggaagaaacagtgtgaagaattgttaaatctcatatttcaatgtgaagattcagagcctttccgtcagccggtagatctccttgaatatccagactacagagacatcattgacactccaatggattttgctaccgttagagaaactttagaggctgggaattatgagtcaccaatggagttatgtaaagatgtcagacttattttcagtaattccaaagcatatacaccaagcaaaagatcaaggatttacagcatgagtttgcgcttgtctgcattctttgaagaacacattagttcagttttatcagattataaatctgctcttcgttttcataaaagaaataccataaccaaaaggaggaagaaaagaaacagaagcagctctgtttccagtagtgctgcatcaagccctgaaaggaaaaaaaggatcttaaaaccccagctaaaatcagaaagctctacctctgcattctctacacctacacgatcaataccgccaagacacaatgctgctcagataaacggtaaaacagaatctagttctgtggttcgaaccagaagcaaccgagtggttgtagatccagttgtcactgagcaaccatctacttcttcagctgcaaagacttttattacaaaagctaatgcatctgcaataccagggaaaacaatactagagaattctgtgaaacattccaaagctttgaatactctttccagtcctggtcaatccagttttagtcatggcactaggaataattctgcaaaagaaaacatggaaaaggaaaagccagtcaaacgtaaaatgaagtcatctgtactcccaaaggcgtccactctttcaaagtcatcagctgtcattgagcaaggagattgtaagaacaacgctcttgtaccaggaaccattcaagtaaatggccatggaggacagccatcaaaacttgtgaagaggggacctggaaggaaacctaaagtagaagttaataccaatagtggtgaaattatacacaagaaaaggggtagaaagcccaaaaagctacagtatgcaaagccagaagatttagagcaaaataatgtgcatcccatcagagatgaagtacttccttcttcaacatgcaattttctttctgaaactaataatgtaaaggaagatttgttacagaaaaagaatcgtggaggtaggaagcccaaaaggaagatgaagacacaaaaattagatgcagatctcctagtccctgcaagtgtcaaagtgttaaggagaagtaaccgaaaaaagatagatgatcctatagatgaggaagaagagtttgaagaactcaaaggctctgaaccccacatgagaactagaaatcaaggtcgaaggacagctttctataatgaggatgactctgaagaggagcaaaggcagctgttgttcgaagacacctctttaacttttggaacttctagtagaggacgagtccgaaagttgactgaaaaagcaaaagctaatttaattggttggtaacttgtaccaaaatattttacttcaaaatctataaagcaggtacagttaaggaataagtagaactaaggcttctgcttccttgctgctgtggtggagtagggaatgttatgatttgatttgccaacacaacaagccgagcacaaaaggaggggcagagcgcaaaaagacccccaggagagccacagatcagcgacccccagatcttgcgacaaggcgccaaaggacggccaacagcgcaggaggccgcacaaaagcgcgcacgcaaaaaggagaaagaaccgtgcgaacacataacgcggggcgacaggggcaan

SEQ ID NO: 23979 - DNA, 340 bp, Homo sapiens; identical to SEQ ID NO: 23869

SEQ ID NO: 23980 - DNA, 1022 bp, Homo sapiens; identical to SEQ ID NO: 23803

SEQ ID NO: 23981 - DNA, 772 bp, Homo sapiens
  misc_feature 772: n = A,T,C or G
ggatcttcattaatgagaagacattcataaccagactgaagatggcaaactaattgttgaaggaatgctggacattttctggggagtaaaacgacctatacagctaaaaatacaagatgagaagccattctcttcttttactagtatgaagtcatcagacgtcttctccagcaaaggaatgacacgctggggggaatttgacgatctctatcgtattagtgagctggacaggacccagattcctatgtctgaaaaaaggaattcccaggaagcaacaccctgaagccacatgcaaaggatgaaccagactccccagtgctctatagaaccatgagtgaagcagctctggtgagaaaaaggatgaagcctctgatgatggacagaaaagaaagacagaaaaatagagcctctattaatggacacttctataaccatgaaattgaaaatagtccccaggattttgctcttcacattatttttgcaacaggagaacaaagacgactaaagaagacagacattccgctactgcagaggctcctacagggaccttctgaaaagaatgctcgcattttcctcatggataaagatgcagaagaaattagcagtgatgtggctcagtacattaactttcacttttctctcttggaatccattcttcaaagattaaatgaagaagagaaaagagagattcaaagaatagtaacaaaattcaataaagaaaaggcgattatactgaaagtcttcaaaatatactagtaataaaaacgagccn

SEQ ID NO: 23982 - DNA, 1380 bp, Homo sapiens; identical to SEQ ID NO: 20118
  misc_feature 1380: n = A,T,C or G

SEQ ID NO: 23983 - DNA, 590 bp, Homo sapiens
  misc_feature 584: n = A,T,C or G
cactttgtcacgcaaaagttttcatgttactctctggaaaggcacttcccaagatgtagctaataaacactgtatctttggaacatttttgttttccttttaacttgtagctcctagcctggaaattgatacttttgacacttgaacgttgttcatataaaaacactgtgaaatcaacatactgtctttgaggaatggcattgcatgcgtccttttgagaagccatcttgtagttgaaggaaagcagcaggacggaaaccagacttcccccccacggttccctaaaggtcacggataaagaatgaaaaaccgggactagttaagccaaggagagaagagcaagtgttcccggaagggggcgcgatgtgttgaggttaacaaagagaaagacagctgcggggtcagctaaggtctccgctttcgctaccgacccagactgctcaccttcacaaactcacgttttcctcaagcggcaccctcggcagcgctcaagtgagagtattccatccttggaatactccgagaaggttcgagccagaagttggattgcctgaaatgccgcttccagcgcactaagtaactcnggacgc

SEQ ID NO: 23984 - DNA, 1231 bp, Homo sapiens; identical to SEQ ID NO: 23782
  misc_feature 1, 2, 3, 9, 12, 15, 23, 27, 32, 35, 52, 1227, 1228, 1229,1230, 1231: n = A,T,C or G

SEQ ID NO: 23985 - DNA, 2551 bp, Homo sapiens; identical to SEQ ID NO: 22616

SEQ ID NO: 23986 - DNA, 1490 bp, Homo sapiens; identical to SEQ ID NO: 21073

SEQ ID NO: 23987 - DNA, 3881 bp, Homo sapiens
  misc_feature 1, 2, 3, 3863, 3864, 3865, 3866, 3867, 3868, 3869, 3870,3871, 3872, 3873, 3874, 3875, 3876, 3877, 3878, 3879, 3880,3881: n = A,T,C or G
nnngacaagagacattccagcccaccacttcccaagtaaagaattaaaatgcagcatgatggctaaggcaagggcctgcagaagaatgtaaaggagggaggaagagcaggggattcagagcaggaaggaggagacagtactgtctatcccgcagacgtggtgctctttgaagggatcctggccttctactcccaggaaaggtacgagacctgttccagatgaagctttttgtggatacagatgcggacacccggctctcacgcagagtattaagggacatcagcgagagaggcagggatcttgagcagattttatctcagtacattacgttcgtcaagcctgcctttgaggaattctgcttgccaacaaagaagtatgctgatgtgatcatccctagaggtgcagataatctggtggccatcaacctcatcgtgcagcacatccaggacatcctgaatggagggccctccaaacggcagaccaatggctgtctcaacggctacaccccttcacgcaagaggcaggcatcggagtccagcagcaggccgcattgacccgtctccatcggaccccagcccctatctccaagagacagaggaggggtcaggaggcactgctcatctgtacatactgtttcctatgacattactgtatttaagaaaacaccatggagatgaaatgcctttgattttttttttctttttgtactttggaacgacaaaatgaaacagaacttgaccctgagcttaaataacaaaactgtgccaactactactggtgatgcctaattatgaatccaacgtgtaaccagttataaatacatatatatataaaaaaggatctatttttgtgtaaatgtacaaatactgtaaagctgtttgccataagtattttgcaggagggtctgtacttgagtgttttaggactggagctggaatttcaccaaggggaaattgcctgttgtgtcccagggtggggaggctcgggcatctgtgagagacagggagggtggctaaggtccagttgcttttgagtgccccgtggaacttgatgggaatggggttggaaaaccttgattgcctcctctgtcacatgccactcttggagctggagcttagtgatatgtcaatgagagatactcttgtctttgttcgtttactctttccttcatttttcgagttgaaattaggtaaaatctcaactcaaaaatcaaactcagggaagaggcccactgaggagaacaagtcttctgcattttcttcctgccctgctcccaccttctcgcctctggctgcttggatagcttggtgactccttcctcaccctcctgcttctctgtctctccaagaagccagagctgcctctttccttccctggaagagattttatgggatcgcttcctgatagaagatgggaaggagagggcagaactttgcctgctgtcatatctgaagaatcactggttctttctgcatcccaggggcgtaactgatctgactccttgggctttttcctgtattgtggaatatagagtggaccattgcaggctgggtgtgggtgagggcttcggtaactgatgccggcagcagcgcctcatggagtggcaggggagctctgtctgtggaggggtagtagtttccgcttcctggaggtttgcagtgaggtgaggagagtaactttggtcagggattctcactagcagcgtcatggccaggatgctttacttatttgcaataccacctagtggatatggcaactgcagagcataaaaggggctcggaaaagcagtttttacaaagtatttaaaaggagagtatttaaatcataggtacctaagttggagcctgaggttgaaatatttggggtggagatttctagctttcctgagagctgctgcttggtggtagtgttttctctggaagtacagattcctgacattctgggtggaggggagcccaagtgagcctgaaggagttctgattatagagtcccgagcctcagtttctgactgcagaagagccagagatgttcatttcattgttgaccaccctagtgcttggtggactgtgcccttagctatcccactgtggctgccattgccagaaacattttggagaaccttttcttcccattgctctcagagcctgttcgagccattcaggtaaattggtctccattattacctggtcacaccagattttcccccagactcagcaccatccagtctgattccccgtttctgggctcagtttgactctaaatctgttttgctattttaaaaagtcaaacctggtccccagcagagcttgccacccggagactttcaggagaccgtgcaggctctgaagggagctcccagtcacagcagccgcctacttggagcaagggaaggctcccaagatgcctcctttgaaagccggtgctcaccaagatcagttcaggatcaatcattatccttgtagtcatgccttgatcagttctgagatgaagcagggaatgcaggcctgggttagcatcctgaggacacagggcccctggccttgatggcactgggccgtgctcaggtgaagcccacccgtgtctgggagagccttggcttttcagtgggcagcatgctcaactttacttgaagctcccaggtgccaaaccatttagtgccttggctgtttatcccactgccttggaagatggactcctctcatctctgagcctttacctagctgcttcctcatctacctgtggtgttgggaccaagcctccaatatctctgaatagcccactcctagcttggaaacagctataagggctgccctgccccttgtcaaatgatcaccaattcttggtggcttggctggggacaatgaacagtgtctgctggggtctgtgacacactgtttctggaacaaggaagggatggaaggctctacccctccgtggcagcccagcatttggccaactctgtatctgaacttgagctttctatggaacaaacaatggtcttagttttttaagagcctctgggtctctgattccatggagagtcaggagtagaattagtggaccagaaaccatgacatttgccatctaggtactctgctgttcagggtggaggcacagatgagcagagtggggtgatgttggttgtatgtgcatagaagtcccctggctccagagccatccagtggtgcttggttctctcttcctgcccaggtattgtgtgtggaccaagtgtttaggaaacaagcatagaagcattatgtcacaggaaggcctggcctctcactccttcacactaatgagccttctactgacccaagtttctttttctcgggcagcctgggaccactatgagcagagagatgggagtctgtgtaagaaggatgcaagtatcctttgatttggagtggacagagcaggtccttgcaaaggcagtgggttaaacaacgggatgtctgtgggacaggccagggaaggagggcagagacagggtctccagttcaccttgccgcagaactagcctaatcgtccctgcttctggtcttggccacttggcaatcatggggaagttgactccccgcctcacttgggcttggagctggatactcgtggccacgcccaggataggttgccagagtttcattaggccgctgggtcgggctggaggcttgtggtaacctgggagaagcggcagaggggcggaagcggggtggtatgactcctggctgtgattctgattagaactgacggaggcccaggtgggaaggcctgggaatcccggcgagcaggcggaatcggcaaagggggggctgggggggggagagcagagggtacagcactgggggggcacaggggggagccattcnnnnnnnnnnnnnnnnnnn

SEQ ID NO: 23988 - DNA, 1214 bp, Homo sapiens; identical to SEQ ID NO: 20119

SEQ ID NO: 23989 - DNA, 920 bp, Homo sapiens; identical to SEQ ID NO: 20829
  misc_feature 1, 2, 3, 4, 5, 6, 7, 8, 9, 10, 915, 916, 917, 918, 919, 920: n = A,T,C or G

SEQ ID NO: 23990 - DNA, 6121 bp, Homo sapiens
  misc_feature 346, 347: n = A,T,C or G
acaaggcaaatttaagtaggctcatggcttttccagttgggttggaaagttcctctccgatgactgttatattctcaaagaaatatgaggagaggggcagggcatggtggctcacatccgtaatcctagcaaatcatgagtgcctacagccaacgccttcttcgctcactggccaactggaaacttcagtccccccatgcctcccgcctctcacccaggggccaataggaatgatcagaggttcgcaacttagtgtcatcaagcatagtaattgcaattggctattggagctgtcgatcgtggagtatgcggggccgtccagcttgcctatataagacgaggacannacgccgccgcctgtgtcatccgccattttgtgagaagcaaggtggcctccacgtttcctgagcgtcttcttcgcttttgcctcgaccgccccttgaccacagacatgtctcgggatcggttccggagtcgtggcggtggcggtggtggcttccacaggcgtggaggaggcggcggccgcggcggcctccagcgacttccgttctccgccgcccggcatgggcctcaatcagaatcgcggccccatgggtcctggcccgggccagagcggccctaagcctccgatcccgccaccgcctccacaccaacagcagcaacagccaccaccgcagcagccaccgccgcagcagccgccaccgcatcagccgccgccgcatccacagccgcatcagcagcagcagccgccgccaccgccgcaggactcttccaagcccgtcgttgctcagggacccggccccgctcccggagtaggcagcgcaccaccagcctccagctcggccccgcccgccactccaccaacctcgggggccccgccagggtccgggccaggcccgactccgaccccgccgcctgcagtcacctcggcccctcccggggcgccgccacccaccccgccaagcagcggggtccctaccacacctcctcaggccggaggcccgccgcctccgcccgcggcagtcccgggcccgggtccagggcctaagcagggcccaggtccgggtggtcccaaaggcggcaaaatgcctggcgggccgaagccaggtggcggcccgggcctaagtacgcctggcggccaccccaagccgccgcatcgaggcggcggggagccccgcgggggccgccagcaccacccgccctaccaccagcagcatcaccaggggcccccgcccggcgggcccggcggccgcagcgaggagaagatctcggactcggaggggtttaaagccaatttgtctctcttgaggaggcctggagagaaaacttacacacagcgatgtcggttgtttgttgggaatctacctgctgatatcacggaggatgaattcaaaagactatttgctaaatatggagaaccaggagaagtttttatcaacaaaggcaaaggattcggatttattaagcttgaatctagagctttggctgaaattgccaaagccgaactggatgatacacccatgagaggtagacagcttcgagttcgctttgccacacatgctgctgccctttctgttcgtaatctttcaccttatgtttccaatgaactgttggaagaagcctttagccaatttggtcctattgaaagggctgttgtaatagtggatgatcgtggaagatctacagggaaaggcattgttgaatttgcttctaagccagcagcaagaaaggcatttgaacgatgcagtgaaggtgttttcttactgacgacaactcctcgtccagtcattgtggaaccacttgaacaactagatgatgaagatggtcttcctgaaaaacttgcccagaagaatccaatgtatcaaaaggagagagaaacccctcctcgttttgcccagcatggcacgtttgagtacgaatattctcagcgatggaagtctttggatgaaatggaaaaacagcaaagggaacaagttgaaaaaaacatgaaagatgcaaaagacaaattggaaagtgaaatggaagatgcctatcatgaacatcaggcaaatcttttgcgccaagatctgatgagacgacaggaagaattaagacgcatggaagaacttcacaatcaagaaatgcagaaacgtaaagaaatgcaattgaggcaagaggaggaacgacgtagaagagaggaagagatgatgattcgtcaacgtgagatggaagaacaaatgaggcgccaaagagaggaaagttacagccgaatgggctacatggatccacgggaaagagacatgcgaatgggtggcggaggagcaatgaacatgggagatccctatggttcaggaggccagaaatttccacctctaggaggtggtggtggcataggttatgaagctaatcctggcgttccaccagcaaccatgagtggttccatgatgggaagtgacatgcgtactgagcgctttgggcagggaggtgcggggcctgtgggtggacagggtcctagaggaatggggcctggaactccagcaggatatggtagagggagagaagagtacgaaggcccaaacaaaaaaccccgattttagatgtgatatttaggctttcattccagtttgttttgtttttttgtttagataccaatcttttaaattcttgcattttagtaagaaagctatctttttatggatgttagcagtttattgacctaatatttgtaaatggtctgtttgggcaggtaaaattatgtaatgcagtgtttggaacaggagaattttttttttcctttttatttctttattttttcttttttactgtataatgtccctcaagtttatggcagtgtaccttgtgccactgaatttccaaagtgtaccaatttttttttttttttactgtgcttcaaataaatagaaaaatagttataatattgatcttcaactttgccattcatgcttctatgcatattaggctacgtattccacattgaaagcatgagagtgtctaggcctttgaatggcatatgccatttctgggaaatgcatctggaggctaagtattgctttctacaaataattgccccctttgttttaaaaagaagaaatgcatattgaagtagtttgatgatttgtttggcatataggaagcacgctggtgctaagtattttttaaatggttatgtaagcaaagctgaactgtaaatcttcaggaatatgtattaagattgtggaatgggtgtaagacaattggtagggggtgaaagtgggtttgattaaatggatcttttatggccctatgatctatcctttacttgaaagcttttgaaaagtggaaaggtcattttgttgcatttccccatttcttgtttttaaaagaccaacaaatctcaagccctataaatggcttgtattgaacttttacatttgaattaaagatgttaaacatgaagtcttttcatgtattcaagtgatttataaagatggggtgtagtctaaaaaacaaaacttgaaagtaagaaggtttagtaactgggccgggcgcggtggctcacgcctgtaatcccagcactttgggaggctgaggtgggcaaatcatgagatcaggagttcaagaccagcctggccaacatggtgaaaccccgtctctactaaaaatacaaaaaattagctgggcgtggtggcaggcgcctgtaatcccagctactcgggaggctgagccaggagaattgcttgaacctggagatggaggttgcagtgagctgagactgccactgcactccagcctggacaacagagcgagactctgtctcaaaaaaaaaaaaaggtttagtactgaagtaggtttagttatatatacatttgtactctgtaacttttacatctccttgtgctacttctgttgggcaaaatctataggactataaaaatctattggttctcttctaagagctagtggtgattgttaacaaatagggttgcagataatcattcttattgtaaatttaacttgttttcacatagtttcgttttcatgtagcactaaatctggagaaagttgctcatgctacacagtacaaatatcccttcctcccaccataaaggcttggaatgtttccatggtgttgtcagttaattgtcaacttcattgaacccccttccattagaacaagagactttgactattaaagtagattgtttattgttgcctgttagtataatgggagcctgatttcccagtgtaaatatgttagaggaacagcttcctaacagtaggtaaagtaattgaatggtttggctttgttctgagttacgttccattcaaatctgtacattgtagaattcttactatggaatgtgtcttcctccttttcacctcttttcttggtgctaattggcaaaagaaaaattctaagtcaaacctttattaacatgctgaagtttagtattgtgccctgtgtacaaaaggagacctattgttggaacaatctgagcactttctgcataggaaacaggataatgctgaaagtaaacactagtgtataaaagcatctcaccaaatactggttgtatgactgacaggtacatggtgtgctaagggagagaatctcattagaaagtaatgctcattatatcattcaccagcacactcggaaatatgagtagttttaccatgattatatcagtgaggaagttttgtccccaaacaggttattaattggtgatacataagagattttctgtacggaaacaagggtcttgattagaaaggaatccattacagtttggttgaattatatagtagggactctactaaagacaagaaaataaggggtgttccatgggacacccacagagggtgaaccttgaatgtgtgtgggtgggggctggtcgggaaatgggaaaatctgcctataaaattaatgtttcagtttatttttcagattacatgcctttctttataagggatgctggcacagaccccctaaaataagcttttggtagtactgtacctttgaagagtggtgaaggatgctaatggataatctcctgaaagttgtggcttttgatacccttactgtggactgtagagttgctaaacgttgtttagcaaataatgttgcttagtttcaaatgacatttgactttcatcactaaaacagcaatgtactcagggttgtaagcttactcaaatagactttcaataagtcttcaatgtatatatgatagtttttagcctaatgtgaatttaaataatcttaatagtttcctaaaagtcgatctgaaacttggggtgggaaaggggaggtagcaatttttgaagtattttagccattttttttcatttaaagaaaccacttgtccccatttcctcttctccactttctcataattttgttttaagaggaacactggttgttttttatacttctcctaatctttaaaaactgcatattgttaagaccccagtgtatttaataggtattttataagcatagcccattggctcatgttagtgaaaccataatcctctttgcttagaacattaaactcataagaagtactacaaaccccaccactctttatagatgtattgtaccactaatataaacagctaaaaaatggggaaattgtaatgttacgcctgtgcaatttttaagtggcatattatggcagattaaaatttagatacttggcttttcttgggcaagccactaagttgtggcggaatgttttctggtgttcttggactgcaattatgcactattaaagtagtggcctgctacataactgcatttagccagcatttctgcagtgcgtaactgtgaggaacgtagtaccgcaaatggcaatggacattaggacccggatgtagtattcctgcttgctccaagattctcattgccgactgcatacaggtaagaatgattgatgttggctgatattggagtgctcattcacatgaagtggatagatacttctcaagacatcacacagcgtgagtcaatcaaggagggaagccacaagcagactgacaacgtttctagcaggatcaggtgagctgtgtccagaaaaccaacgagaaggagtggaaggaggaatgaacgtttcattctcgttaataaaggcattatcct

SEQ ID NO: 23991 - DNA, 439 bp, Homo sapiens
  misc_feature 1, 439: n = A,T,C or G
naggtactagctcctgtcctgctgtctcaggacctttcagttcaagcatcctcctaacctgagtctctgtgtctcttacctcaaattctctctctcaaaaaaaaaaaggtgggggggattggctgggccagaatttggcccaaagccaccactggtctgtggtgaccaggagcaataccatatgatttcccaggccccaccctttcagcaagaggctggaatttggggggagggtcgtgatgtttcctactaactggccattagctggatcatcatttccaaaggaatctaatacaataatgtccccaaaaagcagtgaaggatacagagaccacaaaatagatccacaacatgggacagagtgtcattggcctcccaacagtttcacaggaaccccttggatgctgcagagcatgggtctctggggactggaggagcn

SEQ ID NO: 23992 - DNA, 1231 bp, Homo sapiens; identical to SEQ ID NO: 23782
  misc_feature 1, 2, 3, 9, 12, 15, 23, 27, 32, 35, 52, 1227, 1228, 1229,1230, 1231: n = A,T,C or G

SEQ ID NO: 23993 - DNA, 351 bp, Homo sapiens
acttcagaaggatggaagctgaattcagaagggaggaatgagaaggaaaagttgctaagaaatcgataaacacatagataaatctaaattaagcatagccattaaaaatcagtaacaacaatgatatgaggatgattaactgagatgactgaaagcaaggtgaagctaaaatataaaaaagtatgtaggatgagctggagggtgcatttacttgcatttctagcattggataggaggagattagagatgctgattggcattaaactcgagttaacactgcagacaaccagggatagtcgtatgtaacttctgagccagtagaacagaagtaacactgaagaaagttcagtg

SEQ ID NO: 23994 - DNA, 2506 bp, Homo sapiens; identical to SEQ ID NO: 20323
  misc_feature 2503, 2504, 2505, 2506: n = A,T,C or G

SEQ ID NO: 23995 - DNA, 4219 bp, Homo sapiens
  misc_feature 1, 158, 4217, 4218, 4219: n = A,T,C or G
nacgtcctgcctcgcttcgagacccacactgtgtatctgctcaccgtggcggctggctgtgtcagccccgccttagcgtctttttctcaaagccgtgtaaccgctgacaattctggtccgaggccaatccctgccctgacagtggagggatggttgcntccatctaaccgactcctgtaagctttggattcatgacggggtgaccatgacacggtgaggttacgaagaacatgcccaaccacttgtccagggcctgggtggcaggaaacctcggcttgggacggaaagggaatcatggttctcaaggcaggcatcattacttccgccacggtgggacagctgccctccctggagcctcaggatgtctctcttgctgactccaggggccatctttggagagtataggttttataaataagtcctgaaaccatgtcatcgcctatgtcgatgccacgattcacgaggccaccagaagagttgggcacccagtatgtcctcttcctagtcattttcagttcctgccaattcgggaggctctcctagagagcagcgcgaagccatggcttttgggcccggggacggaccgtagcgcgtagccggaagcggaggcgtggaggcgggtctgaggtttggtgactgcggggcaggccgggggcagctgtctgtctggctctttttgacagcccccagtgcgaaaggctgccagcatgtcatcagtgagccccatccagatccccagtcgcctcccgctgctgctcacccacgagggcgtcctgctgcccggctccaccatgcgcaccagcgtggactcggcccgcaacctgcagctggtgcggagccgccttctgaagggcacgtcgctgcaaagcaccatcctgggcgtcatccccaacacgcctgaccccgccagcgacgcgcaggacctgccgccgctgcacaggattggcacagctgcactggccgttcaggttgtgggcagtaactggcccaagccccactacactctgttgattacaggcctatgccgtttccagattgtacaggtcttaaaagagaagccatatcccattgctgaagtggagcagttggaccgacttgaggagtttcccaacacctgtaaaatgagggaggagctaggagaactatcagagcagttttacaaatatgcagtacaattggttgaaatgttggatatgtctgtccctgcagttgctaaattgagacgtcttttagatagtcttccaagggaagctttaccagacatcttgacatcaattatccgaacaagcaacaaagagaaactccagattttagatgctgtgagcctagaggagcggttcaagatgactataccactgcttgtcagacaaattgaaggcctgaaattgcttcaaaaaaccagaaaacccaagcaagatgatgataagagggttatagcaatacgccctattaggagaattacacatatctcaggtactttagaagatgaagatgaagatgaagataatgatgacattgtcatgctagagaaaaaaatacgaacatctagtatgccagagcaggcccataaagtctgtgtcaaagagataaagagactcaaaaaaatgcctcagtcaatgccagaatatgctctgactagaaattatttggaacttatggtagaacttccttggaacaaaagtacaactgaccgcctggacattagggcagcccggattcttctggataatgaccattacgccatggaaaaattgaagaaaagagtactggaatacttggctgtcagacagctcaaaaataacctgaagggcccaatcctatgctttgttggccctcctggagttggtaaaacaagtgtgggaagatcagtggccaagactctaggtcgagagttccacaggattgcacttggaggagtatgtgatcagtctgacattcgaggacacaggcgcacctatgttggcagcatgcctggtcgcatcatcaacggcttgaagactgtgggagtgaacaacccagtgttcctattagatgaggttgacaaactgggaaaaagtctacagggtgatccagcagcagctctgcttgaggtgttggatcctgaacaaaaccataacttcacagatcattatctaaatgtggcctttgacctttctcaagttctttttatagctactgccaacaccactgctaccattccagctgccttgttggacagaatggagatcattcaggttccaggttatacacaggaggagaagatagagattgcccataggcacttgatccccaagcagctggaacaacatgggctgactccacagcagattcagataccccaggtcaccactcttgacatcatcaccaggtataccagagaggcaggggttcgttctctggatagaaaacttggggccatttgccgagctgtggccgtgaaggtggcagaaggacagcataaggaagccaagttggaccgttctgatgtgactgagagagaaggttgcagagaacacatcttagaagatgaaaaacctgaatctatcagtgacactactgacttggctctaccacctgaaatgccgattttgattgatttccatgctctgaaagacatccttgggcccccgatgtatgaaatggaggtatctcagcgtttgagtcagccaggagtagcaataggtttggcttggactcccttaggtggagaaatcatgttcgtggaggcgagtcgaatggatggcgagggccagttaactctgaccggccagctcggggacgtgatgaaggagtccgcccacctcgctatcagctggctccgcagcaacgcaaagaagtaccagctgaccaatgcttttggaagttttgatcttcttgacaacacagacatccatctgcacttcccagctggagctgtcacaaaagatggaccatctgctggagttaccatagtaacctgtctcgcctcactttttagtgggcggctggtacgttcagatgtagccatgactggagaaattacactgagaggtcttgttcttccagtgggtggaattaaagacaaagtgctggcggcacacagagcgggactgaagcaagtcattattcctcggagaaatgaaaaagaccttgagggaatcccaggcaacgtacgacaggatttaagttttgtcacagcaagctgcctggatgaggttcttaatgcagcttttgatggtggctttactgtcaagaccagacctggtctgttaaatagcaaactgtaggtccaaatctcaattttttagaattttaagttatgaagtgctcaaaggtactgacacagttgattttattcacaccattaggggtatgcaagatgtccctgttttataaacataatcacaacagtaataaacctcaagtagtggctagtgtttagtatagaaatataagatgttgatttagtaaactgataaaaatcgaattcttgtctttttagtgggatccttactgtccctggaaagatatagcatagtggttctcagcacagtctccagaacagaagcatctgtagtacctggtaacttgttagaaatgtacattctcaggctccacagcaggccgcctgaatcaaatcctgggaggtggggacagaaatctgtgttttaagaagccttccaggtaattctgctgcacactcaagttcaggaaccaccggtatagaccattaccttagtggatttacctgtagagtttattggatcctgaaaccaatcaattacttagaactaggcaaagatgaaagtatagccaactattcttggctatatatatatattcaagtgggccgggcgtgatggctcacacctgtaattccagcactttgggaggtcgaggtaggcagatcaccgagcccaagagttcaagacaatcctggccaacggcgaaactctgtctctacaaaaaatatacaggcgtgttagcatgtgcctgtaatcccagcttcttgggaagctgaggcacaagaattgcctgaacccaggaggtggaggttgcagtgagctgggatcgcgccattgcactccagcctggctgacagagcgagactgtctctaaaaaaaaaagactcaagtggaccctacaatgaagcctacacatcccaatagaagccccttcttatgctgagggaagcagccctcagaacatgatagcttgtatccagcagagtggcacgnnn

SEQ ID NO: 23996 - DNA, 606 bp, Homo sapiens; identical to SEQ ID NO: 23805
  misc_feature 1, 2, 3, 4, 5, 6, 7, 8, 9, 10, 11, 12, 605, 606: n = A,T,C or G

SEQ ID NO: 23997 - DNA, 2915 bp, Homo sapiens
  misc_feature 1, 2, 2908, 2909, 2910, 2911, 2912, 2913, 2914, 2915: n = A,T,C or G
nnaccacgcgtccggcaagtggatttacttgtagacatccttactatccagcataatcccccttggctgacatgagaacttggttagaggagaatttattggggtcagtgtaaatattcaagttcaaaagcctcagaacccaacactttaaagatttttaaatggaattttgtcgtagtcattgtacttttaaaatagtactttcagtttcattgaggttacaagaaagactgaagagtacaaaggaaatttagttacaatttttgcatttattatggccttaaagactcttgggaatcaggctctgttcaacagtcaataaatgtaatacacacattaatatagtactgactgggcgttcttctataaaagtttaagttctttggcttctaagaaaatgttgggcagttacagttaacttgatgactacttctagtattagccaaatgggtcctaagtggcagcattttgccagacattgactaaatccttacatgccacatttactgaattccaatacaacaataataggttccttctgtggaagtaggttaaaccagtaagtggcagctcactgaaatttctcccaggttctgtctcttccaaaatcctccatcctctcttatgaagggaagctgataaaaaaaaatcctcttggtgcaagctgaagctgttaaggattccttttttcactctcaggaccaacagacgttcttttgtatttcaagataatttcacctgttgttgttgttgttgttgttgttgttgttgttgttgttgtcacaaagaaacaaattttgagcagcaatgacaattcaaccatatctagattctccctaccttatttctccagccagtcacaccaggcagacgggtaacctttaacagacctggtgttctcatggaataccgatgctcgtcccagggagctgacctttctcactatgtccttatagagctgctcttacagagaactttgtgctcaggaccaagggatggtcaattaaaagttgcatgtaagcatcaggcttggatgggcaagggagggcttttatacatctttgaacgaccaggtctttccttgtctgcctgaaggcagagcttcgagaaacagcacttcccatgtgtctggtcctcttggtctctcagccagacacttaatcaatcctggactctccagtagtcctcagtcattgtagccatagcatctgcaaaaaaagaaatgctaaaataatcattagcgttttcaaaattaggaaatcaaagtagctgggtcactctcttacatgtgtatgagccagttaattctgctggacagatcatacttacgctgctgattgactcttctgagcagtaacacatctcctgaattaattaggtaggtcccgtttgggtgctttaagtgggatcagtcttagatgagtgccagtatgtgattgaatttcatacgcacaaatgccatgattcaagttctctctccagtttttcttatagatcaacacacagtacatgtggtcagttacttggttgaatttctgcttagctgtggtaagagacagagaaagggagtgaggtgggaccaggggaattatcagaaagacatgagtgaacctattggccaggtagcttccaagtatgttctattgtattgtctgttttgattctgatagtttagaactctttctgatagtttagaactcttacccagtggttacatgactgatcaaagcaactccattcttggaaattaattgcttggggtaaaatgtccctgagtttcaaccttggtcttttatctctggaatattcttcttatgaggatattatgcatgtttctgtcacatgggcattatttacacacttgataaatgaaaggtatttctctgtccgttcaaggaaataaaatgtaagttcttgttttattaaatgaatgaagccttttggttaaaaaaaaagtaatgtaatatgtttctgttcaaacttgagctaatgacatttaaggaattaaagacattgatctagttcttagtatgaaaagtgtacatgtagatatagttatataattgtgtatatacatatctacacacatggttggttttatattgctttttcatcaatatttttgactgaaacctttacaataaattttattttaattatgtaaccactaatattttgagagaaggaagcaaatgttatatgtccttctgttaaaagaaaaaaaattcagtcctccgccaaccgcttcccacacactcatactctgcacatcttggctacattaaaatggactgacagaattatttaaaaggcactatgaaggtagaacactaccttaatattttatcctagtcagaagcctgatttaacactgaactttgaagggaagcttagctgtagctcatggctttcaaagattagaagaaacatttactggttctatggaaaatagtcttcttgctaggtagattggaaacaaagaaattgcattggtggtgttaaaatctaacatttataacaaatcctgttttattctagatgaaatacttagacaattcttccagtggaaaccagtgaacttttttaacagctttgggaattcttttgtatgataatttttaaaatgaaatgtgtactcttcaaactaattaaagcttgaagttttccaggagtcgcattttaaaagtgtttgtacacattttaacacttggatattttctattttggttttgtatatttttatgtatacacaatgtacagacttttttcttgtaaataaaacatgttttcatttgtctaaaaaaaacaaacgccataacaaacacaaatatttggggggcgcacagggccccgaaaaagtttctaaacacacctttttgggcccgggccccatggtcactgcacaccnnnnnnnn

SEQ ID NO: 23998 - DNA, 406 bp, Homo sapiens
acatccaaaatcatttcagcgtataaccacattctcctagactttgtctctcttctactccaagaagcccagttaccctttctcctctcttttatccccaaggatacagaacatcaaccacatcagccatcttgtgccctgcgtgctgagaggagcttttcttccatgaagatcccttgatgcagagccctgtaaagactgcatcatcccagctactttcctgctgacttccacttgggtttactcaatgggtgacactcacaggacataagagattagaaagagggataaggtttttttatatatctgctccctccctacttaaagccatggttttagcagaggcccaaggtcgtggcttttttgagcagcccctttatcaaaggtctggaaagagtctaccttc

SEQ ID NO: 23999 - DNA, 1545 bp, Homo sapiens; identical to SEQ ID NO: 23819
  misc_feature 1, 2, 3, 4, 5, 6, 7, 8, 9, 1541, 1542, 1543, 1544, 1545: n = A,T,C or G

SEQ ID NO: 24000 - DNA, 217 bp, Homo sapiens
  misc_feature 1, 2, 3, 4, 210, 211, 212, 213, 214, 215, 216, 217: n = A,T,C or G
nnnngatgtttgaagaaggttcatgattttcgttgtaaacctgggaatagccatgaccttgtgcccgattctttcagattgctttgggtaataaatattggtggtggtatctgactcatgctgccgtttatggtcctgtttagtggggaatggactcaggttacccatttcccagagggaaggatcccaaaatttttgaaggatacatannnnnnnn

SEQ ID NO: 24001 - DNA, 439 bp, Homo sapiens; identical to SEQ ID NO: 23991
  misc_feature 1, 439: n = A,T,C or G

SEQ ID NO: 24002 - DNA, 1214 bp, Homo sapiens; identical to SEQ ID NO: 20119

SEQ ID NO: 24003 - DNA, 204 bp, Homo sapiens
  misc_feature 204: n = A,T,C or G
ggtggcggccggcgcgcagccgctggccggtggtgaccagcgagccgtcgcccagccgcgcgatgcggcccgagaccgctccagcgccacaggtcggcattcggcagcccggtgagctcgctctggacgaagggctggcggcggtccacctggatgccggtcaccgcgcgccagcccaggccgggcacgcggttgtggatgtan

SEQ ID NO: 24004 - DNA, 351 bp, Homo sapiens; identical to SEQ ID NO: 23993

SEQ ID NO: 24005 - DNA, 457 bp, Homo sapiens
accaaagtttgttaaaacacccagagagaagacgatgcttgagtaaatgtcttgctttcttgaaccctcaatcaacacatttaagccatttggtatatggagaactgccatagtgccagacaattgaataattctgctggattctgttggaacactgtcttgtcttcaagagaagactgaagatttctgaagtcatgaatcacctttattgcttgtcctctcgaaaattatacattcttcccctctgacttaaccaaatagaatgttgtcacgtgacttttttcctacatttcacaaataaatgttgcaaatcacagacagttctctagaaagtgaaagacatgtattttgcaataatacagtgatttttgtctctattattcaggatgattgatgtagatgtaatcagtctgtctcttagatattggtaaaataaagtgatggttgttggctctgg

SEQ ID NO: 24006 - DNA, 340 bp, Homo sapiens
  misc_feature 1, 2: n = A,T,C or G
nnatctctgggtctccaggcagcagccgtcgccgcatccccggcagcagctccaggcaaagtgacaggaaaagacgatttctctctgattcacaatcctgaaaatgtgatctcccttaaaaagaggacagtgctgctgtgagtttgacgaagtggacatcacctgcagtcagtccagagctgcccagtcttgaatataatcatggccaaaccttatgaatttaactggcagaaggaagttccctcctttttgcaagaaggaacagcttttgacagatacgaggaggaatcctttgtgtttgaacccaactgcctcttcaaagtggatgagtttggcttct

SEQ ID NO: 24007 - DNA, 920 bp, Homo sapiens; identical to SEQ ID NO: 20829
  misc_feature 1, 2, 3, 4, 5, 6, 7, 8, 9, 10, 915, 916, 917, 918, 919, 920: n = A,T,C or G

SEQ ID NO: 24008 - DNA, 813 bp, Homo sapiens
acataaatgctaaactgggttcacagtgagaatgagagtcattctaacaagacttttaaaaccaagaccctttctgctccctaccaagttactgccatcttctccgaagaaataaagttttgtcagtgtgcccttggcataatttcttcagcctggattaaacacaggtgactgagagtccgccttatctccacagggcattagtcactctataaaagttaaatttattatgaaatgcttgtctgtgttaacatatatcttctctgggaagctggaaacaaaggcatgtcctttaagactccatatggggaaaacacatcctcctttggaatttaaccttaatttgaaccaagatctgtgaaagaaaagtactttagtgtattgttcccttgctccacccttctatccccttatctaaatggagttactgttgcttcgtgtttttttaacccttccaattccagtccttgctttcctgagtttaaaatttatcctgggaaagaaatatattaaaataattgtggcaaacaattatactttgcttttaagaatgaattttttttgtaatatattaattctgatatcctttaagttaagtaaatgcacagccagtttatacatcttcattgctcattttgttgttttaagatacattgtaaagaatattttatttcctaaaaattttatttcctgcatatcttctctaagattctctggctagcaaacattgttatatatgcatagtttacaccttattagaagtaaaaaagaattaaaagtaagaaaaatttccactaggaacaataatgaggt

SEQ ID NO: 24009 - DNA, 1641 bp, Homo sapiens; identical to SEQ ID NO: 20385
  misc_feature 1, 2, 1626, 1627, 1628, 1629, 1630, 1631, 1632, 1633, 1634,1635, 1636, 1637, 1638, 1639, 1640, 1641: n = A,T,C or G

SEQ ID NO: 24010 - DNA, 2915 bp, Homo sapiens; identical to SEQ ID NO: 23997
  misc_feature 1, 2, 2908, 2909, 2910, 2911, 2912, 2913, 2914, 2915: n = A,T,C or G

SEQ ID NO: 24011 - DNA, 688 bp, Homo sapiens
  misc_feature 1, 2, 3, 4, 5, 6, 7, 60: n = A,T,C or G
nnnnnnnactgaaaatattacagcatagcagaaagattcaaccggctccaactggtgttntgaaattcatcccaactgtaggctgagtgacctgcagtttggacagactcccgaagtccaaagacttcaacatttttttttttgcatgaaaatctacttcaatgatctctccttctgcaccttgacggagatagctgtcactaggtctctctgaacctgcttcatccaatgcaagacgtaacatgctatcttcttgtggagcttcctgctaggatctccttccacgctttcttgttcctgttgaagtcattccctcggtgcttgtactacttctcagtgatgacttgggccaccttcatggttttggtgtaaatgcagcccctgttagtgggtcctcacttgataaggtcacgttgagtcccagtgcatctcgtagtacaattttatcattcagctctatgaatctgcttaactatttcccaattagaggaagttgcagacacaggttacggcatagggcaaaaaggttgctgcctaattgaaaaaagatgctgtccccccgcctttatttagctctttaaaaacctccacctttgctatcattttcattcaatttatgacttttaaaactgcagttccaaaactgggtgccagagtgccttggggcactaccatgaattccccgcgt

SEQ ID NO: 24012 - DNA, 1214 bp, Homo sapiens; identical to SEQ ID NO: 20119

SEQ ID NO: 24013 - DNA, 1641 bp, Homo sapiens; identical to SEQ ID NO: 20385
  misc_feature 1, 2, 1626, 1627, 1628, 1629, 1630, 1631, 1632, 1633, 1634,1635, 1636, 1637, 1638, 1639, 1640, 1641: n = A,T,C or G

SEQ ID NO: 24014 - DNA, 439 bp, Homo sapiens; identical to SEQ ID NO: 23991
  misc_feature 1, 439: n = A,T,C or G

SEQ ID NO: 24015 - DNA, 1729 bp, Homo sapiens
  misc_feature 1, 2, 3, 4, 5, 6, 7, 8, 9, 10, 11, 12, 13, 14, 15, 16, 17: n = A,T,C or G
nnnnnnnnnnnnnnnnntaacttttatatttttattagatgcatttagtaacttgcctcatagtcattttcttggaaattcaatttcttctccacagggtctcttttgagattaaagagagagaagtggcaaatttaggatgttagaataattttcatttaaaagtagatccttgtttttattaccctatcattaatgttttctgttttcctttatcagcgagttactgctcatttgattcatattgccaaactgaactctcttgttttcttgcaagatgaaaggagacaaccatgaatgagccactagactatttagcaaatgcttctgatttccccgattatgcagctgcttttggaaattgcactgatgaaaacatcccactcaagatgcactacctccctgttatttatggcattatcttcctcgtgggatttccaggcaatgcagtagtgatatccacttacattttcaaaatgagaccttggaagagcagcaccatcattatgctgaacctggcctgcacagatctgctgtatctgaccagcctccccttcctgattcactactatgccagtggcgaaaactggatctttggagatttcatgtgtaagtttatccgcttcagcttccatttcaacctgtatagcagcatcctcttcctcacctgtttcagcatcttccgctactgtgtgatcattcacccaatgagctgcttttccattcacaaaactcgatgtgcagttgtagcctgtgctgtggtgtggatcatttcactggtagctgtcattccgatgaccttcttgatcacatcaaccaacaggaccaacagatcagcctgtctcgacctcaccagttcggatgaactcaatactattaagtggtacaacctgattttgactgcaactactttctgcctccccttggtgatagtgacactttgctataccacgattatccacactctgacccatggactgcaaactgacagctgccttaagcagaaagcacgaaggctaaccattctgctactccttgcattttacgtatgttttttacccttccatatcttgagggtcattcggatcgaatctcgcctgctttcaatcagttgttccattgagaatcagatccatgaagcttacatcgtttctggaccattagctgctctgaacacctttggtaacctgttactatatgtggtggtcagcgacaactttcagcaggctgtctgctcaacagtgagatgcaaagtaagcgggaaccttgagcaagcaaagaaaattagttactcaaacaacccttgaaatatttcatttacttaaccaaaaacaaatacttgctgatactttacctagcatcctaagatgttcaggatgtctccctcaatggaactcctggtaaatactgtgtattcaagtaatcatgtgccaaagccagggcagagcttctagttctttgcaatccctttattgagctcctccactggggagatataagaatgggatgcatgtatatcagcaaagtattcagacatagtattacaagctattggaactcagaggcatcttagagaacatctgttcccaccaacttactatatatacacggaaaccaatttcttacccttgccctagattgctcagtaaatttgtgccaagataggagaaaaccaatcttttcactcatcatttcatgcttctctgcactctgggcctatttgtattga

SEQ ID NO: 24016 - DNA, 1878 bp, Homo sapiens
  misc_feature 1, 2, 3, 4, 5, 6, 7, 8, 160, 161, 1878: n = A,T,C or G
nnnnnnnngacatggacatatttaactgggacctggatgaggaatatgaccaaagcctaccatgccccatgctcagcaaggagctgatagaggttgttgaccctgatgtcttgatggactcactgtatagatgttatgaaactccttccagtagacttgnnagctctagactcctgcaccccctatggaagttccttttatgcattgctaggaaaagcctgtaggcttttctcttgacgtgggagaaatactaaagaaggggaaggggaagataagaactgtggtctgggttttcttcctatacaatgacgccgctgcaagtgagctcagaaatgcttggtttgagagccattgcctgtgattttgaagactaaagaagtatttacactagatactcttccagaacaaaatagaaatttcagcaaatacttactgacctttaaagccttgtgtggatttctgagatttaaagatactttaaaattctcaagaacaaaactttcaaacctctggttgaaagaaatatacccagttcagtcactgcagtagaattccttgtagataagcaactggattttttaactgaagatagtgcctttcagccctaccaggacgacatagacagcctaaacccagttctcagggacaacccgcagcttcatgaggaagtgaaagtctgggtaaaggaacaaaaggttcaggagatttttatgcaaggtccttattccttaaatggatacagagtgagagtatatagacaagactctgccacccagtggtttactggcataattactcatcatgatctcttcacccgcaccatgatcgttatgaatgatcaggtactagaaccacagaatgtcgatccttctatggttcaaatgacctttctagatgatgttgttcactctttgttaaaaggtgaaaatattggcattacatcacgacgcaggtctcgtgccaatcaaaacgtcaacgctgttcacagccattatacacgtgcccaagcaaatagtccagacagaatgaatcccagctgctgtaccaaaagaatacaccagcaagcaaacaaagttcaagtatccgtccaaataagaggaagggctcagatagcagtataccagatgaagagaagatgaaggaggaaaaatatgattatatatcacgaggagaaaatcctaaaggtaaaaacaaacacttgatgaataaaagaaggaaacctgaggaggatgaaaagaaactaaatatgaaaagacttcgaactgacaatgtttcagacttttctgagagcagtgactcagaaaattcaaataagagaataatagataattcctcagaacagaagccagagaatgaattgaaaaataaaaatacttcaaaaataaatggagaagaaggaaaaccccataataatgagaaggcaggagaagagaccctaaaaaatagccagcctccctgggatcaaatacaggaagataaaaaacatgaagaagcagagaagcggaagtctgttgacactcagcttcaagaagatatgattattcatacgtcagaacagtccacagtttctgatcataattctaatgatttacttcctcaggaatgcaatatggataaaacacataccatggaattgctaccaaaggagaagtttgtatccagaccacccacaccaaaatgtgttattgatattacaaatgacactaatttagaaaaggtggctcaggaaaactcaagtacctttggccttcagacacttcagaaaatggatcctaatgttagtgattcaaaacactctattgcaaatgcaaaattcttggaaacagcaaaaaaagattctgaccagagctgggtcagtgatgtagttaaagtggatcn

SEQ ID NO: 24017 - DNA, 450 bp, Homo sapiens; identical to SEQ ID NO: 23962
  misc_feature 1, 2, 447, 448, 449, 450: n = A,T,C or G

SEQ ID NO: 24018 - DNA, 384 bp, Homo sapiens
cttcttggatcttacataggcctgaaagtttagttgcactactttaggaatctctttttatgcatttgttcaattaaaaggcaacaaagacaaatccttaagaaaataccagtatttttcctacatatgaaatcaagggtccttgtctgacgatggattttactagttacgagaatcttcctatatttctagttgaatccctgtcatttcctgtaatagacttatattttaccagcagcccttatgcgatttctttgtgaaaaatatttctctgtatagaggaaagtttatcatttggaatgttaaatgcaattatattgacatatggtgataatgggacaaagcatacgggttaaaggttgcaggaaccatggcttggcaatt

SEQ ID NO: 24019 - DNA, 3032 bp, Homo sapiens
  misc_feature 1, 2, 3, 4, 5, 6: n = A,T,C or G
nnnnnngtgctggtgcttttctgctcctttgttgtgtttgtcttcccttctcttctttggttcccttctctcttggctgctttttctgcctgccttttccgtatcttcttcttgtccttaaccctttgtgccgctttagtgcctcgtgggtgccagttgcctagcctgattgtttccccttgtttgttcaagaggcccaggcgcacgttacaccagctgtccgaaatgtctaagtttacgagaggggtcatgtgccagcttgcccctgttaaccctttcttggtcatttgtctgaggttccctctaatatttgccaaagggcttttaatgttgacttctttgtcctgtcttttgcctgatggtcttctcctgaaagtacataaaactgcatttgccataaatatttacttattctgagttaaatttgaaatatataaaatgacttatcaaaagcctgaaacatcaacaattaggaaataatgcccagaaaatgaggtggtattatatatcttaagtatatattatatacaaaacaggcaatccagactccaccaaatctcatttctattgaagaatcattctggttacatttttaaaacacatacttttaaagattaaatgatggaatcagtatgcaaatgcttcttacttagccagactgtagccgactcaacagatcttaaaaagaggcactaccaccccctttcaagcaatctatacacctttggcctttgtttcccaatttgatgctatatatagagatcaggaaaaaagtctaaattggatattttctctttgaaaaacagaggttaagggattactaaataatttgtctgttactgctaatataaaatacctctactcttttttgcttaatgaaccattttcttcaacagacctcaaaggcagttttgacccaattatttgtgcttattggtgaaaatggggacaaatttatatagcctatgtaacgaatctgattggcccatatgaaataatgcttatttttaattctgaaacttggatttacctaacttaaagcagtaaggcattaaatgtaattaaggcatgttactgtatgtaacagcaatgatttatcacagtatataaggaattatttcctaaataatggtaatatgcacgtttaatatatttttcatcatcaaaacttacaaaagtgctttcaaatatcagaggcaaatataatcattttaaaaacagatgcacagaggtgaggttaaagggtctgtcctaaagaaagcattcttaagacaaaaattactgtcaggtcttcacctattccagtgttctactgacttcccaaccataatacattattttggggtcttgaaaatattttaatctatttcttggcctctgttgtaggaattataaatcactttcccctttctctttgtacgtatgctttcatagcacatgtgctaaatgtatttcttaaaagttttgaaggggtgtgttacgtatcctaccatgaataattttagaatcaaattttcttgcaactgaatattttgggggttcatagtagtaaatttttttcagctgcagacatctgatgctatcattctgcatcataaatttaacattaataaactttttaaaaattacttaaaaaaataaaatttaaacatgcattttaagaaaaatgatacatcttccaagttaagtacttcctaaacacacatttaaattaatttctgcttgaaacattcacacaccagatttatggatcaactgctctcaacatcaacaactagttgctcaaaaaattttcaaagtgtgaaacccttttgttaaaaacaaaagcatcctcaatctctctaaattctgcctttgaagctattattggatataactgattcaccacattccagatgcacatgtgacctgaccactaacatttgattatgagctaattgctatgtttcctgttgagcagcaggtgactgagaatcttgactatacagtttatgatcatcttgttggctgaaatgtattcctttagttggcacaattccattttccatttctctctgctgtgatgggggtgtgatttttgaatgtaaatgtgaagagtccactgttgaatgatgactaacatccaccttagctaaaatttcataatgcaacaaataaaacactggtgttattatacctactatcaacattatcactacagctgtccaccaccctattccccagtctgctccataataggggtctttacgttgagtgtttttgttatcaggttcaaaacgcatttgttgtgctgttaaggccgatactacctcattgaggttctctctcttattgtctgtacactttactatttgttctatgtctcggtctacttcttttaaaaagctaccagctgagtcactgtaagcaagagaatcattagctggcaaaatttcctgttgttcggaagagtattgaacagatgaatgacgtgaagtctgtcttccttttggaggacaaagtgtttcggtcaaggaactgaacttttttactggaattttgatagacctaagggcaaaaaagtcttgatcactgatgagattgttaactctcttgatatctgctaccgtacaacagtactgaagggctattgcatttaatgtatctccttcttgtatatcttttgttaatactataatgtcgtcaagtctatctcttgatgtacttcttcggactttctcttttcctctggatcgaagctcatacacttcagcatcctcctccaaaatatcactgtctgaacaatttccaaatgcatgtacttgaccacttgactgaactcctggaagaggaaaactacgattctgatgcctccctgccataatgttaaaatctgtccccgttagcagggagcactctgcgagaagatggccaaaaggtccgccgccgccgctgtcccgggtaagttcatggccgagcctctgctttgggctgaccccgtccgcctccgcctctgccgccaacgtctccgccttccgggccgtacgccgccg

SEQ ID NO: 24020 - DNA, 2158 bp, Homo sapiens
  misc_feature 1, 2140, 2141, 2142, 2143, 2144, 2145, 2146, 2147, 2148,2149, 2150, 2151, 2152, 2153, 2154, 2155, 2156, 2157, 2158: n = A,T,C or G
nccatatgattttaaacagttaaaatcaagacttccagagtgggaagaacaaattgtatttaatgaaaattttccctatttgcttcgaggctctgatgagagtcctaaagtcatcctgttctttgagattcttgatttcttaagcgtggatgaaattaagaataattctgaggttcaaaaccaagaatgtggctttcggaaaattgcctgggcatttcttaagcttctgggagccaatggaaatgcaaacatcaactcaaaacttcgcttgcagctatattacccacctactaagcctcgatccccattaagtgttgttgaggcatttgaatggtggtcaaaatgtccaagaaatcattacccatcaacactgtacgtaactgtaagaggactgaaagttccagactgtataaagccatcttaccgctctatgatggctcttcaggaggaaaaaggtaaaccagtgcattgtgaacgtcaccatgagtcaagctcagtagacacagaacctggattagaagagtcaaaggaagtaataaagtggaaacgactccctgggcaggcttgccgtatcccaaacaaacacctcttctcactaaatgcaggagaacgaggatgtttttgtcttgatttctcccacaatggaagaatattagcagcagcttgtgccagccgggatggatatccaattattttatatgaaattccttctggacgtttcatgagagaattgtgtggccacctcaatatcatttatgatctttcctggtcaaaagatgatcactacatccttacttcatcatctgatggcactgccaggatatggaaaaatgaaataaacaatacaaatactttcagagttttacctcatccttcttttgtttacacggctaaattccatccagctgtaagagagctagtagttacaggatgctatgattccatgatacggatatggaaagttgagatgagagaagattctgccatattggtccgacagtttgatgttcacaaaagttttatcaactcactttgttttgatactgaaggtcatcatatgtattcaggagattgtacaggggtgattgttgtttggaatacctatgtcaagattaatgatttggaacattcagtgcaccactggactataaataaggaaattaaagaaactgagtttaagggaattccaataagttatttggagattcatcccaatggaaaacgtttgttaatccataccaaagacagtactttgagaattatggatctccggatattagtagcaaggaagtttgtaggagcagcaaattatcgggagaagattcatagtactttgactccatgtgggacttttctgtttgctggaagtgaggatggtatagtgtatgtttggaacccagaaacaggagaacaagtagccatgtattctgacttgccattcaagtcacccattcgagacatttcttatcatccatttgaaaatatggttgcattctgtgcatttgggcaaaatgagccaattcttctgtatatttacgatttccatgttgcccagcaggaggctgaaatgttcaaacgctacaatggaacatttccattacctggaatacaccaaagtcaagatgccctatgtacctgtccaaaactaccccatcaaggctcttttcagattgatgaatttgtccacactgaaagttcttcaacgaagatgcagctagtaaaacagaggcttgaaactgtcacagaggtgatacgttcctgtgctgcaaaagtcaacaaaaatctctcatttacttcaccaccagcagtttcctcacaacagtctaagttaaagcagtcaaacatgctgaccgctcaagagattctacatcagtttggtttcactcagaccgacagtcactttgctgaattcaacacatgtatattatggtggaaaaagcactagactcagggtcagccagccagaagaactgagccgacctgggatcccaccacttcctaactgttttgttaggtagttcactttctctcttcggataaatgtctccacatttcctacttcatagaattgtcagaatcaacacaatacatttaatactttgaaactcataaaatattgggagaataaacagtatgaggnnnnnnnnnnnnnnnnnnn

SEQ ID NO: 24021 - DNA, 1804 bp, Homo sapiens; identical to SEQ ID NO: 23943
  misc_feature 1, 2, 3, 4, 5, 6, 7, 8, 9, 10, 12, 1802, 1803, 1804: n = A,T,C or G

SEQ ID NO: 24022 - DNA, 636 bp, Homo sapiens
  misc_feature 1, 2, 3, 4, 5, 6, 7, 8, 9, 10, 11, 12, 13, 14, 15: n = A,T,C or G
nnnnnnnnnnnnnnnctcctctcacttatatttccatttaataaaactttcattacaagtgcatatctgttatagactaagtttatattttttttattaaaaagaaagcatccgtgcacatttctaaagcaacataagaatgaaggagatgtgtctgggccggtggtggggaagcctctaggtgactgcccatgagtggatgcaaggtaacagattccagcaaagaaagaaaattaatttgcagatccgttgctgtaggacaaagaaaatttgtttcaggagctgagcagctcgtcattgccattgtagcagctctgtttccaattctgactttcttaagtcaagattctgaagatttggtacccaaagaacgttatcctccaaccgggcacaataagaccttcactaacattctggcccagtctggggttgatcccagaggcctgaactctagaaattaagtaactgtcgtataatacatcctactgctaaaggtttgttacatggagattgtgcatgtgcctccttttgtaaaaaaatttaattaaaatacaaggttctgtatttatggcccatgaggacaaaatgccaaaagttttaaaatggatcaacccctggtgtgtagctagcaagcaa

SEQ ID NO: 24023 - DNA, 1022 bp, Homo sapiens; identical to SEQ ID NO: 23803

SEQ ID NO: 24024 - DNA, 275 bp, Homo sapiens; identical to SEQ ID NO: 6318

SEQ ID NO: 24025 - DNA, 1641 bp, Homo sapiens; identical to SEQ ID NO: 20385
  misc_feature 1, 2, 1626, 1627, 1628, 1629, 1630, 1631, 1632, 1633, 1634,1635, 1636, 1637, 1638, 1639, 1640, 1641: n = A,T,C or G

SEQ ID NO: 24026 - DNA, 2487 bp, Homo sapiens
  misc_feature 1, 2, 3, 4, 5, 6, 7, 8, 9, 2487: n = A,T,C or G
nnnnnnnnnagtggctttgatgtcctctaccataatatgaaacatggacagatatcaacaaaagaactagcagattttgtaagggaacgagctaccatagaggaggcatactccaggtcaatgacaaaactagcaaaatctgcaagcaattattcacaacttggaacatttgcaccagtatgggatgtattcaaaacatctacagagaaattagcaaattgtcacttggatcttgttagaaaattacaagaattaataaaggaagttcagaagtatggagaagaacaagtaaagtctcataaaaagactaaagaagaagttgcaggaactctggaagctgtccaaaccattcagagcataactcaggccctccagaaatccaaggaaaattacaatgccaagtgtgtagaacaggagcgtttgaaaaaggaaggagctacacaaagagaaatagaaaaggcagctgttaaatctaagaaagctacagatacctataaactctatgtggaaaaatatgcattagcaaaagctgatttcgaacagaaaatgacagaaacagctcagaaatttcaagatattgaagaaactcatctcattcacataaaggaaattataggatccttgtcaaatgctataaaggaaattcatttgcagataggccaggtccatgaagaatttataaataacatggctaatactacagttgaaagtttgatacaaaaatttgctgagtcaaaaggcactgggaaggaaagacctggcctcattgaatttgaagaatgtgacactgctagtgcagttgaaggtataaaaccaaggaaaagaaagacctttgctttgccaggaatcattaaaaaggaaaaagatgcagaatctgtggaatgtcctgatgcagattcattgaacattcctgatgtagatgaagaaggctacagtattaaaccagaaacaaatcagaatgataccaaagagaaccatttctactcatctagtgattctgactccgaagatgaagaaccaaagaagtatcggatagaaattaagcctatgcatccaaataactcacatcacacaatggcttctttggatgaattaaaagtatctatagggaatataacactctccccagcaatatctagacacagtccagtacagatgaatcggaatttgtctaatgaggagttaacaaaatcaaagccatctgctccacccaatgaaaaaggaaccagtgatttacttgcttgggaccccctatttggaccatctcttgattcatcttcttcatcttcactaacttcatcatcatcagccaggcccacaactcctctttctgtaggcaccattgtcccacctccgaggcctgcttcctagaccaaagcttacttcaggcaaactcagtgggattaatgaaatacccaggccattcagcccacctgtaacttccaacaccagcccaccttctgctgcaccattagcccgggcagaaagttcttcttctatctcatcatctgcttcattgagtgctgccaatactccaacagtaggtgtgtcacggggtcccagccctgtcagccttggaaatcaggataccttacctgtggcagttgcccttacagaatctgttaatgcctactttaaaggagcagatcccaccaagtgtattgtgaagatcactggtgatatgacaatgtcatttccaagtggaattattaaagtcttcaccagcaatccaactccagctgtgttgtgcttcagggtgaaaaatatcagcagactagagcagattcttccaaatgcacagcttgtgttcagtgatccatcacaatgtgattccaacacaaaagatttttggatgaacatgcaagctgttacagtctacctcaagaagctgtcagagcaaaatccagctgcttcttattataatgtagatgtattaaagtatcaggtatcattaaatggtattcagtccactcctctgaatcttgcaacatactggaaatgtagtgctagcaccacagatcttagagtggattataaatacaatccagaagctatggtggcacctagtgtgctttccaacatacaggtggtggtaccagtggatggaggagtaacgaacatgcagtcccttccccctgcaatatggaatgcagaacaaatgaaagccttttggaaattgtctagtatttcagaaaaatcagaaaatggaggttctgggtccctccgagcaaaatttgatctttcagaaggacctagtaaacccacgacacttgcagtacaattcctcagcgagggaagtaccctttcaggagtagatttcgaacttgtgggcactggctataggctttccttaataaagaagcggtttgctactggtattaaccatggacctgtgatagctggtgtgattggagctcagaagccacaatatgatatctggggcaacactgtcaatgtggccagtaggatggacagcaccggagtccn

SEQ ID NO: 24027 - DNA, 1474 bp, Homo sapiens
  misc_feature 58, 59, 60, 61, 62, 63, 64, 65, 66, 67, 68, 69, 70, 71, 72,73, 74, 75, 76, 77, 78, 79, 80, 81, 82, 83, 84, 85, 86,87, 1458, 1460, 1461, 1462, 1463, 1464, 1465, 1466, 1467,1468, 1469, 1470, 1471, 1472, 1473, 1474: n = A,T,C or G
gcgtccggtcaggagttcgagaccagcctggacagcatggcgaaaccccatctctacnnnnnnnnnnnnnnnnnnnnnnnnnnnnnnaaattagctggctgtggtgataggaacctgtagtctcagctacttgggaggctgaggcagtgaacccgggaggccgaggttgcagtgagctgagatagcaccagcctgggcaacggagcgagactctgtctcaaaaaaacaaaaaacaaaacaaaaaaaacctctccaaaagaagtttgagataattttatgtttagaaaaattagaaattggattgagtaaaatttacatattttacacaagaggactaacatctttataatatttaacctttcagtaaatttatgttttatgtttctcagcctatcttttctagtataggtgatttttttagtgtggttactattgtaaatgagatcctactactttaaaaaatgaaaattaaatctatcgcttttatgactttaaaacattagacttatgtaagtgtaaacattatttaaaaacataatgtagaaaattaaagtcccccataattaaaatccctttcccccagaaaaagtcaacagcatattcatcagttttttcctaaagtatgttttagcactttgaccatatgagacaacccttctgctgttagcatttttctctttgcaatagatcttcctatgtcagtacacatcaatctacctcattcttacctctgcataagagagtagtgtgtagttgtataatagtttaacttggcgattggttattgattttgtaactagccagttactgaattattctaaaggttttgctgttgttaatttctttcgcctttttcagttgggtaatagttctgggtaggttgataattttattcccatatttgtaatcttatttcactttctcaactcatcacattgactggtacttttagaacaatgttaaaaaacatttacataattgtgctgatattgtacattatttgatatatatatattttttttacttagaagagtgtttctccaaaactataaatttgactcttagtgtaaaataatcttaatatttgaattatacattcaggttatgccctctatttctagtttgatgaaaatattattagtaatggatgttggggttttattaaatggcttttttccacatctgtcaagatgatcaactggcttttctctattatgactttagatgaatcgttttaatagatttgctaatgttaagacatctctgcatttctacaagaatctgatgtagtcatagtatactattcttttaatatacatctcctttcaatgttaacagtggttatttatgattggttggtccatagtagatttttattttgtgtttcttatctgtactttctgatttttctacaaagattgtgtattacttgtataataaaaataagagctttaaatngnnnnnnnnnnnnnnn

SEQ ID NO: 24028 - DNA, 1504 bp, Homo sapiens
  misc_feature 1502, 1503, 1504: n = A,T,C or G
gctttcttctatagttgtaagatggctgcctcataagataatatctcaagacagaagaggaagggtcattccctttcatgcattgctcttttgatttgcaaaaacatccctgagaagctccccagccagcatactctcgtgctccattgtctagaactggcttacttgcccaccagcaaaccagtcactggaaaatgggaatgggattgccatgatgggtttagaccaatagtggttcagctcttgggctggacctgccttttccgagcactttgctgcctgcctgatacctgagtaaaatcagggctctctcaggaagaaagatgggggaaatggctcttggttaaataaccagttcttttatctttataataaccagtttttttagatgaattaaccgagttccagaataactgggtgacttatctgaagtcatagagttagcaaaagtatatggttgagaatttccaattccagttcaggttttctgattccagttcctagtacttttcaaaggactaactttactaatttgttgatgtgcattcttatttgtttgtttcaggtgcttgaagtttctgggaagtcggcatccaaccctggtgcttcccttggtgccagagcttctgagcacccacccattttttgacacggctgaaccagacatggatggatccagcttatatcgcagttttggtacttattttcaatgctgctaaaacctgtccaacaatgccagcatgttctcagatcacaccttcaggcactatgcctacctccgagacagtctttctcatctgttcctgccttgaggttaccaggtagaaaactggtgtcatcagctgtttctcccagcatcatacctcaagaggatccttcccagcagttcctgcagcagagccttgaaagagtgtatagtcttcagcacttggaccctcagggagcccaggagctgctggaattcaccatcagggatctgcaaagacttggagaacttcaatctgaattggcaggagtagctgatttctctgccacctatcttcgctgtcaactacttctcatcaaggccttgcaggaaaagttgtggaatgtagctgcccctttgtatttgaagcagagtgattggcctcagcagcagcgaaacagattatggaagagacctacaaaatggaattcatgtacagtggtgtggagaataagcaggtggtgattatacatcacatgaggctgcaggccaaagcttgcaacttatagtaagcagcacgaactacacgaaggacttggacccttatttgggatgtgtgacaacatttctacagggacgtcgacttttttcagaggtattcatcgctgatttggcccacttgcggaaactttgtggcaaaattcctgagcttatgccccgagtcatgagatccaactgtggagtggtccaaattttctgaacatgtgcggagagggggttggaatcccgcgcagagagatcacaaggtcgcccacannn

SEQ ID NO: 24029 - DNA, 488 bp, Homo sapiens
  misc_feature 488: n = A,T,C or G
cccacgcgtccgaagatatggagtatctgggaacagtagccagtatttgccttcattctgactatgctgctgcactttttgaaggcaaagtccagttacatttgaaagcgaaatcttggatgctcaagaagaacgtgagactcggcttttcccagcagtggatgataagtgccgtatcttatgccatgccttaactagtgatttcctcatctatggtacagatactggtgtcgttcagtatttctacattgaagactggcaattcgttaatgattatcgacatcctgtcagtgtgaaaaagatttttcccgacccaaatgggaccagattagttttcattgatgaaaaaagtgatggatttgtttactgtccagtcaatgacgctacctatgagattccagatttttcaccaaccattaaaggtgttctttgggaaatctggccaatggataaaggtgtatttattgattatgaggatgataaggtgn

SEQ ID NO: 24030 - DNA, 681 bp, Homo sapiens; identical to SEQ ID NO: 20120
  misc_feature 1, 2, 12: n = A,T,C or G

SEQ ID NO: 24031 - DNA, 604 bp, Homo sapiens
gagtcgacccacgcgtccgcccaaagtgttgggattacaggtatgagccgccacgctggggccattatgatcttttcattgaactcttggcattttcttgccagtttaagagagaattttctaacaaatataactgcacacagttggagtagacagcaagaaggaaacattctattacttaaagtgtttaaggagtggcaggatggccttgtcagtaaaagggaggggagtgacaggtatagcgttcttattgtgccaggtacttatgtatttcacgccctttaatttcaaaggccccaaccctacaaggtatagatcaactttgcctattttttagtgtggaaactgaggtttagagaggcctataaaatttgtctacagttccatagccataagcgtctgattgataaagcaaaccccagttctttgtagaagagctgttatactgcctttagtgtgtaactacttcatgaactcagagtccattatgattgtgtaaggtatgacagtttggcatttctaccaagaaatgaaggcttgaatggggcagaatgacagcacttggtggttaggaagagaagaaagttttggataatgggataat

SEQ ID NO: 24032 - DNA, 1641 bp, Homo sapiens; identical to SEQ ID NO: 20385
  misc_feature 1, 2, 1626, 1627, 1628, 1629, 1630, 1631, 1632, 1633, 1634,1635, 1636, 1637, 1638, 1639, 1640, 1641: n = A,T,C or G

SEQ ID NO: 24033 - DNA, 480 bp, Homo sapiens
  misc_feature 425, 479, 480: n = A,T,C or G
tcggctcccagctactcacagagaacgtttctgtttctgacagcagagtaagagaagaggtgagaagagagacagcccattctcttttggcctaattcctaaggaatcatgcctctgccttcgggccattctcaagtcttgttcaaggataaaatgatttattgatggccgtaattaaaaagcaatgccaacggaagcagcgtcagcatttttcatttatacctcggccgcccgggcaggtacgcggggagcgctccccgcgaaggaccggaaaggagcgcctactaaggacgccgtcgaggtccggggcgcctcaactctatagctctaactggctagaagtgcccaacgtggaatgtttcttttttaaaggcggctcttgaagcgacccggaagcggaagtggaagaaagttctagtggcttnaggcctatgttgtccttggccagtttctggtgctaaagaaagatgaagacctcnn

SEQ ID NO: 24034 - DNA, 1641 bp, Homo sapiens; identical to SEQ ID NO: 20385
  misc_feature 1, 2, 1626, 1627, 1628, 1629, 1630, 1631, 1632, 1633, 1634,1635, 1636, 1637, 1638, 1639, 1640, 1641: n = A,T,C or G

SEQ ID NO: 24035 - DNA, 1200 bp, Homo sapiens
  misc_feature 1195, 1196, 1197, 1198, 1199, 1200: n = A,T,C or G
acatgcccacgccagccacaccgaccaactggagggcagccgagcaggcacggacacagctgtccagaccagggccaaccaacctgcaaacctgccacgtgaaaggagtgtcaggagaggagaaaggcacagctcccctgcagctgcacccctctgggtgcagttacggggctggctgatgagacagacaatgggtgtggcatgtgggtagtaaactgtctcatggtgtaaaaatgcttgtcacatttcatgtgaacagaatcaactaaaaagttctgccacaaatgtcataggaagaatgacaaaaaagaggttcagtgatccgcgtgcctataatcccgaggcatctacgtcactgagataagaaagggcagccggcatatcttccctcccacccctcatgtatctcttcccatcttgatttaaaacaaagccagtgttagaggagactggagttttcagattgttggctttctttttgctgccatttctattcctcaccaagaaagaataataaagctaatactgaaacttccaatttacaagcttccaggtttgaaaatacatagatatgaacgaagttacctttcagagatgagtcaaccactggccctgcaagatcacaagacagtagcttatcactttcaatttataagtggaatggagaacagcctttccaaacataacctgtgagaggagtttctgtaatcagaaaactgacttgttggcttgtatccgagaagcctttcctatcaccttagtatgatagttctctggagagctgtgaggaaatctttcttttaaagtggcggtcatctttgaaaccaagcatgcataaggaagtagagcacagtacaggaaaagaaaggccctctgctctgatcacacaccaccacaacatcctgacagatgacctggccatgcacagctgcctctccaggaaaatcttccactctcatcagggaacactggactggataactcaggtattcctaggtgaagtaagtcagacaatatggaaatgaagaaataaaaagagggctttcagggcacacagctcagtttgccaaattcaacatggctacaactgatccccaaatcctgagtaaacacccttgctatttaataagcacaagccaaaaaaaaaaaaaaaaaaaaaaagagcgggcgcagctattcccttagtggggttaannnnnn

SEQ ID NO: 24036 - DNA, 534 bp, Homo sapiens
  misc_feature 1, 2, 3, 4, 532, 533, 534: n = A,T,C or G
nnnnccgaggtacctgaggtagctggagacaatatactgtcagggaaacgggaatctgaaacgcgtctgaactggttagatttgaaggcagtaaagtggctgccagcattgaaggatgagacactggcagtccacagtatctggtggtgaaagagatacttaaattatcccctgtgcttgtgggaaataaagtgcccattgaaggaaggctgtgtcaggctacatgtctactgtcgagggcaagtatggcaaaaatgagaagcacattgactatggagtatgtctggctgtattcaactgtgttcaaaatcttaaagtcagaaaatgaaacactcaggacttttcattctcagcttatgacgtagtcagtggaccaggtaacatctgtggctttaaggctatcttattcgagcggtcgcccgggcaggacaaccctgaaaaagaggaggctggacacttgtatagacttatgcaaagcttatgctttgaaaaaatatgtggaaattggcacctccatgtagagtcaccacannn

SEQ ID NO: 24037 - DNA, 1641 bp, Homo sapiens; identical to SEQ ID NO: 20385
  misc_feature 1, 2, 1626, 1627, 1628, 1629, 1630, 1631, 1632, 1633, 1634,1635, 1636, 1637, 1638, 1639, 1640, 1641: n = A,T,C or G

SEQ ID NO: 24038 - DNA, 4399 bp, Homo sapiens; identical to SEQ ID NO: 20975

SEQ ID NO: 24039 - DNA, 1641 bp, Homo sapiens; identical to SEQ ID NO: 20385
  misc_feature 1, 2, 1626, 1627, 1628, 1629, 1630, 1631, 1632, 1633, 1634,1635, 1636, 1637, 1638, 1639, 1640, 1641: n = A,T,C or G

SEQ ID NO: 24040 - DNA, 4596 bp, Homo sapiens
gtccggtgacccatcagcacctaccagaacaattcatggggagatttccttttggataccatctcggggcttgtatttgatactgcaaaggaagacgtggagttacggaccggcataccccggcagctgctcctgcaggtggaatccacaactgttgctacaagacgattaagtggcttcctgaggacacttgcagaccggctggagggcaccaaagaactgctttcctcagacatgaagaaggattttattatgcacagactccccccttactctgcgggagatggggcagagctgtcaacaccaggtggaaagttaccgaggctggacagtgtagtgagactgcagtttaaagaccacattgtcctcacagtactgccggatcaagatcaatctgatgaagctcaagaaaagatggtgtacatctatcattccttaaagaatagtagagagacacacatgatgggaaatgaggaggaaacagagtttcatggacttcgcttccctttgtcacatttggatgcactgaagcaaatttggaatagtccagctatttctgtcaaggacctgaaacttactacagatgaggaaaaggaaagcctggtattatccctctggacagaatgtttaattcaagtagtctagtgcctttgcagaatcaaatgcctactattttatatgcatatattaaaagaaaagcaaagacctgagccgaggagaggatgaattcaagtttccttacctgcgtatctactaacaaacatgagacctccctgttacaggtggtcagttggccaaatgtactaacgggcacatgaaagaaagaacagcaaattaccaagtgtctcagaaaatgacaaaaccatattttgacaagtttatttaatccagtgtggtagaaaaggcacaattccaatgtatcatttagaattgaatgtcattaacctggctttgttctttggaagaaacaacttctttaaagagcttctttggctctagaaaaatttcaaacaattaaaataagaaaaaattttaaactggttttttataatgaaaatatacatacctttgtgtatagacaagcccatgcccattaaaataaagttatcctgtaacataaattttattaaataatacttccccacagatgagaggcacgcaacacctatggacaaaagggagttacagaggctgcttaaaagatggagaaaagcctgagattgaaggaggaaaaaaacccagtatttaaagtctataaaaaatactcaaaatagtgggtcttcgagtttaaaatagtcattgttattttacattctaaagtgcatgtaggttgatattttttaaaatatcattggagaatttaatctttctttataaaaatagagcatttttctgctttctggcaaaagttggggataaaaggaaaaaaagttgtcaaaatgtaattttcagtccaattcaccaggaaaacatgcttgtgaattgtgcagtaaaaggtggtaatgactactggaagctaagtcaaaggtgatttcctacctgattttacttacttaaataaaagttacttacaatgggagtgaaaaactgaggtttctgttatttagtagagaaatcaactccacgtttacttaaagagatggtaaggtcaaggttcaaatgctactgtgttttaatttggatatttgaaatttctcttgaggcaaaaaaaaaaaaaaattgatgcctctccttaaatctaggatgaagtgtcaacatggagacaggtaaccactgttatagagtcttgtcacctaaagggatgtcttggttaacacgtaacagtgcaagtttggccataggttatttatttgtacttttttagtttgaaggactgaggaaacaatagctacagaaaatacttcttgtgccttattcctaacaaagctgaggtccctgcctggggttagttacaagtataaatacttaacgaggtgcgttcattataaaagcctcagtatagaaaccttaaagtttatctaggaaagtttagtatattttcaggtgttgctaaaaaattactcatcatctgtttgcaaaagtatgacttgacctatagaaatctgtttctttatgctttgtactcatacaagcatctaggtaggatattaataaataatacaggataatagcatcaccagtgtccaataacgggccatcaggaacaggattcacgtttggtggatatgagagaaaataaacacttcaggaaacttgctcaccacagctggagatcaggaatagaacctttccaagatatcataatattttctttataggaacactgagtaatggcaagaatattttgagcttttccatggttaagagcgatagtctcagaggctggagaaaatgttcattctgctcagtgatccaggagtgtgaggacagtagcttcctttccacgtccacaagacaatgacagatgtgtttccttctttgctctttctagggatctttctagggatgttgattctctcacaatatttcaatgtcccatttctgtgtttcttctccctccaggggctgatttacaattacatgagtcttgtcacaataatttcctcctttaacatcaaggacaagttgatcactgagataagagctgatagttccatttttattcagtctccacttctgcctgaattgcccatgttcagtccatagagctactttagctccaggtgtgtcccggccaccaatcacatcaagacatgtatcactggccttggatttaaagagtcctcggcagtagtaccagatctgagtatgctttccactatagggagaaatgcacacagatgttgccctggtgtctgctagacttccagtgactgtcagatattcaccctgggcacggttctttattctgatgtacactgcaggctgcttcataggacggagggaaccaattgttttccatctgctgaatgctgtccagtttgggatctcattaggcctgagtaggatttgtcttcccaagaaattggatccttcataagctatccatagtccactttttacccacacagactgggtgtagaagtgtaggtccttgttcagaacagagttcacagcctcttctagatgtaactctcttccctcacaatgctccagagcaaaaaggctgatggagggttcttcaaaaacatagtcaatgggcttgagagatttgactttagatgctgggcaaccgcaggaagtaaggtcagcatagaggccttcttctaacacacagtgattaacaaacatgtcttcttggtaatagaggagccagcaacctcgaagaactttaaaagaacatggcatgagtgaagtcaaatcagaagtttcttctgtaaaatctatacattcaccttggaaccctggtttgctgaatgctttgagcaaatgcggaggttcatttatcccaagtggttccagttggattggccgtatcgacatgattatattatttgatcctccccagtcaaaaaagcatttgtatttccctttttctaaaatgtattgttctccacagaagaacttttgctggtaggcaacccatactccacttttaacatgaatggatcttgttttactgccaaagccaatttcttccaaatcagaaatttcctgatttgtaatgtcaataaacttcccactttctaggtcagattcaaatagtgtgacagaagattctataaaattagcttgtaagtaccggaaagacaagatagggctacttaatgcaccacaagcattactgtcttcaaagtctccttcttcaagcagaaactgctggcctttaaaatgttctttttcataggcaacccacactccaccaatgacacgaattgatccaattctgtgaaaatctccattatttttcaaaaaattaggaacagaatctatatgttcactaaactctttagcctgtccatggaagtgaggtttttcataaataataacctttaagttcatgggcatttccactttcagtccacccatttgaagtggatgtaatgatttcatttctgctgtagaaatctcaaagagcccatggtcttcctccagaactgtagcttgtcccttaaaattaatatctgggtaggcaagccaaactcctgacttcacagtgaaggacacagatttggagatattcagttcttccaaattggggactgctctctgtatgtagacaggacaacaggctgggtcagattgtgggaaaagctctatttctggaatgctgcagtcctttaagacacgtttgagagaacccaatataaagtttctttgtggatgccttctgttctgaagaatccagtcacgatttaacaccttttccccttcttctagcacacatttctgacctcggaaatgtggtttctcatataaaatccagcagccccttacaacttttattagaactccatttggaaaagaccatgatgtagcatcaggaatattacagtagacttcttgtttatatgtactttcatggagatcatagataaccatcttcccaggtcttgggttacatctcagagtttgttgtcaacattctcggacgcg

SEQ ID NO: 24041 - DNA, 1214 bp, Homo sapiens; identical to SEQ ID NO: 20119

SEQ ID NO: 24042 - DNA, 1490 bp, Homo sapiens; identical to SEQ ID NO: 21073

SEQ ID NO: 24043 - DNA, 2019 bp, Homo sapiens; identical to SEQ ID NO: 22489
  misc_feature 2005, 2006, 2007, 2008, 2009, 2010, 2011, 2012, 2013, 2014,2015, 2016, 2017, 2018, 2019: n = A,T,C or G

SEQ ID NO: 24044 - DNA, 940 bp, Homo sapiens; identical to SEQ ID NO: 23971
  misc_feature 1, 2, 3, 938, 939, 940: n = A,T,C or G

SEQ ID NO: 24045 - DNA, 4596 bp, Homo sapiens; identical to SEQ ID NO: 24040

SEQ ID NO: 24046 - DNA, 920 bp, Homo sapiens; identical to SEQ ID NO: 20829
  misc_feature 1, 2, 3, 4, 5, 6, 7, 8, 9, 10, 915, 916, 917, 918, 919, 920: n = A,T,C or G

SEQ ID NO: 24047 - DNA, 384 bp, Homo sapiens; identical to SEQ ID NO: 24018

SEQ ID NO: 24048 - DNA, 1074 bp, Homo sapiens; identical to SEQ ID NO: 20298
  misc_feature 1, 2, 3, 4, 5, 1073, 1074: n = A,T,C or G

SEQ ID NO: 24049 - DNA, 1490 bp, Homo sapiens; identical to SEQ ID NO: 21073

SEQ ID NO: 24050 - DNA, 1246 bp, Homo sapiens
  misc_feature 1, 2, 1236, 1239, 1240, 1241, 1242, 1243, 1244, 1245, 1246: n = A,T,C or G
nngacccagctcctgttcagggtgagggttctctgcaagaaccaaccagcagtaggttcaatcccactgtgtcctggctgagttgccttatccaagaagaccagctccccgggacagatctaagccatagtttctagtggggacagtaaggaattaaacccccaacttggctaggtaacgatgtcaaatctcacattaaccttgtctttgtccccactggatagctgttaatctgaatgttgtgaccatttggctgtttctctcttgttctcagacaatactagcaatacacttttttttttttttttttaaagaaaaacagcttaggcgcctttcgcacatttctttcaaatgattgtaaaacatatggggcaacaggaggcattgatcgcgctgcatatgtttagggcagcttttgttttttgtttctttaatggtatagcagcagtgactgagccttcgtgattcctggggacagcttttcagatactctgtttcatcagtatgctttgcacatccggaaggagtacaaaaatccaactgcccgaatttggggcttggaaaataggttttataggtggtcggtccctgggctgtgcaacaactcctcaaagaggggtttatataactagaacccccctgggctgtatttttggtcaaaggagtctccaaggcggcttacaaaagcttcctttttcacttgaccacccttgctcattggttacttgtgaagggaattggtcagtttccacctcagcactttgccttatcaacatgcggtcgccatctagtggccaaaggttgtctccaccagctacccagatggaaggcaaataaatcctttcggccaccctgctgtccatcgtgaactttgggaatgaaatataatggcctgaacgaactgcctttgtgttcagagatcagtgcaacactagggtcagaagactccagaagcagccacttagtagactctcacgcagaactgagaaatgcactagctgtcctgtgggcagaagagacaggagtggaccaggagaggtccaggtgcccgggaagggtttactgtaactgcaatactggcagcccagctgctgaccttgttaagtaaacctttgctgggtggtccgaattctgccctcaaggcaagataagaagttgggtgtaaggattttgtggggggcctggccatgatctttgatatgaatccccgaatcagccaatagttttttttggtcnaannnnnnnn

SEQ ID NO: 24051 - DNA, 363 bp, Homo sapiens
  misc_feature 1, 2, 3, 359, 360, 361, 362, 363: n = A,T,C or G
nnnactcacttagggcgaattggagctccacgaggtggcggtcgcccgggcaggtacaaagactattgtatagactatccgggttagtttgcaagggaagccaatgatgagtaatttgaaagaaattcacctggtgagcaatgaggaccttactgttgctgcctttaaagctgattaagaatttattcctagggaagagtgagctggtacaagaaaccaccccttctttcaatgcaatggacgtgaacaacctgaccctacagattgtccagggccacattgaatggtaggcggaagatgtaattgataattttgtaaacccacatgatattacagtatggacctgtagcaaattcaannnnn

SEQ ID NO: 24052 - DNA, 2608 bp, Homo sapiens; identical to SEQ ID NO: 21241
  misc_feature 1, 2, 3, 4, 5, 6, 7, 8, 9, 10, 11, 12, 13, 14, 15, 16, 17,18, 19, 20, 21, 22, 2607, 2608: n = A,T,C or G

SEQ ID NO: 24053 - DNA, 920 bp, Homo sapiens; identical to SEQ ID NO: 20829
  misc_feature 1, 2, 3, 4, 5, 6, 7, 8, 9, 10, 915, 916, 917, 918, 919, 920: n = A,T,C or G

SEQ ID NO: 24054 - DNA, 534 bp, Homo sapiens; identical to SEQ ID NO: 24036
  misc_feature 1, 2, 3, 4, 532, 533, 534: n = A,T,C or G

SEQ ID NO: 24055 - DNA, 1641 bp, Homo sapiens; identical to SEQ ID NO: 20385
  misc_feature 1, 2, 1626, 1627, 1628, 1629, 1630, 1631, 1632, 1633, 1634,1635, 1636, 1637, 1638, 1639, 1640, 1641: n = A,T,C or G

SEQ ID NO: 24056 - DNA, 516 bp, Homo sapiens
  misc_feature 1, 2, 3, 4, 5, 6, 7, 8, 9, 10, 11, 12, 13, 14, 15, 16, 17,18, 19, 20, 21, 22, 23, 24, 25, 26, 27: n = A,T,C or G
nnnnnnnnnnnnnnnnnnnnnnnnnnngagacagagtttcgctcttgttgtccagaggctggagtgcaatgacgtgatcttggctcactgcaacctcccaggttcaagcgattcttctgcctcagcctcctaagtagctgggattacaggcgcctcccaccatgcctagctaattttttgtatttttagtagagacagggtttcactatgttggtctcgaactcctgacctcatgtgatccacctgccttggactcccaacgtgctgggattacaggcatgagccaccgctcctggcctaaaatttgccttttacaaaaactcaacaaaagatcatctcaactaaggcatactaaataatatttaagacacaaacttacaggctaaaaaaaataaacctgccatagtaacaaacacacactcaggaattacctacacgataaacattttaaattgctaaaccaaatagaaggaaacacaaataacattgtaaagtttgataggtacctgcccgggc

SEQ ID NO: 24057 - DNA, 1641 bp, Homo sapiens; identical to SEQ ID NO: 20385
  misc_feature 1, 2, 1626, 1627, 1628, 1629, 1630, 1631, 1632, 1633, 1634,1635, 1636, 1637, 1638, 1639, 1640, 1641: n = A,T,C or G

SEQ ID NO: 24058 - DNA, 920 bp, Homo sapiens; identical to SEQ ID NO: 20829
  misc_feature 1, 2, 3, 4, 5, 6, 7, 8, 9, 10, 915, 916, 917, 918, 919, 920: n = A,T,C or G

SEQ ID NO: 24059 - DNA, 607 bp, Homo sapiens
  misc_feature 1, 2, 3: n = A,T,C or G
nnnacccattgcccgaatagtgaacactctacccagtcgtttttcatccctcactttcctaccaccctccaacattttggagcctccagtgtctcttattccactctgtatacccatcgtttagctcccatttccaaatgagaacatgcagtttctgactttctgtctctgagtcatttcacttacgataagggcttctagttccatccatattgctgcaaaagatgtgatttcattatttttgatggttgcgtatgtattccatggtatatatgcacattttaaaatctaatcatctgttgatggacacataggttcagcccatgatgttgctattgtgaatagtgaacagttgattattagactgaagagagaaaaggccttcctcccccatgacttaacaggaacgaaggacgttgcatttataaaaggatggccatcaccagctactgggtaggctgaggcttttgatcaccataggttgcaattggtgtgttaggtggacgagggcaagaggatatggtaattagaaatatctaagttacacagcatgtagtttttaggaaactgaaaatcacacacacataaatctaataaagacatgggt

SEQ ID NO: 24060 - DNA, 1490 bp, Homo sapiens; identical to SEQ ID NO: 21073

SEQ ID NO: 24061 - DNA, 1022 bp, Homo sapiens; identical to SEQ ID NO: 23803

SEQ ID NO: 24062 - DNA, 1022 bp, Homo sapiens; identical to SEQ ID NO: 23803

SEQ ID NO: 24063 - DNA, 1545 bp, Homo sapiens; identical to SEQ ID NO: 23819
  misc_feature 1, 2, 3, 4, 5, 6, 7, 8, 9, 1541, 1542, 1543, 1544, 1545: n = A,T,C or G

SEQ ID NO: 24064 - DNA, 791 bp, Homo sapiens
  misc_feature 1: n = A,T,C or G
ncgagtgtaactcccaaagtttgcatggtataaaagacacagaaaacagtccggataaggagtgaatctttcattgctcgcttatgtattttgcctcatgacaataacaacaacaaaacaaaacaagttaaggcagctagcaaaaataaaaagagtagactacaatgttagaataaaggaagaaataatgagaaagggaataaatgcaagagaaataagattaaatcaagagaaaagtaaaaaaccaataatatctcatttgtttctatctgagcttcctagactcaaagtaaggaagggaaccagctcaggctgaggaggcatgcggtctgcagaggttgtatacggtgtccctgtgcatccttaggtgttctggggaggaacaactactcatcaggatagacatttctcctctgcgtccttataagcgctgtcaaggccatgtaacgaactatctattcagcatcagcatcaaacctttgcaacaacagcaaaagctttagggttgctatttgaatgtacactcacacacactcattcccagtccgagtttaaaagtccattattctttgatgttcattaatggtaaactcaaattaaaaactaaaattaacacagaatttttatcctaggaaaaagataacaacgtgaaatatatcgctattggtgagatataaaggagagacatggcagagatggaaccagcttggactaaaaggggatccaccggccgaggaaggcaggtagcccaaggaaggaggcggagatcttcccaaggcttccctccatag

SEQ ID NO: 24065 - DNA, 712 bp, Homo sapiens
  misc_feature 1, 2, 3, 4, 5, 6, 7, 705, 706, 707, 708, 709, 710, 711, 712: n = A,T,C or G
nnnnnnngaaaacacaatgctcaaatttatacagactggactgggtttccatcagtttggaatttggtctactccgaagttgttctgaggatgcctaaaggatttctccgcatcaagtctgggcatctcttcctcagcccctgcactaagttgttggggaaccaccaagctacagagatgttggcactttatgcaatactaaccagcccttttttccattccaaggtactaccttctctgctacaagtcgagcgaggagccccgcatgagccctgacacctgtgccaccattttggaaaaagctggtctcgataactgggctcttggaaaaacaaaagtgttccttaagtattatcacgtggagcagttaaatctaatgcgaaaggaagctattgacaagcttattttgattcaagcttgtgtcagagcattcttgtgttcaagaagataccaaaaaatacaggagaaaaggaaagaaagcgctataataatacagtcagctgcaagaggacaccttgtcaggaaacaaagaaaagaaattgttgacatgaaaaacacagcagtaacaaccattcaaacttctgatcaggaattcgactacaagaaaaactttgaaaatacaaggtgtctgtaaaggagaggagccaaaaatattgagacccccaagacgaccccggaaacccaaaaaaaaaaaaaaaaaaagtnnnnnnnn

SEQ ID NO: 24066 - DNA, 573 bp, Homo sapiens
  misc_feature 573: n = A,T,C or G
acatggtctcaaaactagttagtgtttgagcaagaatctgaacccaggtcagtcacacatgatagccataccattgacaatagcatggagaatactgatgacactataaggtctagttcagcagattaagacagccacaagctatagcttataatagtgcaatgaaagaggagcatcattgtaatccgagtgggcagaaaaattagttgagagaatatagcttatttcacaagagagaaaatgaaagtatatatggattggaggggatgggtcggaaagattctagagtgaaggctgcacaaaagagaagcttgggggaaatttagtgcctccttctaaggatattcattagtccccctcttgtcttgaatataaacacttaagattttttcaatgtaagaaaaatgcaatgaaataatagctgcaaatacccactactaacaattgcttggccttcttatatagacctcccgaggttctcatcttttacatttcaggagtagaatcagttaaaaactaatctttatatgtaagggatgagagagaaaaagaggagggtatgtgtgtgcacan

SEQ ID NO: 24067 - DNA, 1641 bp, Homo sapiens; identical to SEQ ID NO: 20385
  misc_feature 1, 2, 1626, 1627, 1628, 1629, 1630, 1631, 1632, 1633, 1634,1635, 1636, 1637, 1638, 1639, 1640, 1641: n = A,T,C or G

SEQ ID NO: 24068 - DNA, 1612 bp, Homo sapiens
  misc_feature 1, 2, 3, 4, 5, 6, 7, 8, 9, 10, 11, 12, 1612: n = A,T,C or G
nnnnnnnnnnnncgcgccccgtgttgcgaagacgacgggtccacagctgggcgcgaccatagcggcctcccagccaggggggagcgcctacgagagggcctcacgtgatggtcaccactaagaggaggcacaacgcctgttcccgcagaaagcaggcgccccaaaacgcttcagacagaaccatagccagtagacagagctctacttgacttgaggatagagagaaagatgaaaagtccagagccggactgcattgacggagaccatcaccccagagacactaagaccggagttaaggttctaatgacttcattaagtctggccttgaaaatgagaggtctggatggcttctgattttcagctgcagtacatccccttcagagcctaccaaggccaccatgccatgaagagctgccagacaaagcattgtgggagtgccctctgttagaacaattctgatccaggcagggagtagtttgctgcccaagtcttcagcttttccatgtccacacacagacaatccatgaactatgtttcctaaagccagggcaaaacctgaagtctgctggctattctccactaacagtcgaagcttgttcataacatcctcagcctctgtagcctcaataattccagcactgaacgctgatgtacatacacagctaagtgtgtaggcaaggacctcctgaaacgttctgctctggctcccgctgtcatctacgtgcgcagacagcttccggagcaatgctgctacgtgaacgcgggactgcatttggctgctgtggctcatgagggacagaacaagtccaactcccaatatacagcccgtgttgtattcaagactagtgtcaaagcagcaattttccagggcatccaacgacttcatcagaagaaggttcatctcttggccagatatatcactgagtttctcttcacacaagcgagagagaaacatccctaaagcaaggcccatgtggatttgcacggcttgagactcatcagcacttggtttcccaggtaacctggcagtcagcatgttcaggatttcctcaaccttctctttgcaagagataatgaaaactggcacaaggagagacaaagccgtggcggcagcagaacgggcaatggcactagctgtgttttcaccagaataggacttataataaaaccaggagagaagttgccctctgggttggtaatggctatccacaatgaccaagagtgtatcaagtaccatggaaacccactctttcattgaaaggaaattaggttgaacctccaggagcccgtcagagtctgaggagaggctggcttcatgtctagatacgacgacagcaaggctgcttagagctaacagcgcattgcctttcactaccggactctcctttgcagctgccttggtgatctcatcagtcagcatgtctctaacccagagccaggctgtgctttttttgtactgcacctcctcaggttcttcttttccatgttttaactgcaactccagctctcctagtcttccctgtaaaatggcatgataagctcgattcatgtatgcaagccaggcctgtggaagaaaaattgcacggtgccactctgaaagctggatcagacn

SEQ ID NO: 24069 - DNA, 1105 bp, Homo sapiens
  misc_feature 1, 1105: n = A,T,C or G
ncgtccgtcacgcgtccgcccacgcgtccggcggatggatcgcttgaggtcaggctggtctcaaactcctgacctcaagtgatctgcccgcctcggcctcccaaagtactgggattatagctgtgagccactgcaccctcccggaaatgctttttaacggtcacctcctaggggagatgaagagagttaccgcataatcagttttaactgtatttgtaatgtttgtttctttacctgggaggatatgttgtagatacgtgagatagaatacctaagtgacacaatggtgtgcaggctatggctgcaaagtagaaagtttctaaatagcatgcttggatttttatttgaattggatgaagtttttgtgtcctagagaaattcacaaaatgttcctagtttcagataaaaggttatgatttaacatctttgcttttgttctttcttgtctttgaatagaacagtgggggacggtaaggtctgtttgcaaagtacctatgaccatcttacattatttttatgggtggggggcattgactgtggaatgtgggcagtaacttgcacagtcagtaaccgtttgagtaacttcttgttggcatccccattctggcactcctcctctaggtctccacctcacacgctggtttgtgggcggaggggcaggttggtgcgtggggtgtccgggcactggctgtgcatgccttcttcctcttctgtctcttggccaccttttccaaaaagtcaccagtgaccaattctcccagtgtttctttgggactcaatgccttgggcttggcattgggtaaagccaactggccagtttcattctgacgagctctatagtagtccggtgtggacctctgccctccctgctctgcggaagcttcctcagcctttgcttctcactatttactatttgcgggtcctgggggtacccagcgtctcagggttttggctgcccacctgtacgtcggtcctttcaaactgtggtcagagtcaacctcaggtgctgcttttctctagtcactgcatttttttttttttagtagagaccaagtcttgctgtgttgtccagcctggattcaaactcctgagctcaaggaatccn

SEQ ID NO: 24070 - DNA, 716 bp, Homo sapiens
  misc_feature 1, 2, 3, 4: n = A,T,C or G
nnnnccctctcttcttcttgatcctcttcatctttgttactatcagtaactggcttctccctagtctgtgggattataccacttttatctttgataggaagtaaatgaatcagttccttctctggtgcagtttgcagagttcttggtattttttcatatttatctaataatgcgttcatgcttccgtttcttcgcatgaacaggctcactagaagaaagatctcttgttagaaaagatactctttgtcctaaatccttcattaactgtaagtcatcttcatccatcatatctaaaggaagggcttcttcttcttcctcttcttccctctcaatccttttacctggtcgcttttcctttgggttctccaatggaatgggtttcttagacacagcatctttcacagcttgccttagtttcctctgttcttttcggtacttcttgagagtgctttgttgtttaaactgcttattttttagcttgttttcaagtttgactttactagtttttattaacttgcgaaagcttgggatctgttttttatttcttctcgccttcatccttaggccttaaatgaatgccggccagacaagttcaccagaagcagggttactacagaaatcccggggaatgacacacgtgccgaagtccctacactaccagagccggaaacggccttcagtccctcccaatcctccgccgccggaagtccccgcgt

SEQ ID NO: 24071 - DNA, 388 bp, Homo sapiens
cgcggtggcggccgcccgggcaggtactggtctctgtctttacagctgaagcatcagaggatggagtgaccaggctggttccaatgacagttatacggccatggggagtagacatggagtctaattcagtgcttgaggctaagaatgaagttgtatgcattgtggaaattgttccaggagatcttgcaactttcaagtttgaagtcatgtctgtgacagtccaggaatctgatgcagctgtggaagaccaggtggaagggtgttctgtagaagttgtgcgcctctctgtggccggggtgctgtccacccagtggcctgtataactgtcattggaaccagattggtcactccatcctatgatgcttcagctgtaaagacagagaccagt

SEQ ID NO: 24072 - DNA, 251 bp, Homo sapiens
  misc_feature 251: n = A,T,C or G
ccgggcaggtactgcccaagagagacgtctcttactgcctcattaagcatttggagctgttaaacacaaatcaaggcaaccagaaagggcatcttggcttcaggctgggcataaccatcccatttgccacataaaagtctagtggctactctgcaccctttctgggtagaagcagagttagtttggtcatgggggcccctgtgggacagtgttgcccagacaggtacctgccgggcggccgccaccgcggn

SEQ ID NO: 24073 - DNA, 649 bp, Homo sapiens
  misc_feature 1, 2, 3, 4, 5, 6, 7: n = A,T,C or G
nnnnnnncgtccgggggccccggtgcctgctggcgaggcagggaatgggtgctggaagggcgcttggatatcactgaagccacttgctctggaagacggggaactggaggctcgcttatcccattcgctcgcagccgctccctgtaccccagccagtgccgagagggtgacaatgaagaacaagaaaaattactgaagaaaagctgtacgttatatgttggaaatctttctttttacacaactgaagaacaaatctatgaactcttcagcaaaagtggtgacataaagaaaatcattatgggtctggataaaatgaagaaaacagcatgtggattctgttttgtggaatgcggaaaacgccatgcggtacataaatgggacgcgtctggatgaccgaatcattcgcacagactgggacgcaggctttaaggagggcaggcaatacggccgtgggcgatctgggggccaggtatgcaagaagggtctctgggctcagccattgcctgggattccagtcacaatgacaggtgttttggcaatttgtatttactcttttgtaaataactttgtgtctataaccttggcttgaagtggatctgaaaaccacccaacggtttgggtgaatttttttttaaaccgtgaaatggta

SEQ ID NO: 24074 - DNA, 222 bp, Homo sapiens
acgcgggaggcataagccaccgcgcccggccgttgtttactctttaagctaaaatattctctctccacagctgcaactagagagccgcatggtgacctacttgaatcaacaaaatttgagacctgtgattataattctcattatgacgatatataatcaaaagctgtaaagattgttaataattctcaaaccttctgagattattttaaaatccatcttagt

SEQ ID NO: 24075 - DNA, 880 bp, Homo sapiens
  misc_feature 876, 877, 878, 879, 880: n = A,T,C or G
acaagagattcccaccaggatcctgcccatgcaatctttgagactttaaactcactccagctggaaataggaaccaacttaacccaagagactttggttcgcgcggccccggtactttcctgaatgcctctcctaagtaaatggctctagtttctctattggccactgcactgccactaggattcctgcaagggatccgatgggcccagagcaggtagccaaccacttctctgttggatggaatgcaatgctgtttgccagcatgtttgagccagtccttcaagatggattctgagtgactaactggacctaaatttaaatagcacaaagcagccatttgctaactagatttcatacaaatgctctgagttcctggaaaacccacactccttaactttgggactttcaagactcacctaaatcaatcaattaaagctcacttgtgtcagctaatcagggatcagctgtattgactaatgaaaactaagcgagtttcaaattttaaccattcatttttgtagaagacttgattgggagcctgggtatgaatacttgctataaaatctgagcattccctttgttctctggagcaaacaatgttaagttgttaactctctgtacctttctctagaactggatggaaacaactccatctgaaatgcagccctaataccagggaactcctacagtaaagcgctaaacaactttattactctaaccaacgtttatgtccctaatcagcaagaagtagttagaatggtcatcatccctttccctcaagattgaggaatggacataaaaaggaggggatttgtaactgctccagactgatctgttgtcagaaaggggctcttgaaccagaccatgaaagagggnnnnn

SEQ ID NO: 24076 - DNA, 1946 bp, Homo sapiens; identical to SEQ ID NO: 23780
  misc_feature 1, 2, 3, 4, 5, 6, 7, 8, 9, 10, 11, 12, 13, 1132, 1133, 1134,1135, 1136, 1137, 1138, 1139, 1140, 1141, 1142, 1143, 1144,1922, 1923, 1924, 1925, 1926, 1927, 1928, 1929, 1930, 1931,1932, 1933, 1934, 1935, 1936, 1937, 1938, 1939, 1940: n = A,T,C or G
  misc_feature 1941, 1942, 1943, 1944, 1945, 1946: n = A,T,C or G

SEQ ID NO: 24077 - DNA, 281 bp, Homo sapiens
actttcaagtcacctggttcccatacagctgacttttcccagcactggaaacacgacgcatgcctagacctttagagaatcctaattttgcccacccccaactgtcctgtaacaaagcttggttcacccaaaaatgccaggcgagtctcaaacccaaggctagttaaaactattgggaaaggtaggccccctttccacagggattgctaacctggtagtgtgtaagctccgaattgctgggagttgcctggccacattgacaggaaagtctactggagggt

SEQ ID NO: 24078 - DNA, 1641 bp, Homo sapiens; identical to SEQ ID NO: 20385
  misc_feature 1, 2, 1626, 1627, 1628, 1629, 1630, 1631, 1632, 1633, 1634,1635, 1636, 1637, 1638, 1639, 1640, 1641: n = A,T,C or G

SEQ ID NO: 24079 - DNA, 1715 bp, Homo sapiens; identical to SEQ ID NO: 23747

SEQ ID NO: 24080 - DNA, 1641 bp, Homo sapiens; identical to SEQ ID NO: 20385
  misc_feature 1, 2, 1626, 1627, 1628, 1629, 1630, 1631, 1632, 1633, 1634,1635, 1636, 1637, 1638, 1639, 1640, 1641: n = A,T,C or G

SEQ ID NO: 24081 - DNA, 435 bp, Homo sapiens; identical to SEQ ID NO: 23718

SEQ ID NO: 24082 - DNA, 2831 bp, Homo sapiens
  misc_feature 1, 2827, 2828, 2829, 2830, 2831: n = A,T,C or G
nggtttcaaaatattatattatttcataaataatttcaagcaaatacagacatccacaatgtagaacatgagagacccctccctcaagtttccacctcccaagggaagtttatgtatttttctaggcccttttctatgtctttacatctctgtctcacacacacacacgtatacacacacacagtttatttttaataaaataggattataccacacacatcctgtcacttgcttttttgcttaagagtatatctaagagaatcctttgtgtcagtgaagctggagctacctcattcttttaactggctgcgtggcgttccattgagtgtctgtcatcatgtgtctagccgagtggatggatagtctgcttgtttttagtttttgctcttaacaaacactgctgcagtcagcatccttgcacagatttctttgtatacttgtattagtatttctgtaagatctgagaagtggaatttgtagggtcataggttatgtacacttaagtttttgacactcactgccaagtcatctgtcagaattctaaactaaagacatgtttggagtgtggatttatcttcagtttttctttggacaagaggaagctgtgaaagattttgctatcagaaaattttggttctttgtcttttgcacatgttctttgagtcttagtatctgtaacgtggcgctactctctctatcatgggggggcatgttttgacattaaattgacttttaagaaaaacatgtcactaacctgaagctcagccacacagtgacttttaaggttttatttagactttactgttgttctcatgagagtaggtacagactgcataaggtttagaatcccagcatatgtctgaaacgacgggactttcactgtgatttccaccagagaaattatagcagagtggctgagcatgtgctctgaggccaggccccagctctgctgctgacgagctgtgtggtcctgggcagagtggtctccgagttccagtccctcctctgtaaaatgggcatgattagagtgcccaccgcattagggatgttggggtgagtcagtgtgaccccacgtgcacagaaagtgctgcgagtggtgcatggtgagaggttgatgcaggtacttagcccttggggaacacaggtagttccttttcactgtgtttaatttgggaaaatccagatccacatcattgtagagtctgagggttagaaggaagtcattgtgtctaacataacaacagagcagtttgtgtcactgagctccagtctgtgctggattattgatattgttggtggcggtcaccattcctggaaagggactgtcccaagccacttaccttcccgaggagtctgctggttctccttgaggatagtgcttagataacagactcattaaacatttactgagtgtctgtcagggatcattcacatccacatcatcctcccggcccctccccgtgttgttcatggagggagtactggcggtccccattttcatgtatggagacttcaggtgaaagaagttaagtgaattctttgttgagtcacaaatcttgagccagtcagaatttgaacctaagatttttgactgctggttgtcacacttcccgccccacactcaactgttgtgtgaatgagccagacacattgcttaacctgagtccgagatggacaatggtataggaaagatattcggtatggagaatcagatgttaacttgtgttgctatttttgttttgttttgttttgttttgtttttgagacaaggtcttgctctgtcacccaggctagagtgcagtggcatgatcagggcttactgcagcctcaccctcgatttcctgggctcaagcaatcctcccacctcagcccccaagtagctgggcctacaggtgcgtgctaccacgcctggccaattttttaaattttagcacagatgaggtctcactatgttgcccgggctggtctcgaactcctgagctcaagggatcctcccgcctcagcctcccaaagtgctggtgttacaggcataagccaccacgcctggcctgtgttgctattatatttggcaggaacccagagtccagaacatttcatctatgatgggttagataatgtgtctagttgtttgcatgccaatttcagtagcctcagttattcaacctaggagatttttctacctctttactaccctgctgaagttgctcttcagcagaaaatctttgtggaacacattccacactttgaaatcttcgtggaacaaaagatatttgtggaaccaatctttgtggaacatattccagctttttgaatgagtgcatatccagtagtacctttaaagtaacactttgtacataacaaatactcagcaaatgtgaaactttatttgctcttacttcaaaattagtccaaaatgttggaaataaaatataagacattgatctagatatgaggtttttctccttcattctcagctgtcgaagaaatcaaagtagcatatgcacaaggttaaaaaccacatatacaaatactatagaacagcttataatgaaaaccttgcctgcctttataaaaaatgtgattatcttcttctgttaatgtcaataaaagatggtttgtcctagaaggtctataaatggtattatgttctggaggaaacctagcaaaaactttgctagttagacttgttctaattgggtcccattaaattggctattaggattaatttagcaacaccggttgatatataggggacggtgagagaatggtggcttaacggggccggtttatgtggtggaaggacgggaaaaggcggtttagaggaacnnnnn

SEQ ID NO: 24083 - DNA, 770 bp, Homo sapiens; identical to SEQ ID NO: 20288
  misc_feature 765, 766, 767, 768, 769, 770: n = A,T,C or G

SEQ ID NO: 24084 - DNA, 1641 bp, Homo sapiens; identical to SEQ ID NO: 20385
  misc_feature 1, 2, 1626, 1627, 1628, 1629, 1630, 1631, 1632, 1633, 1634,1635, 1636, 1637, 1638, 1639, 1640, 1641: n = A,T,C or G

SEQ ID NO: 24085 - DNA, 1490 bp, Homo sapiens; identical to SEQ ID NO: 21073

SEQ ID NO: 24086 - DNA, 651 bp, Homo sapiens
  misc_feature 644, 645, 646, 647, 648, 649, 650, 651: n = A,T,C or G
acttcagtcttttatcagttaaaatactaacagatagaaaataacaaagaatagactgttttcctgcctattgtaagacaaaatgaaatgtttactgttggaaacactatacctttttttagcctctctcccctatcttcttattttccttgatggactctttctcttatctgagcaaactttttgtttgtttgtttgactcagtctctcagtgaacagtatagcgacccattagctccagcgttggactctgactgtgtcaagagtagaagtttgaagtgcaattcttatccatcatatttctccaattattaactctcctttactgccttttaaatacttcacaaaatggaaaccccttttgaataagaacagccgattttctgggagatggacaaggaaaagctatggagagatgctgggtttcttagtttaacatgtggctgcttgaaagttgctattagatccagagaacttttttgttaagtgtgattagagttcaaagaaaatgtttatttcttagatacttctattgaaagaaacataaggggtctatatctgtatatctataataaaattcagaagggcagtatatatttaaatctatattaactgcacacataaaaacaagaagtatatgtgannnnnnnn

SEQ ID NO: 24087 - DNA, 810 bp, Homo sapiens
  misc_feature 1, 2, 3, 4, 5, 807, 808, 809, 810: n = A,T,C or G
nnnnncaggtacgcggggaatctaagacctgaaactactgccacagccatgcataaaatgaaatgctgctgctttcctctctgttaaagagaatgttcaaggccgaggacacataaaaaagagcagcattgctggctctgttatttagctgtgtgttcttgaaaaagtcacttctccagacatatctcagcatttataacctaagactgaatcactgcattttacccttaatgaggtgcgcttacactaatctttttgaaacagtacttaaattgtagtaggacaagccgcagacaaaacccctcagccagcgagtttaagaaagaagggcttcattcggccgggatcttcggcaatgactcacgtctccaacaaccaagctccccaacagcaatggactcttgtggctgacttcactcaccatgctcacactgcctccttgtcagcatgtcgctgtaaatagtcgtggtgtggtctctgggagtcacacatggatacatttcacatttatcacgtggaaaatagaagattgagcatggggctctagtgcatcacagtggttacaattaacttggcctgaaaattctatggcaacaggcatttaatcagtgggagcgggaagagggctcatctgtatctcgggatgcacaggcaatggggaatgcatgaagtcaaataaagctcacaaggacaaggtggacttccctttatttaccatcttggaggttggccctctcagttgtcagataaactttgaacgcggacctggaaggagaaacttcttaaaatttataagttcctttaaannnn

SEQ ID NO: 24088 - DNA, 1214 bp, Homo sapiens; identical to SEQ ID NO: 20119

SEQ ID NO: 24089 - DNA, 810 bp, Homo sapiens; identical to SEQ ID NO: 24087
  misc_feature 1, 2, 3, 4, 5, 807, 808, 809, 810: n = A,T,C or G

SEQ ID NO: 24090 - DNA, 1641 bp, Homo sapiens; identical to SEQ ID NO: 20385
  misc_feature 1, 2, 1626, 1627, 1628, 1629, 1630, 1631, 1632, 1633, 1634,1635, 1636, 1637, 1638, 1639, 1640, 1641: n = A,T,C or G

SEQ ID NO: 24091 - DNA, 3881 bp, Homo sapiens; identical to SEQ ID NO: 23987
  misc_feature 1, 2, 3, 3863, 3864, 3865, 3866, 3867, 3868, 3869, 3870,3871, 3872, 3873, 3874, 3875, 3876, 3877, 3878, 3879, 3880,3881: n = A,T,C or G

SEQ ID NO: 24092 - DNA, 1731 bp, Homo sapiens
  misc_feature 1, 1722, 1723, 1724, 1725, 1726, 1727, 1728, 1729, 1730,1731: n = A,T,C or G
ncaccacgcgtccggagcaaaacagataaattattttgagaatcacttgaacgcaggaggcagaagttgcagtgagccaagatctcaccattgcactccagcctgagtgacagagactcagtctcaaaaacaaaaagtaaaggtcttgggtttctctctgtaaatagcctttgtgtaatggtctttagattaatatcctttgactttattaataagtacctgtgtgcccaggtggatctcagctaagtcatccttaaattctgttcaaatagaaataaaccataaaatgagcctaactataacccacactcacggatcaagcattcccccaaaagttcagtgcgattcaggtaaccttgacctaaacttgtacactccggtgtacatctttgaccataaactctgggagatttccctctggatttgggatcaggagcccagtagggccccattgctgaatgtttatcacacttctggctagggcttatggatgagcagaccacgtaggagctaggatttactcagttccacctcactgacagcttttctaggtgccaagcaactgacttttcctgtgtaaggaagcccaagtacttgaccagtgatatatatggccatggcaaaagtataaatggatggatgtagaccatattcaacgcagaatacattttagatcggtatctggcattgtaatcattttgtcttttgaattaacatgccctgcttgtcttttctgaatggaagggtaggaaagtggaaggtactaaaaaggaaaatgtagttttagtttcttttctaagctaaagaactggctttactactgctatattttactaccacatagtagtgtagatgtagtataacttgtggcttaggaatgctttcaaaaaggttacctccatagtcaaaaaaagggggagtatacagctgattgtgcatttatgaaactgcatttcaatatgctatgctgttactgtgcttagacacttccttacgtttgagttccaaggagagagagtgagaagaggaactcctttggctgagctctggtccaaattaatgtgaatccccaaagtaaattgctgcatatgaacaacaggttttaggtttaaattgaagatacattcattttatatgtatttgttgtgaatgagagaaattgagtgatctgattggccattaaaattatggtgaatgggtcgggcgcagtggctcacgcctgtaatcccagcactttgggaggccgaggtgggtagatacctgaggtcaggagtttgagaccagcctgaccaacatggtgaaaccccatctctactaaaaataccaaaatcaccagggtgtggttggcccatgcctgtaatcctagctactcgggaggctgaggcaggagaatcggttgaaccaggaggcagaggtgccagtgagctgagatcgcaccactgtaatccagcctgggggtcagagcaagaatctgtcccaacaggaaaatctatgggaagggcgggcgggggtcaaaccggtatcccagacttgggagcggggagggggcacccgatcagaggcaaacagctggccattgtggacccccttgaatatcaaaataccgggggggggggcggagaaaccacgagttgcggcaaattaccaccggggggaacagcccggaaagccaaaaacgaactactccctatttgtgtttttcttatatttagtcatatatcnnnnnnnnnn

SEQ ID NO: 24093 - DNA, 929 bp, Homo sapiens; identical to SEQ ID NO: 20094
  misc_feature 1, 2, 3, 4, 5, 6, 7, 8, 9, 10, 11, 12, 13, 14, 15, 16, 17,18, 19, 20, 926, 927, 928, 929: n = A,T,C or G

SEQ ID NO: 24094 - DNA, 388 bp, Homo sapiens; identical to SEQ ID NO: 24071

SEQ ID NO: 24095 - DNA, 648 bp, Homo sapiens
  misc_feature 1, 2, 648: n = A,T,C or G
nnatcgagttttctggagtatcctgaggaatgtttgtttgactttgtttgccaacagtttaggggaaggggaaagaaccacaataaccagtgtcctgggatctcattgatttcagattccctgccccaagcctacacccaattacctgccatagttggggaatcaagtagcatcctgtggctggaagtaaatgcaaaacactagtccgtgagatataaatactgttaaatgatggttttttaaggtcctgatccattatatgaagtagacaaaattcaaatttatttattcatttattttctcaacaaatgaatatatattatgtgccaggatacaagtagtggcaaattagacacagttcttgctttcatgaaacgtatagcttcatgatttagtatagacattgtcaaatcatcacccaaatataattacaaagtactctaaaggaaaggcacgtgatgctgtgagaacactcaactgggaaaccggaatcacctttgagaaactgtttcaggggctctaggaagagtctactgctcccaaatatctctgctacccactggccattgctttacattccttaactaagctttcaccttttagtactaacctttgatgactgatcaaatacaaatgccccaagaagan

SEQ ID NO: 24096 - DNA, 800 bp, Homo sapiens; identical to SEQ ID NO: 23821
  misc_feature 1, 796, 797, 798, 799, 800: n = A,T,C or G

SEQ ID NO: 24097 - DNA, 1022 bp, Homo sapiens; identical to SEQ ID NO: 23803

SEQ ID NO: 24098 - DNA, 474 bp, Homo sapiens
  misc_feature 471, 472, 473, 474: n = A,T,C or G
acttgtgaaaggaaaatacatggtgcttgaatatagcagggaggcctgctgaagtcagagagggtgatctttaggaaaggctttcctgaagaagtggcactggtgaaatgatggctgaagcatgaatagaagtttcctaggaaggctgggtgtgtggtgtgtggtgtggtgtgtgtggcgaagtgctgggattacaggagtgagctgccgtgcccagccggcaaagttgattctgaaaccctgtattacctcaataatcgttgaagtgcctattatatgcaatgcaacacagccgggtggctaatgctgtgagcaccggatccatgtgttaaaatcctggctgtcctacctgctagctgtgggaacttgaggaaggcacttggacttatctggtcctcagtttctctatattgtaaaatggaaattaatcataactacttcctgagggtgctggcagcagtaaacaatgannnn

SEQ ID NO: 24099 - DNA, 1641 bp, Homo sapiens; identical to SEQ ID NO: 20385
  misc_feature 1, 2, 1626, 1627, 1628, 1629, 1630, 1631, 1632, 1633, 1634,1635, 1636, 1637, 1638, 1639, 1640, 1641: n = A,T,C or G

SEQ ID NO: 24100 - DNA, 1022 bp, Homo sapiens; identical to SEQ ID NO: 23803

SEQ ID NO: 24101 - DNA, 1490 bp, Homo sapiens; identical to SEQ ID NO: 21073

SEQ ID NO: 24102 - DNA, 683 bp, Homo sapiens
  misc_feature 666, 667, 668, 669, 670, 671, 672, 673, 674, 675, 676, 677,678, 679, 680, 681, 682, 683: n = A,T,C or G
acgcgggtgaagaggacaggagtagttcttgtctgcaggctaaactgacagatctacaggtcataaaaaatgaaactgatgctcgctggaaagagtttgaaattatttcattgaagttagaaaatcatgtgaatgacataaaaaagccttttgtaattaaggaaagagacacactaaaggaaagagaaagagagcttcagatgactcttaataccagaatggaatctttagagacagcactgcggcttgtgttacctgtagagaaggcatcacttcttctctgtggctcggacctgcctctccataaaatggccatccagggatttcatctcattgatgctgatcgcatctatcaacacctaaggaatatccaagattccatagcaaaacagattgaaatatgtaaccgcttagaagagccaggcaactttgtattaaaggagttacacccatttgatctacacgcaatgcagaatattatactgtaatactaaacacaatttgaaggaatgaagccacagggtgcagaggcgctgaagatactctgcaaagcgtctgggagactctgtggcgtctgcgcagcacagctaaactgctctgctcgagcccgcttacagacctttcagcctcagatacacaggtggcacaagaaaatacgttgacagnnnnnnnnnnnnnnnnnn

SEQ ID NO: 24103 - DNA, 1309 bp, Homo sapiens; identical to SEQ ID NO: 23323
  misc_feature 1, 1308, 1309: n = A,T,C or G

SEQ ID NO: 24104 - DNA, 480 bp, Homo sapiens; identical to SEQ ID NO: 24033
  misc_feature 425, 479, 480: n = A,T,C or G

SEQ ID NO: 24105 - DNA, 6135 bp, Homo sapiens; identical to SEQ ID NO: 23942
  misc_feature 1, 6115, 6116, 6117, 6118, 6119, 6120, 6121, 6122, 6123,6124, 6125, 6126, 6127, 6128, 6129, 6130, 6131, 6132, 6133,6134, 6135: n = A,T,C or G

SEQ ID NO: 24106 - DNA, 385 bp, Homo sapiens; identical to SEQ ID NO: 20268

SEQ ID NO: 24107 - DNA, 651 bp, Homo sapiens; identical to SEQ ID NO: 24086
  misc_feature 644, 645, 646, 647, 648, 649, 650, 651: n = A,T,C or G

SEQ ID NO: 24108 - DNA, 764 bp, Homo sapiens
  misc_feature 1, 24, 613, 758, 759, 760, 761, 762, 763, 764: n = A,T,C or G
natagggagtcgacccacgcctgngttgcagcccaacttcatcacttactagcactgtgactttggacaagttcatctcgagcctgactacttcatctgcaaaatggagacgataataatatctatttcatatagctgtcaggagaatgaaaaaatatatgtaaagtacttaggtcaatacaaataaagggctaaataaattttggctactgttgttagggactagtcatgtttttagagccattaaatcaaatgtcattgattggttataaaaggaccagttgtacattttgggattaaaatcaacatgatagtaggaccctataatgtttaattgtaacacattttcacttccatatattcagatatatgttttccattttcaaaggagatttgaggccactaaacattttttaaagcacaaatgcacaagaattgaacaatgatctaacctaattttgagcagataaggcaaaaatgaaggatgagaatgagatcatatggaagaccatagttaaaggatgctatttcaattgcgcaataacaaatcttagctgagaggcctagtagttatggccaaagggagacatatatttaggcataatcttaattntattttattgtttaatttagatgagatccaaatggatgtaggaagtttcacggttgcagtcacgtataatgtgagtttaactcatgcttcataagaaacaggaactaagccgggtgtggtggcttatgcctgtaatcccagcaannnnnnn

SEQ ID NO: 24109 - DNA, 1641 bp, Homo sapiens; identical to SEQ ID NO: 20385
  misc_feature 1, 2, 1626, 1627, 1628, 1629, 1630, 1631, 1632, 1633, 1634,1635, 1636, 1637, 1638, 1639, 1640, 1641: n = A,T,C or G

SEQ ID NO: 24110 - DNA, 1641 bp, Homo sapiens; identical to SEQ ID NO: 20385
  misc_feature 1, 2, 1626, 1627, 1628, 1629, 1630, 1631, 1632, 1633, 1634,1635, 1636, 1637, 1638, 1639, 1640, 1641: n = A,T,C or G

SEQ ID NO: 24111 - DNA, 435 bp, Homo sapiens; identical to SEQ ID NO: 23786
  misc_feature 1, 2, 3: n = A,T,C or G

SEQ ID NO: 24112 - DNA, 2033 bp, Homo sapiens
acgcgggcacagtgctttaaattaaagcaagtttgcccataggacaaaagagcatttgattcccttttttctgtcacatgtcccttgaggctggacttcaggaatcctggaaaattaatatgagtgcagcatgtgaggggtcagagacaggccagcagggcgtctgcattcctccctgccacaggtctctccccagaggctggtttagtgtagggtattgccaggaaacggactgaggctgctttgctaagagctcctgaaaatgccctgggcctgtcctggcgtttctgaagagccctcatacagggacagccaccatctgggtcaaggaagtctgggttccctgctggtgggctccatcctgcgatggagtgaaccaggcgagaaaggatgacgatgttcttcatgttgcacctggacatgccccaggaacagagacttgcccaggtggcaacactggcacagatgttgacggctgcccaactggtgccacactgagcagggagccttgtgctgcacagggctgggccctctctccagtttccttcctgcaggcatccaaataccctggaagggatttaacccctgaattccagagggaagaaagaagaacagtgaagaagtagaactggtttctgtatggggagaggaaagtcttagggacagctgcaggcggggtctcaggctgctccttggcaccagctacacagtagtgagctttcccagctttaccgatgaggaagaagttcaaatagatagacttcagcattttaattattttcctataaatgtatttatgtgtagtatgctagcaccagccagtaagctgtgccacacatatgaatgggaaagcgaggcagttgtgctcgtgtgagtttctgcaggcttgtgggtaattaccttgtgtgcacgcctgcacgtgcagaatagtcactttctgctggtcagtttctttatccacccatggtgccccagccccaggcaggtgtggagaccagcatttcagaggacgcgctgtccacagcctcccgggtctgagtggatcattgggcaggggtggagacagtgcgctgccctctgagctggaagcctgtgcttcagggagtcataatgggcctgtgctaagtgggtgatgcagtggacatcccagggcgactagaggtggcagtatcgcgaatttgcaggtttattgaacaagaggtaacatcggagaggatcttgccttcggattcagcaagtatgaaggcagaagagcatggagagcaaggccccacagcctgcttagtgagttggaaggcccagcaagaacctgtttctgcagcagccaccagctcccatcaccccttgaccctccagctcatgctggagaagagggaattttggctgtttaaagaacacagttgtgaatctcagaatgtgcctgaaaggaatactgacagataaggccagaaacaaaactgatggcttgaaaaacatttttatggaatgtatttactatccttttgttttactatagaggtagatgggactcttaacttttgggtacatggaaacatgctgaaaactgaacacaatcctgatcatcactcctgcctggctgtctcctgggaggctgccgggtgccacggagctgggacacagcagagcccgctaggtgttgcagggccctggaggccaaggccaccctgtgtggggtccctgttggcagccaggtccctacacaaacaagtaatcctgtttggcctcctaggttttgcatatgacctgcagcctaatttggggtgtaggggaagctctgctggcccctgctcctttgtatgttgggtgactttaatggctggccacatacccctttctcccagctactcattcactgacttgggtaagttctaagacagttcgcacttagaaaagaatgtgacacatcaacattaacttttcctgaaaagaagagcttgcctaacatggtcctaaagaagcttggaatttataagactttcctttataagatatagtggggggtttttttgggt

SEQ ID NO: 24113 - DNA, 1022 bp, Homo sapiens; identical to SEQ ID NO: 23803

SEQ ID NO: 24114 - DNA, 2049 bp, Homo sapiens
acgcgggggggacgtaaggtggggcggtgaaagaagtttgctgacgaaggtggcgactgaggcacagagtgaaggggaggtgccagcccgcgaatccggccggagtgatgccatctgcagttttgtgatctgcaatgattcttcccttcgaggtcagcccattatctttaatcctgacttttttgtggagaaactccgacatgagaaacctgagattttcactgagttggtggtcagcaatatcacaaggctcatcgatttacctggaactgagttggctcagctgatgggggaagtggaccttaagttgcctggcggggctggcccagcatcaggattcttccggtctctcatgtctctcaagcgaaaggaaaaaggagtgatatttgggtccccactgacggaggaaggcattgcccagatataccaactgattgagtatctacacaaaaacttgcgagtagagggtttgtttagagtaccgggtaatagtgtccgacagcagattttaagggatgctctcaataatggaactgacattgacttggaatcaggggaatttcactcaaatgatgttgccactttgctgaagatgtttctaggagagttgccggagcctctgctgacacataaacacttcaatgcacacctcaaaatcgctgatttgatgcagtttgatgataaaggaaacaagaccaatataccagacaaggaccggcaaattgaggctctccagttgctcttcctcattctccctcctcctaatcgtaatttgctgaagttattgcttgatctcctataccagacagcaaagaaacaagacaagaacaagatgtcagcctataaccttgcccttatgtttgcaccccacgtcctgtggccaaaaaatgtcactgcaaatgaccttcaggagaatatcacaaagttaaacagtgggatggcttttatgattaaacactcccagaaactttttaaggctcctgcttacattcgggagtgtgcgagattgcactatttgggatccagaactcaggcatcaaaggatgaccttgacctcatagcttcatgtcatactaagtcctttcagctggcaaagtctcagaaacggaaccgggtagattcctgccctcaccaggaggagacccagcaccatacggaagaggcactgagagagctgtttcaacacgttcatgatatgccagagtcagcaaagaagaaacaacttattagacagtttaataagcaatcattgacccagacaccagggcgagaaccttctacttcccaggtacaaaagagggctcgttcgcgctccttcagtgggcttattaagcggaaggtcctgggaaatcagatgatgtcagaaaagaaaaagaagaaccctactccagaatctgtggccattggtgaattgaagggaaccagcaaagaaaataggaacttattattttctggctctccagctgtcacgatgacaccaacaagattgaagtggtctgaagggaagaaagaggggaaaaaaggatttctctgaaggatccagagttgtctcctatggtccatgcagaattttctgtttagtgggcaggtgttattcctgcccacagcaaagcttggacttgcagcttgcttgctgcattttgaattgtcaaagccaactaataccgtgacccgactgatacctctaaccccactcactggatgatgtttgcaagctgtgccttctgagagagtgcttaggccctgtctctcttttttaatattatggggaaaccactaactatccaaccagcttatacagcacactaaggtgggcttcagtgctcactcaatgtgtttaggcagattccacttttgaaaaaaaatatgaaatgtgtgctcaactgccagtaattttttaaaaagcactgtcccagtggattgatgttgtttttaatggatattttgggtttttctctgttttgatagtaaaaaaaaaaaaaaaaaaaaaaattggctatttctttgttttaaaagccatgtttttggttgggctctaagctagatatc

SEQ ID NO: 24115 - DNA, 433 bp, Homo sapiens
  misc_feature 1, 432, 433: n = A,T,C or G
nacgagggggtttcgccgtgttggccaggctggtctcgaactcctgatctcaggtgatccgtccgcctcggcctcccaaagtgctgagattacaggcctgagccaccacgcccggccgagtcttagtttctttatccggaaaggccacttcctcatattcaaggcctctgccaacccagtttttgttttcttctcacagcatgtgagagtctttgtttcacccatacatgttagaattccgtagacaatgtaatcattcaaaaactatttattgaatgcctactgtgtgcctggtactggggatactccaacaatatccctcactcagctcattttccaggggatggaggcatgtaaaaatattatttcaaataatataagtactctaataaaaattagctggcgggggcatgtagaaaagctgttttacann

SEQ ID NO: 24116 - DNA, 532 bp, Homo sapiens; identical to SEQ ID NO: 20375
  misc_feature 1, 520, 521, 522, 523, 524, 525, 526, 527, 528, 529, 530,531, 532: n = A,T,C or G

SEQ ID NO: 24117 - DNA, 1641 bp, Homo sapiens; identical to SEQ ID NO: 20385
  misc_feature 1, 2, 1626, 1627, 1628, 1629, 1630, 1631, 1632, 1633, 1634,1635, 1636, 1637, 1638, 1639, 1640, 1641: n = A,T,C or G

SEQ ID NO: 24118 - DNA, 386 bp, Homo sapiens
acgcggggagagagaaggttaagagcaacaagatgggaggcagctgcatggaacctgtcccactgaggaagtaaaacagagttttactcttgttgcccaggctggagcgcaatggtgcgatctcggctcaccgcaatctctgcctcctgagttcaagcgaggagcaaccctacctgatgggctggacttctgcctggattggagtttgatcatgcctccatatgggtgtttaccaggcgtatgcattgaacctgagtttgtctcttcaatacaaggaaaatctctgccgcttagtgattttccaagaaacatgagcttctgcctttcaatgaggaagatactcagaagtcatgttcgagcactccggaaaatgtccttggagtttc

SEQ ID NO: 24119 - DNA, 2246 bp, Homo sapiens
  misc_feature 1, 2, 3, 2246: n = A,T,C or G
nnnccgtagggaaggagcgaaccggagagcgtcgtcctgagaggagtgaaggcggcaaaatggcggaccgcttctcccgcttcaacgaagaccgagactttcagggtaatcactttgatcagtatgaggaaggacacttggaaattgaacaagcgtcacttgacaagcctatagaatcggataatattggacaccgcttactccagaaacatgggtggaagctgggccagggattgggaaaatctcttcaggggagaacagatcccattccaatcgttgtcaagtatgatgtcatgggcatgggtcgcatggaaatggagcttgattatgctgaagatgctaccgaacggcgccgtgtcctagaagtagaaaaagaagacacagaagagctgagacaaaagtacaaggattatgttgacaaagagaaggcaattgccaaagccttggaagacctcagagccaacttttattgtgaactgtgtgataagcaatatcagaaacatcaggaatttgataaccatatcaactcctatgatcatgcacacaagcagagattaaaagatctgaagcagagagagtttgctcgaaatgtctcttcaagatcccgcaaggatgagaaaaaacaggaaaaagcccttcggcggctccatgagttggcagagcaaagaaaacaagctgaatgtgcacctggaagtggtcccatgttcaaaccaaccacagtggctgtagatgaagaaggtggagaagatgataaagatgaatcagctacaaatagtggcacaggtgccactgcttcttgtggcctgggatctgaattctccacagataaaggaggccctttcactgcagtacaaatcactaataccactggactggcccaggctcctgggttagcctcccaaggcatcagctttggcattaagaataatctggggaccccattgcaaaaattgggagtgtcattttcttttgccaaaaaggctcctgtcaaactcgaatcaatagcatcagttttcaaggaccatgcggaggaagggacctctgaagatggaacaaaacccgatgagaagagttctgaccaaggactgcagaaggtaggagactctgatgggagcagtaatcttgatggtaaaaaagaggatgaagaccctcaggatggagggtcccttgcctcaacattatccaaattaaaaaggatgaaacgagaagaaggagctggggctacagagcctgagtattaccactacatccccccagcacactgcaaagtaaaacctaattttccctttctactttttatgagagccagtgaacaaatggatggtgataatactacacacccaaagaatgccccagagagtaaaaaaggcagttctcccaagcctaaaagctgcatcaaggcggcagcaagccaaggagcagaaaagacagttagtgaagtctctgagcagccgaaggaaaccagcatgaccgagccctcagaaccaggaagcaaagctgaggcaaagaaggccttaggaggggatgtaagtgatcagagtttagaaagtcatagtcagaaggtttcagagacccaaatgtgtgagtccaactcttctaaagaaacctctctggccaccccagcagggaaagaaagccaagaaggacccaaacatcctactggtcccttcttcccagttttgagcaaagatgaaagcactgccctccagtggccatcagaactattaattttcaccaaggcagaaccctccatttcatacagttgtaaccctttatattttgactttaaactttcaaggaacaaagatgccagaactaaaggaacagaaaaaccaaaggatataggaagctcctcaaaggaccatctccaaggcctagatcctggtgagccaaataaaagcaaggaagtgggcggagagaaaatagtacgttcctcaggaggcagaatggacgcacctgcttcagggtctgcctgtagcggcctgaacaagcaggagcctgggggtagccatgggtctgagacagaagacacagggagaagccttcccagcaagaaagaacgatctgggaagtcccaccggcacaaaaagaaaaagaagcacaaaaaatccagcaaacacaaacgtaaacacaaggctgacacagaagagaaaagctctaaggcagagtcaggggagaaatctaagaagcgcaagaaacgaaaacgaaagaagaataagtcatcagccctaccagattgaacagcn

SEQ ID NO: 24120 - DNA, 3945 bp, Homo sapiens
  misc_feature 1, 2, 3, 303, 409, 427, 3917, 3918, 3919, 3920, 3921, 3922,3923, 3924, 3925, 3926, 3927, 3928, 3929, 3930, 3931, 3932,3933, 3934, 3935, 3936, 3937, 3938, 3939, 3940, 3941, 3942,3943, 3944, 3945: n = A,T,C or G
nnnaactcagacaggcagataaagagagatcaaagagatgagcatgagatacagtcccctcgtgcccaaggagacagggtggttacagacatggaaaatctgagaataatcacctctgataaagatcacagaagctgcccgggaggtgtttggtaagcttggagttacgtttgtggggtggatgggcagaagtcagatttcatagcactgaggatgcagcacaaggagaagttcaagatcaattcctaagacaacaacttggcactaaaaaacataaactatgttctgaaggctttaccctgnggacaagggaagggaggtgataacagcagaagtggcagccactggcgatcctttctttccatggtttggcttctactccaaagccacttatttgtgcattctacanaaagtttcttgtcctttntgaaataaagctcttatcctaagctccattcacacctgcgtgataatgaaccagctagtacttactgtactcaggaagcatgcaaagttctgaatcttagaacagaaagtgaaagcaaaagtaaattccccttcagtcaaatctcgtccggcatgatttaagattaaattcatgtattgaaaatattgttcagaccccatgtgacataactggagccagtgcagtgccatgaagaactacgagattagcctggatattaacttgtcttctagagaatagatttcatgttccattcttctgcaatggttaattcacacagaaaaccaatgtttaacattcacagaggattttactgcttaacagccatcttgccccaaatatgcatttgttctcagttctcagtgccatctagttatcacttcactgaggatcctggggctttcccagtagccactaatggggaacgatttccttggcaggagctaaggctccccagtgtggtcattcctctccattatgacctctttgtccaccccaatctcacctctctggactttgttgcatctgagaagatcgaagtcttggtcagcaatgctacccagtttatcatcttgcacagcaaagatcttgaaatcacgaatgccacccttcagtcagaggaagattcaagatacatgaaaccaggaaaagaactgaaagttttgagttaccctgctcatgaacaaattgcactgctggttccagagaaacttacgcctcacctgaaatactatgtggctatggacttccaagccaagttaggtgatggctttgaagggttttataaaagcacatacagaactcttggtggtgaaacaagaattcttgcagtaacagattttgagccaacccaggcacgcatggctttcccttgctttgatgaaccgttgttcaaagccaacttttcaatcaagatacgaagagagagcaggcatattgcactatccaacatgccaaaggttaagacaattgaacttgaaggaggtcttttggaagatcactttgaaactactgtaaaaatgagtacataccttgtagcctacatagtttgtgatttccactctctgagtggcttcacttcatcaggggtcaaggtgtccatctatgcatccccagacaaacggaatcaaacacattatgctttgcaggcatcactgaagctacttgatttttatgaaaagtactttgatatctactatccactctccaaactggatttaattgctattcctgactttgcacctggagccatggaaaattggggcctcattacatatagggagacgtcactgctttttgaccccaagacctcttctgcttccgataaactgtgggtcaccagagtcatagcccatgaactggcgcaccagtggtttggcaacctggtcacaatggaatggtggaatgatatttggcttaaggagggttttgcaaaatacatggaacttatcgctgttaatgctacatatccagagctgcaatttgatgactattttttgaatgtgtgttttgaagtaattacaaaagattcattgaattcatcccgccctatctccaaaccagcggaaaccccgactcaaatacaggaaatgtttgatgaagtttcctataacaagggagcttgtattttgaatatgctcaaggattttctgggtgaggagaaattccagaaaggaataattcagtacttaaagaagttcagctatagaaatgctaagaatgatgacttgtggagcagtctgtcaaatagttgtttagaaagtgattttacatctggtggagtttgtcattcggatcccaagatgacaagtaacatgctcgcctttctgggggaaaatgcagaggtcaaagagatgatgactacatggactctccagaaaggaatccccctgctggtggttaaacaagacgggtgttcactccgactgcaacaggagcgcttcctccagggggttttccaggaagaccctgaatggagggccctgcaggagaggtacctgtggcatatcccattgacctactccacgagttcttctaatgtgatccacagacacattctaaaatcaaagacagatactctggatctacctgaaaagaccagttgggtgaaatttaatgtggactcaaatggttactacatcgttcactatgagggtcatggatgggaccaactcattacacagctgaatcagaaccacacacttctcagacctaaggacagagtaggtctgattcatgatgtgtttcagctagttggtgcagggagactgaccctagacaaagctcttgacatgacttactacctccaacatgaaacaagcagccccgcacttctcgaaggtctgagttacttggaatcgttttaccacatgatggacagaaggaatatttcagatatctctgaaaacctcaagcgttaccttcttcagtattttaagccagtgattgacaggcaaagctggagtgacaagggctcagtctgggacaggatgctccgctcggctctcttgaagctggcctgtgacctgaaccatgctccttgcatccagaaagctgctgaactcttctcccagtggatggaatccagtggaaaattaaatataccaacagatgttttaaagattgtgtattctgtgggtgctcagacaacagcaggatggaattaccttttagagcaatatgaactgtcaatgtcaagtgctgaacaaaacaaaattctgtatgctttgtcaacgagcaagcatcaggaaaagttactgaagttaattgaactaggaatggaaggaaaggttatcaagacacagaacttggcagctctccttcatgcgattgccagacgtccaaaggggcagcaactagcatgggattttgtaagagaaaattggacccatcttctgaaaaaatttgacttgggctcatatgacataaggatgatcatctctggcacaacagctcacttttcttccaaggataagttgcaagaggtgaaactattttttgaatctcttgaggctcaaggatcacatctggatatttttcaaactgttctggaaacgataaccaaaaatataaaatggctggagaagaatcttccgactctgaggacttggctaatggttaatacttaaatggtcaatagaaaaagtaggctgggcgcggtggctcacgcctgtaatcccagcactttgggaggctgagaagggcggatcacgaggtcaggagatggagaccatcctggctaacacggtgagaccccgtctccgctaaaaatacaaaaaattagccgggcatggtggcaggtgcctgtagtcccagctactcggcaggctgcagcaggaaaatggcataaacccgggaggtggagcttgcagtgagccgagattgcaccactgcattccagcctgggtgactgagcgagactctgtctcaaaaaaaaaaaaaaaaaaaaaannnnnnnnnnnnnnnnnnnnnnnnnnnnn

SEQ ID NO: 24121 - DNA, 1394 bp, Homo sapiens
gagtcgacccacgcgtccgcgcgatcccgggcaggctccgtggtcctcgcctcgcttcacggtctttaccgctcagcttcccggagtccgcgcaggagcgcgtctgaataggaagcgttttcggacgtggatgcggcgttttgtcgctgccagtggtgtctggagaggttcgggctcggtcctcaggtcctggctcccagaagcaaaataactcaagtgaagcaatgaaggaagaagaaggaggttgctggccttggatatcataatttctggggacaactttaagtggacactaatatttctgactaggaaaacttcaaaaacttcatggcaaatgcagaagagacaaagacgtatagtccatgttatccactattttctgagcacagaagaaaatgatcaagacccaggaatcactgaccctggaggatgtggctgtggaattcagctgggaggagtggcagctcctggacactgctcagaagaacctgtaccgggatgtgatggtggagaactataaccacctagtatcactggggtatcaaactagcaaaccagatgtactctccaagttggcacatggacaagaaccatggacaacagatgctaaaattcagaataaaaattgtccaggaatcgggaaagttgacagtcatctgcaagagcactctccaaaccaaagacttctgaagagcgtgcagcaatgcaatggacagaatacacttagaaatattgtacatctcagcaagacacattttcctatagtgcaaaatcatgatacatttgacttgtacagaaaaaatttgaaatcaagtttaagtttaatcaaccagaagagaagacatggaataaataaccctgttgagtttattggaggtgagaaaacacttctacatggtaagcatgaacgtacgcatactaaaactagattttctgaaaatgcaaaatgtatccatactaaattccaagtcttcaagcatcagaggactcagaaaattgagaaaccccatgcatgcattgaatgtgagcaaaccttccttaggaagtctcagctcatttaccatgagaacatttgtatacaagagaatcctggaagtggtcaatgtgagaaattatccagaagtgtcctgttcactaagcatctgaaaactaatacaacagacaaaatctgtatacccaatgaatatagaaaaggctctactgtgaagagtagtctcattacacatcaacaaacccatacagaagagaaatcctatatgtgcagtgagtgtggaaagggctttacaatgaagcgctatctaattgctcatcagcgaactcatagtggagagaaaccttatgtgtgcaaagaatgtggaaaaggtttcactgtgaagagcaatctcattgtacct

SEQ ID NO: 24122 - DNA, 395 bp, Homo sapiens
  misc_feature 246, 247, 248, 249, 250, 251, 252, 253, 254, 255, 256, 257,258, 259, 260, 261, 262, 263, 264, 265, 266, 267, 268, 269,270, 271, 272, 273, 274, 275, 276, 277, 278, 279, 280, 281,282, 283, 284, 285, 286, 287, 288, 289, 290, 291, 292: n = A,T,C or G
  misc_feature 293, 294, 295, 296, 297, 298, 299, 300, 301, 302, 303, 304,305, 306, 307, 308, 309, 310, 311, 312, 313, 314, 315, 341,381, 382, 383, 384, 385, 386, 387, 388, 389, 390, 391, 392,393, 394, 395: n = A,T,C or G
actataggatacaaccagcgaaacagaattgatactctcatgtatctactagcatatccacaaaaacccatggttaagacaaaaaccattgaattgatagaatttgaggaactgccagctggacagaatgcaacagttgctgtgatgagctatagtggctatgatattgaagatgctcttgttttaaacaaggcctctttagacagaggctttgggcgttgccttgtatataaaaatgctaagggnnnnnnnnnnnnnnnnnnnnnnnnnnnnnnnnnnnnnnnnnnnnnnnnnnnnnnnnnnnnnnnnnnnnnntttgttattttatatttttttttttnccgaagggctgcgttttttttttgtgggacccaaaaaaannnnnnnnnnnnnnn

SEQ ID NO: 24123 - DNA, 739 bp, Homo sapiens
acatgtggacatcaatctgtcccaggacatttttgaaaagactattcactccccattgaattgccttgtctcccttgtcaaagtcacaacaattactgtcctcatttttgtatctggtcacatgttcctagttagtaactataactaccctcttctactacgcattctgtattcccttagctttcagcaagcaactcagttggtcttgattctttatatggggcaatgacccaaactttccttcctgaaggaattgggccattggcagctgtgcccgaattgggttgttgtagttttccattaaattaatcacagggcatggtagtaggtagcactgaagacaccctaggagatcccatgtattccggaagtattatttcttagttctgtggagtagaagcaattaacccttggtagtcaggatcagccacctctgccagcacggtaactcccttctttgcctgtctattcagaggcatgaggagctcagagtggacagggactatcttaacttccagttcagtagaatcatttctttgtatcgggggggatgcattcctccttttgggaccaagacttctagaccagcagagcataagattgagggacaggaaatgaaaattttgctggtgtgtcactaggggtaatagtgatgatgagaaccaattggtgtgggagaccatgaggtggataaggcactctgtaagtccagacagtagtgtgatttttatgaagtacc

SEQ ID NO: 24124 - DNA, 526 bp, Homo sapiens; identical to SEQ ID NO: 23349
  misc_feature 1, 2, 3, 4, 525, 526: n = A,T,C or G

SEQ ID NO: 24125 - DNA, 1020 bp, Homo sapiens; identical to SEQ ID NO: 23333
  misc_feature 1017, 1018, 1019, 1020: n = A,T,C or G

SEQ ID NO: 24126 - DNA, 2843 bp, Homo sapiens; identical to SEQ ID NO: 20339
  misc_feature 1, 2, 3, 4, 2815, 2816, 2817, 2818, 2819, 2820, 2821, 2822,2823, 2824, 2825, 2826, 2827, 2828, 2829, 2830, 2831, 2832,2833, 2834, 2835, 2836, 2837, 2838, 2839, 2840, 2841, 2842,2843: n = A,T,C or G

SEQ ID NO: 24127 - DNA, 959 bp, Homo sapiens
  misc_feature 952, 953, 954, 955, 956, 957, 958, 959: n = A,T,C or G
aatcctgcagagaacaggcccaatcaccgtccttacacggcctctgatttcatagaagggatctaccgaacagaaagggacaaagggacattgtatgagctcaccttcaaaggggaccacaaacacgaattcaaacggctcatcttatttcgaccattcggccccatcatgaaagtgaaaaatgaaaagctcaacatggccaacacgcttatcaatgttatcgtgcctctagcaaaaagggtggacaagttccggcagttcatgcagaatttcagggagatgtgcattgagcaggatgggagagtccatctcactgttgtttactttgggaaagaagaaataaatgaagtcaaaggaatacttgaaaacacttccaaagctgccaacttcaggaactttaccttcatccagctgaatggagaattttctcggggaaagggacttgatgttggagcccgcttctggaagggaagcaacgtccttctctttttctgtgatgtggacatctacttcacatctgaattcctcaatacgtgtaggctgaatacacagccagggaagaaggtattttatccagttcttttcagtcagtacaatcctggcataatatacggccaccatgatgcagtccctcccttggaacagcagctggtcataaagaaggaaactggattttggagagactttggatttgggatgacgtgtcagtatcggtcagacttcatcaatataggtgggtttgatctggacatcaaaggctggggcggagaggatgtgcacctttatcgcaagtatctccacagcaacctcatagtggcacttttttttttttttttatgttttttgggctttcacatttgttgattattattggcgatctttttcaatacaatttacaccctaatccccatttccagtttgattatacatgggctaagtggcagaaagggcnnnnnnnn

SEQ ID NO: 24128 - DNA, 4743 bp, Homo sapiens
  misc_feature 1, 2, 3, 4, 5, 4731, 4732, 4733, 4734, 4735, 4736, 4737,4738, 4739, 4740, 4741, 4742, 4743: n = A,T,C or G
nnnnncgaccccgcgtccgccccgcgtccgcccacgcgtccgctggaggtcttcttagacctgctctgctgccaggagaagaaattgtctgtgagggtcttcgagtcttgctggatcctgatggaagagaagaagctactggaggtcttcttggaggccctcagctcctgccagcagaaggagccttgttcctcaccacatacagaattctcttcagaggaacaccccatgatcagttagtgggtgagcagacagttgtgcggagctttcccattgcctccatcaccaaggagaagaagatgaccatggcgaaccagctacagcagaacatgcaagaaggactgcagatcacatcagcatcttttcagttgattaaggtagcatttgatgaagaagtcagtccagaagtagtagagatctttaagaaacagctgatgaagttccgttatcctcagtccattttcagtacctttgcttttgctgctggacaaactaccccacaaataattttaccaaaacagaaggaaaagaacacttcttttcgtaccttctcaaaaacaattgtgaaaggtgccaaaagggcagggaaaatgacaattgggcggcaatatttactgaagaagaagacagggacaattgtggaagaaagagtaaatcgtcctggatggaatgaagatgatgatgtatctgtttcagatgagagtgagctccccacaagtaccaccctgaaggcctccgagaagtctacaatggaacagttggtggaaaaagcttgtttcagagactatcagcgtttaggtttaggaaccataagtggcagctcttcccgttcaagacccgagtattttagaattactgcctccaacaggatgtattcactctgccggagctatcctggccttttagtcgtacctcaagctgtacaggacagtagtttaccaagagtagctcgctgctatcgacacaatcgcctgcctgttgtatgttggaagaactcaagaagtggtactctgctcctccgatctggaggattccatgggaagggagtcgttggtcttttcaaatctcagaactcccctcaggccgctcctacctcctctttagaatcttccagtagcatagaacaagagaaatacttgcaagccttactgaatgctgtttctgtccatcagaaactcagaggcaacagcactcttactgtcaggccagcctttgctctatctccaggtgtgtgggcaagtcttcgctctagcactcgcttgatcagctctccaacatccttcattgatgttggcgcccggctggcaggcaaggatcactcggcctccttcagtaacagcagctacctacaaaaccagctcttgaaacggcaagcagccctttacatatttggtgaaaagtcgcaactaaggaacttcaaggtagaatttgctttaaattgtgagtttgttcctgttgaatttcatgaaatccggcaagtgaaagccagttttaagaagctgatgagggcttgtatcccaagcaccatccctactgactcagaagtgaccttcctgaaagcgctgggagattctgagtggttcccacagcttcacaggataatgcagctggctgtggttgtatcagaagtacttgagaatggttcctcagttttggtctgtttggaggaaggctgggacatcactgcacaagtgacatccctggttcagttactcagtgatcccttttataggacacttgaaggcttccagatgttggttgaaaaagagtggctctcttttggtcacaaattcagtcagaggagcagcttgaccctcaactgtcaggggagtggttttgctccagtcttcttacagttcttagactgtgtacaccaggttcacaaccagtatccaactgagtttgaattcaatctctattacttaaagttcttggctttccactatgtgtctaatcgctttaaaacatttctcctggattcagactatgaaagattagagcacggaactttatttgatgataaaggagaaaagcatgccaaaaaaggagtctgtatttgggaatgtattgacagaatgcacaagaggagtcccattttctttaattatttatattcaccattggaaatagaggctctaaagcccaatgtaaacgtctctagcctcaagaagtgggattactacatagaagagaccctgtccacaggcccttcctatgactggatgatgctaacccccaagcacttcccctccgaagactctgacctggctggagaagctgggccacggagccagaggagaacagtgtggccatgctatgatgatgtcagctgtactcagcctgatgctctcaccagccttttcagtgaaattgaaaaattggagcacaaattgaaccaagcccctgagaagtggcagcagctgtgggaaagggtaaccgtggaccttaaagaagaaccaagaacagatcgctcccaaagacacctgtcgagatccccaggaattgtgtctaccaacctaccttcctatcagaagaggtctctgctacatctcccagacagcagcatgggggaggaacagaattccagcatctccccatccaatggagtggagcgaagagcagccacgctctatagccagtatacatccaagaatgatgaaaacaggtcctttgagggaacactttataaaagaggggctttgctgaaaggttggaagccccgttggtttgttttggatgtaacaaaacatcagctgcgctactatgactcaggtgaggacacaagctgtaaaggccacattgatctggctgaagtagaaatggtcatccctgctggccccagcatgggagccccaaagcacacaagtgacaaggctttctttgatctcaagaccagcaaacgtgtgtataacttctgcgcccaggatggacagagtgcccagcaatggatggacaagatccagagttgtatctctgatgcctgatgcccatggtcaacccacgcagaagaaacagaagaactcatgctgccagatagatagaaaaagaagcatggatccttgaggagctgacaacaagttatcccagggcctgaggttctcctgcccagtcccctcttgcaggggttgctatatctacttaacctgaataggtgtttcacacaggtctggtcaacagccccatgcactccctgtatcttgcactaaatttttctaacagggtcttagtggttaatgatcagaagatgtctcctgagccaactgtgaacctcacccaggcaaaatggctaccacctacttgggtccttcttcatgaaagctatagatccttttttgttctctgaggtcataatttcctcggagacctgtttaacaagcaaaaatcaaaaccctccaagattgtctcatattctacctggactaggtttcctatgagagacatctacttgtaatgcctgacctttgagatgctcagttctctggtgctgccaaaagatgtttccatggtccgtgctctgccagtggggttcacaacaagagacgtcattgttcagtagcaggcaaagagggagcacacagcattattctgatggaaaaagattatccagggaatggtacaacaatgaccagcccaatgcaggaaaacactacttccaaaacactgaattctctagaccagaggtgctctgaggatccagggccttgtgttcttatgtatcttctgcttcctgacagcttctttttcaaaataacatgcaaaaaaagctgaatgcactaactcacaaaacaaacacttgcactgaattcccaatgaagtgaagatgttggaaagacagaggccagctatttaggaccatacgcacctgtgacaagggctgtgttgaccacagtcacactgtggcatgactggatacccaaactacacttctacacatgaaaagtaagaactgtctttagattttctttactttgataacttgtgattgtttagcttaagacccaagaaatgctgtttgctcatggtaaacagaaacagcatcttcgctacaaccactgacaccagctggcgtcataggtagctagatcattgcatttgttttgaaatgttaatatgttaaatactaaactaatatttcaaaaatgtgtatatatgatttctatatccttgtttttcagatagcctgcttataatttaatataaattaactgatgcattcataagatttcaataatgaaatggttcccttttaaaaaataaaaatactttgtagattaaaaataaatcagaatttcaaatttaaaattgtccacacactaggaaatagaactgtgttaatatataagaaatttggggataattaagaatgaaggacttttctatcatttccattttataaattgccacctgtgaaaatggtttttgcacattatttgtatttttctttgtatatgaaataattttttgtactttgtaaaatatggagcccattgtaccttcagctatttgagactatacacagtgcttcttttgtaactggattactttaactttcgtgaaggcattacattgcctcacattcactaaccaccttgaattaaatttatttcttaagaaaaaaaaaaaaaaaaaaactaagcaataaagttcattctgtagtgcacagcattcaggagggtaacactcaggattcatacatgggactaaaggttcaagaataaaacaaagcatgannnnnnnnnnnnn

SEQ ID NO: 24129 - DNA, 978 bp, Homo sapiens
  misc_feature 1, 2, 978: n = A,T,C or G
nnacgggaaagagtgagcccatggatactatctggcaaacatcaaagtataaggatacgacatccttgccagagggaaataccttggtttggtttagaagatcccccttcctttgacccgacatgaatttcaaaccagatcccaggtgaagacttagggtcataacacacataaggctggccccttcctgggtcacagactgagtaggttgtctggttgtgagtacaagttcctaggcaggtcccagcacactcataataagtgtgatacaacagggttttagtcatgatgttccccgaccacgtagtgtgggtgcagtggaggcatccctcccagggttctccttttaacatggataaggggagtagcaagaacaaagtgatgagtagcatgttcatacccagcatggacagaaaaggctttttcctggggggagaaggctaagcaaagtgacagcttaatagcaaagtaattaatatgacaaggaaaattactggacttcagatttctaaccacatttacttccctgatgatgactcaagcttcggccgtgcatagactagtcagcttctggggtgactagagcagggctgttgtctcctcaagcttcagccgtgcgtggactggtcagcttccggagtgaccagagcagggctgttgtcatctcactggcaccttggttccatcgtaggatcagctgggttgcatggtctaggtcctgttggctggtccacttgtcctgggctgctggtttcagctgactggatggatggatccaaggcacaattcctgcaacatttctaggcttccagtgggtcctggcgtcttagctgtggatctcccaatacctgcaggtaacgaggccacagaagctgggcctctaggagcagaagacacagagcagtgaagactacaccagaagctccggctgccgccagagacaaaggccccaccccccgcgtacctcggccgctctan

SEQ ID NO: 24130 - DNA, 2593 bp, Homo sapiens; identical to SEQ ID NO: 22305
  misc_feature 1, 2582, 2583, 2585, 2586, 2587, 2588, 2589, 2590, 2591,2592, 2593: n = A,T,C or G

SEQ ID NO: 24131 - DNA, 2961 bp, Homo sapiens
  misc_feature 1, 2, 3, 4, 2961: n = A,T,C or G
nnnncgcggccgctcgatacggctgcgagaagacgatctggagtcgattgccccgagacacatgggccaaggaggggtcagcggcgaattctttcggcctgttggggacccctcgtgtccccacgccagactggacctcccgtatgaacttctcttcgcatcggcggcggcttccgtcacctccgctcccccgatcctattcccagtcgtatgccagcttggagagtcacgtgagagcaagagagtagctttctggttgtcctggtgccctgctcaggcaaactgactgccattctctgaggatggcagctctgtcccccacatttgccacgtccacccaggattccacctgtctccaggactcagaatttcctgtttcttcaaaagaccattcctgtccccagaatttggacctgttcgtgtgcagtggtctggagcctcacacacccagtgttggttcccaggaatcggtgactttccaagatgtcgctgtggactttaccgagaaggagtggcccttgctggattcttctcagagaaaactgtacaaagatgtaatgctggagaactacagcaacctcacttcactggggtatcaggtcggcaaacccagcctcatctcacacttggagcaggaggaggagccgaggacagaggagaggggcgctcaccagggcgcttgtgcagattgggagactccatctaaaaccaagtggtcacttcttatggaagatatttttgggaaggaaacgcccagtggtgtgacgatggaaagagccggtcttggagagaagtccactgaatacgctcacttgttcgaagtctttggcatggaccctcatctcactcagccaatgggaaggcacgctggcaagaggccctatcaccgccgcgactatggggtagcgttcaagggcaggccgcacctcactcagcacatgagcatgtacgacgggagaaaaatgcatgaatgtcatcagtgccaaaaagccttcaccacgagcgcgtccctcacacggcacaggagaatccacaccggggagaagccttacgagtgcagcgactgcgggaaagccttcaacgacccttcagcccttaggagccacgcaagaactcacctcaaagagaagccctttgactgcagtcagtgtggaaatgcattccggaccctctcggccctgaaaatccacatgcgagttcacactggcgagaggccttacaagtgtgatcagtgcgggaaggcttacggccggagctgccacctcatcgcacacaagagaacgcacaccggagagaggccctacgagtgtcacgactgtgggaaagctttccagcacccctcccacctcaaagagcacgtgaggaatcacacgggggagaagccctacgcgtgcacgcagtgcggcaaagccttccgctggaagtccaactttaatttgcacaagaagaaccacatggtggagaagacctacgaatgtaaagaatgcgggaaatcctttggcgatctcgtgtcccggaggaaacacatgaggattcacatcgtcaagaaacccgtggaatgtcggcagtgcgggaagaccttccgaaaccagtccatccttaagactcacatgaactctcacactggagagaaaccatacgggtgcgatctctgcgggaaagctttcagcgcgagttcaaacctcaccgcacacaggaagatacacacgcaagagagacgctacgaatgcgccgcctgcgggaaagtcttcggtgactatttatcccggcggaggcacatgagcgttcaccttgtaaagaaacgagttgagtgtaggcagtgtggcaaggccttcaggaaccagtcaacgctgaagacgcacatgcgaagccacacgggggagaaaccgtacgaatgcgatcactgtgggaaggccttcagcataggctccaacctgaatgtgcacaggcggatccacaccggggagaagccctacgaatgccttgtctgcgggaaagccttcagcgaccactcatccctcaggagccacgtgaaaactcaccggggagagaagctctttgtgtcatccgtgtggaaaaggctccagtgagcgcgcctgctttagagacacaggatgattcagaccggaaacagacctcgtgggtgtaagaggaagcctctgtgagctcgcaccttactgggtgcaaaagaatccacggaacttgggagaagtccagttcctgtaaaaactgggaagacgaggcgttctcatcccataggaggtttgtgagaactcacgccgggggtgaaaatgtacgtctgtagcatggagaagccttcagggtacattcagctcttaacaaacacaggaggacttaatggcagcttggcatttaatgtcaaaatccaagccgtggcatttaatgtcaaaatgacttcagaccacttctagccttctgggcccatgagtaataatgagcacactagggagcatctctgtaaacacagtggctggggaaacccttcctagtctcacttgattcctcatgacggaaatcacactaaagagagaaatcagtgaagtaaggaacgtggaaggtcatgaatgggccgcaaaccacggccagctgcttgtctttgtatggcttgccagctaacaatagtggttccatctttaaggaagaagaatgtttgatggagaaaatttgtggccaatgaagttgaaatacttcctgtatctgccctttcaaaaaattggcgacctggtctcagcagggtccagttgggagagattggtgcaaggagcatggaatgataagagatattgtagtgatggggacatacgatgaagaaaataagattgtatggatagaacagcacccaagaaattgggccacacatgtgtgagaataataacaatggaaaaataaagtacaagaaaacaaaacaagaaggaggcaggaatacgagagaagagatan

SEQ ID NO: 24132 - DNA, 929 bp, Homo sapiens; identical to SEQ ID NO: 20094
  misc_feature 1, 2, 3, 4, 5, 6, 7, 8, 9, 10, 11, 12, 13, 14, 15, 16, 17,18, 19, 20, 926, 927, 928, 929: n = A,T,C or G

SEQ ID NO: 24133 - DNA, 1117 bp, Homo sapiens
  misc_feature 1, 1116, 1117: n = A,T,C or G
nctgctgcactgacggcgggtgcccgcgcctcagagttactgatttattcttgagattcctctactctcgttatctgacctcatggatgaacttcaggatgttcagctcacagagatcaaaccacttctaaatgataagaatggtacaagaaacttccaggactttgactgtcaggaacatgatatagaaacaactcatggtgtggtccacgtcactataagaggcttacccaaaggaaacagaccagttatactaacatatcatgacattggcctcaaccataaatcctgtttcaatgcattctttaactttgaggatatgcaagagatcacccagcactttgctgtctgtcatgtggatgccccaggccagcaggaaggtgcaccctctttcccaacagggtatcagtaccccacaatggatgagctggctgaaatgctgcctcctgttcttacccacctaagcctgaaaagcatcattggaattggagttggagctggagcttacatcctcagcagatttgcactcaaccatccagagcttgtggaaggccttgtgctcattaatgttgacccttgcgctaaaggctggattgactgggcagcttccaaactctctggcctgacaaccaatgttgtggacattattttggctcatcactttgggcaggaagagttacaggccaacctggacctgatccaaacctacagaatgcatattgcccaagacatcaaccaagacaacctgcagctcttcttgaattcctacaatggacgcagagacctggagatcgaaagacccatactgggccaaaatgataacaaatcaaaaacattaaagtgttctactttactggttggtaaggggacaatccgcctgcagttgaagctgtggtcgaatgcattccgactgaacctataaatcatttgcgtaagatgggctgtggggatgcccaggtattagccgggaaccaccgaggcctccataatattgcgggaaggcacaccctgccattgccgttcccgtaaaccaaactgaatcactgtggaagcactcgctgcccaaccagacaacttcccttggcccagttgtgaatcccggccaaacaaaaatcnn

SEQ ID NO: 24134 - DNA, 884 bp, Homo sapiens; identical to SEQ ID NO: 23376
  misc_feature 1, 2, 3, 4, 5, 6, 7, 8, 9: n = A,T,C or G

SEQ ID NO: 24135 - DNA, 688 bp, Homo sapiens
  misc_feature 1, 4, 6, 687, 688: n = A,T,C or G
nganantttggagtaagatcatctggcagtagaagctgttctccaggtacatttctctagctcatgtacaaaaacatcctgaaggactttgtaaggtgccttgttaaaagcagatgcgttcggcacttccttggtctgaggttaattgcacacctacaggcactgggctcatgctttcaagtattttgtcctcactttagggtgagtgaaagatccccattataggagcacttgggagggatcatataaaagctgactcttgagtacatgcagtaatggggtagatgtgtgtggtgtgtcttcattcctgcaagggtgcttgttagggagtgtttccaggaggaacaagtctgaaaccaatcatgaaataaatggtaggtgtgaactggaaaactaattcaaaagagagatcgtggtatcagtgtggttgatacaccttggcaatatggaaggctctaatttgcccatatttgaaataataattcagctttttgtaatacaaaataacaaaggattgagaatcatggtgtctaatgtataaaagacccaggaaacataaatatatcaactgcataaatgtaaaatgcatgtgacccaagaaggccccaaagtggcagacaacattgtacccattttcccttcccaaatgtgagcggcgggcctgctgctttcaaggctgtcacacann

SEQ ID NO: 24136 - DNA, 689 bp, Homo sapiens; identical to SEQ ID NO: 21367
  misc_feature 1, 2: n = A,T,C or G

SEQ ID NO: 24137 - DNA, 1821 bp, Homo sapiens
  misc_feature 1821: n = A,T,C or G
ccacgcgtccggaacgcggttcccggggagactggtacggttgctgtgtgctatggagccgagggtcgtcaagccaccggggcaggatttagtagtggagagtctcaaaagccgctacggactcgggggcagctgccccgacgagtatgatttttcaaatttttatcagtctaagtataagagaagaactctaacctccccaggtgatttggatatctactctggagataaagttggttcatcgttaaaatattctgatgaaagcaagcattgtagaacaccattgggcagcttattcaagcacgtaaatgtgaattgcctagatgatgaactggattctttccatgatttgaagaaacaggaaacagaagaagagttaattgaaaatgattataaagttagtacctcgaaaataaccaagcagtcttttaaagaaatagaaaaagttgccttgccaactaatacgacctcatcgagacctcggactgagtgttgtagtgatgcaggtgactctcctttgaaacctgtcagctgtccaaaatctaaagcatcagacaagcggagtttacttccacatcagatcagtcagatatatgacgaattatttcagatacatctgaaattgcagtgtgaaactgcagcacaacagaaatttgctgaagaacttcaaaagcgagaacgttttttacttgaaagagaacaactgcttttcagacatgaaaatgccttgagtaaaattaaaggtgttgaagaagaggttcttacaagatttcaaattataaaagagcagcatgatgcagaagttgaacacttaaccgaagttcttaaggaaaagaataaagaaaccaagagactgaggtcctcttttgatgcattgaaagaattgaatgataccttaaaaaaacagttaaatgaagcaagtgaagaaaacaggaagatagacattcaggctaaaagagttcaagcacgtttagataatttacagaggaagtacgagtttatgacaatacagagattgaaaggaagttcccatgctgttcatgaaatgaaaagtttaaaacaagaaaaagcaccagtttcaaaaacttacaaggtaccacttaatgggcaagtttatgaacttttaactgtcttcatggactggatttcggatcatcatcttagcaaagtgaaacatgaagaatctggaatggatggtaaaaaaccacaactcaaatttgcttcccagagaaatgatattcaggagaagtgtgtaaagcttttgcctctaatgacagagcagctacagtggatgccatttgtgaatatcaaacttcacgagccttttgtaaaatttatatattggtccctaaggcagctagatgctggagcacagcactcgactatgacatcaacattgaggagattgggtgaagacatttttaaaggagtggtactacaggaattcaggataattctccacaggatactggggaagaataagcaaagaagagtgattcttaagagctcaatttggcttgagattttatcaacttaatggtctaaaaagcatcagcgataaccgcgcaagcaatgaaacccagtatgagtgaacccgagacacaacaaccacgtgtatgcgcctaggggccacaaacttacgacatagaataatcaaaaagcactgtcacgagatgacagtgccaacagcggagaacccggcacgaaacgagagccaaatcacaaagcacagcacgcaactcgttaacctcgtaccgcccagccacacttagactaacaaaagtttatcccgtgctgccttccttttgtcttcatcccgcn

SEQ ID NO: 24138 - DNA, 486 bp, Homo sapiens
  misc_feature 1, 2, 3, 4, 5, 6: n = A,T,C or G
nnnnnnaccctaatttgatctggcttccacttgtccccctcatttcccaaatgtttaaatgtattggatttggattctcaatgtataagttgccttatctgttaatgtctatcttctgtctctttaattttgtatatctgctgttttgcttttggatacattttctaattagaagtcacatgataaatataatcagtatagtaataataccataatgtacgcgggggacagctttgggggtttgctgctggctctgactcccgtcctgcgatgggttgcgacgggggtacaatccccaatgaggcatgatctggtgaaggggccgaagaaggttgagaaggtcgacaaagatgctgaattagtggcccaatggaactattggactttttttttattttatttttgtttggagagaaaaggcgagacaaaaaacaagctaatattatggagtcattgcaaagtaacttttaggcaatgttccgtcca

SEQ ID NO: 24139 - DNA, 2929 bp, Homo sapiens; identical to SEQ ID NO: 21129

SEQ ID NO: 24140 - DNA, 968 bp, Homo sapiens
  misc_feature 1, 2, 3, 950, 951, 952, 953, 954, 955, 956, 957, 958, 959,960, 961, 962, 963, 964, 965, 966, 967, 968: n = A,T,C or G
nnnacgcggggggctcacagggtgtcatggagcacgaggaaaggtgcagggaatcctagagaaagtcttgtgtttaaggagcaagacaggaaggagaaaccagtcagtgagatgggtcaaatgtaagtggagaaaggaacgtccaaggagaagcgggctgtcgctatggtgaatcatgcagagatgaaggcgggacgatggagcagtggccccttgggcttggcagctcttctggcagtgattctgacagtgaggttgacaaaaagttaaagaggaaaaagcaagttgctccagaaaaacctgtaaagaaacaaaagacaggtgagacttcgagagccctgtcatcttctaaacagagcagcagcagcagagatgataacatgtttcagatggggaaaatgaggtacgttagtgttcgcgattttaaaggcaaagtgctaatggatattagagaatatggatggatcctgaaggtgaaatgaaaccaggaagaaaaggtatttctttaaatccagaacaatggagccagctgaaggaacagatttctgacattgatgatgcagtaagaaaactgtaaaattcgagccatataaataaaacctgtactgttctagtgttttaatctgtctttttacatgggcttggttttctaaatgttctccaaagctatttgtatgttggattgagaagaattgtaagatgaatactttttttttaatgtgcattattaaaaatatggaggtgaagctaatgtcatgtataaggatacctttgtgtgcaacactagtgtaaataaattcagtatacaatcctaaatgtgggctttgatcatagagtggacggtaaggccaagtacagttaaagactttaggtgaccaggttcaaaaaaggttgttggtgggataactgggggaacaaaaggtttctcaaagtatggtgggccccggggnnnnnnnnnnnnnnnnnnn

SEQ ID NO: 24141 - DNA, 1541 bp, Homo sapiens
  misc_feature 1, 2, 3, 4, 5, 6, 7, 8, 9, 10, 11, 12, 13, 14, 1051, 1535,1536, 1537, 1538, 1539, 1540, 1541: n = A,T,C or G
nnnnnnnnnnnnnngcagtcggaacgagtgcgtgttgtatatacgtacccgtcggttgtaagtttttctgcaatccgagtaaaccccaccgttaaaccctcctaatgacagtccgattggattcaaacgccgcaaccccaattgcgtttccaaagatggaaacattaggctgagggacgcggcgggacaatctgaaaaacatgttctcaagggcctgaccccattaaaaatacgagccacatctctgccatcatggattttatttcttcttagtgtaggattactatctgtcttaatccagactccagccattgcattgtcaaatatttcattgtcttctatacagcctagaccagaattataaactagaattccaccattctgtcctccccagattttgttgcgtctaattttggggttgcttccagtccttatctgaacccctgaatacatatgattatagatatcattgtcttctagcactccatgtccattgtcataaaaataaacaccaacctgcttgccactgtgtatccggtttcttctcagtactggagtgctgccagttgtcacccagactccagctagagtgttactataaacttcattctcttctattactccttgtcccttttcatgcacataaatcccaccatgctggccatcatgaattttgttatgccgaacaattggacaactgtttgtcctaatttgaattcctgctaatgcattgccataaatgtcatttccttcaataaggcctcgtccatcaccaaagatgtaaactcctccttgatttccattaaatatagaatttccccttattgttgggtcactatttgaggtaatccatacacctgcaaagttgtttgcatagattttattctctatgaattgtcctcttcctttttcatggacatatattcctccagtctgccatgtgaattccatgaacactgtaggttacatagctttactcaagctgcttcctattctggtatatgcacttcaaagtacgcatgccatgatcaatgtgacactacgcaagtcncagctaacgcattatggaaatttcattatcctcatatattccctgtgcatgatctgttatatatagtccaacattttcacagtcactgatgttacagtgcttgatggtgggacatgctccttgaccactaacacatactgcagaaccaactgtacatgtacttcggatgatacagtgatcaataatagggctacaatttactgtaatctctaagcagtggtgtgcattgtggtgttgtgcagatttgtcatcagggttaaaccttattgtcatatatccaacataagcatcttcagagccttccataaaaacgaaggttgaatctctagtgttttcaattataactttgtctgccactttcccaggtgctgcaccaatcatggtgattggagattcaatatatatccattcatcagtatatattccagaatgaacaaagataagtccatcaaaatgagcctcttgtaccccaccaagggcatcnnnnnnn

SEQ ID NO: 24142 - DNA, 1162 bp, Homo sapiens; identical to SEQ ID NO: 21517

SEQ ID NO: 24143 - DNA, 1337 bp, Homo sapiens; identical to SEQ ID NO: 22391
  misc_feature 1, 2, 3, 4, 1333, 1334, 1335, 1336, 1337: n = A,T,C or G

SEQ ID NO: 24144 - DNA, 1001 bp, Homo sapiens
  misc_feature 1, 2, 3, 4, 998, 999, 1000, 1001: n = A,T,C or G
nnnncagccgcctcggccgccgcaatgcagccctcctttctatgtgtcatactcgtttatctgggtgaccaacctgttcctattggtgcagagagaggagaagcagcttgaggcatcattagatgcactgctgagtcaagtggctgatctgaagaactctctggggagtttcatttgcaagttggagaacgagtatggccggctgacctggccatctgtcctggacagctttgccttgctttctggacagctgaacactctgaacaaggtcttgaagcatgaacgagatgaagatctcatgcggcagactgaaggacgggtgcctgttttcagccatgaggtagtccctgaccatctgagaaccaagcctgaccctgaagtggaagaacaggagaagcaactgacgacagatgctgcccgcattggtgcagatgcagcccagaagcagatccagagcttgaataaaatgtgttcaaaccttctggagaaaatcagcaaagaggagcgagaatcagagagtggaggtctccggccgaacaagcagacctttaaccctacagacactaatgccttggtggcagctgttgcctttggggaaggactatctaattggagaccttcaggcagcagtggtcctggccaggcaggccagccaggagctgggacgatccttgcaggaacctcaggattacagcaggtgcagatgggcaggagctccaagccagcagcagccaatgctcagtggggtacaaatggctcaggcaggtcaaccagggaaaatgccaagtggaataccaacatcaagtcggcttccatgcatccctaccagcggtgagtgtggctggcaacctcgactccctggtgctctttgcagagttgggcagtgaaattaccttttgctcaaggctcacctagatgggtacaatatgtgtgaccttggacaagtgacctaatttttctgagcctgtttctcatttgttggtgattacctacctcannnn

SEQ ID NO: 24145 - DNA, 552 bp, Homo sapiens
  misc_feature 1, 2, 3, 4, 5, 6, 7: n = A,T,C or G
nnnnnnnctgaacaatgacaacatatttggaatgagggcgtaatttcactaagtgatgcttcgaagaacaatattcgtttggatatgcaaacacacattttcaaaagttatattactgtgttaccatacctgttataaaataataaaaatatataagtatttattaagtcaaacttcagctaccgcctgaaagtttagcatatgaaatttaaattaagtctttcagattatgattatgacaattgttcaacattttgtccttccttataactgagaaagcataacttaatataactactaagagaggcccatttattcttccagtgattctagaagaaatatggcacataatatcctttacttctaaataaaggagtcaatgactcagaaaataaagaggaaaaataaagtaaatgtgagagagatgaagaaaagatagaaggggaaaaagagatttagtacgcgggggaggcgcgggtggggaacatgtctgagtcggagctcggcaggaagtgggaccggtgtctggcggatgcggtcgtgaagataggt

SEQ ID NO: 24146 - DNA, 4708 bp, Homo sapiens
  misc_feature 4705, 4706, 4707, 4708: n = A,T,C or G
ccgcgcattttcagcgcgttgcatcacctccgtgcgcccggttgcagcgtggacgccggatgagttgcttttaggcttgctggcccgcggggctgtccaggcacgcgaggcccctcaggtacgccctctcttccctgcaggatccggccctcaaagacgagggtcacgcacgcgttacaaccccgaaacagtagcacaagatttaatttttaaaagagcgtgtttcttcggggcttgccgttcgttcgtttccagcctcaggaatttatggtcgcctttttgaatgagcaacaaaatgcttcaacaagttccagaaaacataaattttcctgctgaagaagagaaaatcttggagttttggactgaatttaattgttttcaggaatgcttaaagcaatcaaaacataaaccaaaatttaccttctatgatggtcctccttttgcaactggactgcctcactatggacatatacttgcgggtacaattaaagatatagttacaagatatgctcaccagagtgggtttcatgttgacagaagatttggatgggattgccatggcttacctgtggaatatgaaattgataagacactgggaatcagaggaccagaggatgtggccaaaatggggattacagagtataacaatcagtgccgagcaattgtgatgagatattctgctgagtggaagtctactgttagcagacttggccgatggattgactttgacaatgactataaaactctgtatccacaattcatggaatcagtctggtgggtcttcaaacaactctatgataaaggccttgtttatagaggtgtgaaagtcatgcccttctctacggcatgtaacactccactttccaacttcgagtcacaccagaattataaggatgttcaagatccttcagtatttgtaactttccctttggaagaagatgaaactgtatctttagttgcttggacaaccactccctggactctacctagtaaccttgctgtgtgtgttaatccagaaatgcaatatgtgaaaattaaagatgttgccagaggacgattactcattttaatggaagccagattgtcagccctctataaattggagagtgactatgagatccttgaaagatttcctggtgcctatcttaaaggcaagaagtacaggcccctgtttgactatttcctgaagtgtaaagagaatggcgctttcactgtgcttgttgacaactatgtgaaggaagaagaaggcacaggggttgtccaccaagctccttacttcggtgctgaggactatcgggtctgtatggactttaacattattcggaaagactcactccctgtttgccctgtggatgcttcaggctgcttcacaacggaggtgacagatttcgcaggacagtatgtgaaggatgctgacaaaagtatcatcaggactttgaaggaacaaggccgacttctggttgccaccaccttcactcacagctaccctttttgctggagatcagacactcctctaatttacaaagcagtgcccagctggtttgtgcgagtggagaacatggtggaccagctcctaaggaacaatgacctgtgctactgggtcccagagttggtacgagaaaaacgatttggaaattggctgaaagatgcacgtgactggacaatttccagaaacagatactggggcacccccatcccactgtgggtcagcgatgactttgaggaggtggtatgcattgggtcagtggcggaacttgaagaactgtcaggagcaaagatctcagatctccacagagagagtgttgaccacctgaccattccttcacgctgtgggaagggatccttgcaccgcatctctgaagtgtttgactgttggtttgagagtggcagcatgccctatgctcaggttcattacccgtttgaaaacaagagggagtttgaggatgcttttcctgcagatttcattgccgagggcatcgaccaaaccagaggatggttttataccctgctggtgctggccacggccctctttggacaaccgcctttcaagaacgtaattgtgaatgggcttgtcctggcaagtgatggccaaaaaatgagcaaacggaaaaagaattatccagatccagtttccatcatccagaagtatggtgctgatgccctcagattatatctgattaactcccctgtggtgagagcagaaaacctccgctttaaagaagagggtgtgcgggacgtccttaaggatgtactgctcccatggtacaatgcctatcgcttcttaatccagaacgttctgaggctccagaaggaggaagaaatagaatttctctacaatgagaacacggttagagaaagccccaacattacagaccggtggatcctgtccttcatgcagtctctcattggcttctttgagactgaaatggcagcttataggctttatactgtggtgcctcgcctggtcaagtttgtagatattctgaccaattggtatgttagaatgaaccgcagaagattaaagggtgaaaatgggatggaggattgtgtcatggccctagaaaccttgtttagtgttctgctttctctttgcagacttatggctccctacacaccttttctcactgaattgatgtaccagaatctaaaggtgctgattgaccctgtttctgttcaggacaaggacacactcagcattcactacctcatgctgccccgtgttcgagaagaattgattgacaagaaaacagagagtgcagtatctcagatgcagtctgtgattgaacttggaagagtgatcagagaccgaaaaactattcccataaagtatcctttgaaagaaattgtggttatccatcaagatccagaagctcttaaagatatcaagtctttggagaagtatatcattgaggaactcaatgttcgaaaagttacactgtctacagataaaaacaagtatggcattcggctaagggcagaaccagatcacatggtcctggggaagcgtctgaagggagcctttaaggcagtgatgacgtccatcaagcagttgagcagtgaggagctggagcagttccagaagactgggaccattgttgtggaaggccatgaattgcacgatgaagacatccgcctcatgtacacctttgatcaggccacaggtgggactgcgcaatttgaagcacactcagatgctcaggctttggtcctcttagatgtcactcctgaccagtcaatggtagatgaaggaatggctcgggaagtcatcaatcgcatacagaaacttcgcaaaaagtgcaatctggttccaactgatgaaatcacagtgtactataaagcaaagtctgaaggaacatatctgaatagtgttattgaaagccacacagagttcatatttaccaccataaaggctcccttgaaaccatatccagtttctccatcggataaagtccttattcaagaaaaaacacagttgaagggatctgaactggaaattacactcaccagaggatcttcccttcctggtcctgcttgtgcatatgtcaatcttaacatttgtgcaaatggcagtgaacaaggtggagtattgctcctggaaaatccaaaaggtgacaataggttggaccttttaaagctgaagagtgttgtcactagcatttttggtgtgaaaaatacagagctggctgtcttccatgatgaaacagaaatacaaaaccaaactgacttactgagtcttagtggaaaaacactttgtgtgactgcaggatcggctccctctctgatcaacagttctagtactcttctttgtcagtatatcaacctacagctcctgaatgcaaagccacaagagtgtttaatggggacagtgggcactctcctgcttgaaaacccacttgggcagaatggactcacccaccaaggtcttctgtatgaagcagccaaggtgtttggccttcggagcaggaagctaaagctgtttctgaatgagacccaaacgcaggaaattacagaagacatccccgtgaagactttgaatatgaagactgtgtatgtttctgtgttaccaacaacagcagacttctagcatgtacttatcaatgttgttcggtcagcccttccctaattacacctatcccctacacatacatgcacatagacacacacatgaacacactgaagatatttccttcaggtgtgtgtaaaatatgctgcttggattgaaattcaaatgggattgattagtcaagtaacttgagacctcacagtaatcttcacacttaaccttagacacctatgcagtcatgttgggagcaggttacaatgttacttcagcccacagtttatttctatacttgagttcttaagtacagaagatagaagtgatttaaatggcatagtatatatatcattttctggccttttaaaatttatttgagacctcttgatgaaatggacatattatatatttctgccacctggattttcctggataatttgatggaatattttaagtttcagtaaatcagaacaataaacaaactcagataaaaaaaaaacaacgttgcgggcggcccaaaaattaacactctgggcggccccagaggaagttcgggtcagaacgcgaagtggtgtccaaaaagcgggcgggaacccggtgtctgttcggcactccgcccccggaatcaaacgccacgtcacccacacnnnn

SEQ ID NO: 24147 - DNA, 293 bp, Homo sapiens
  misc_feature 293: n = A,T,C or G
ggtactatctacctcacagagctacgaaaatcaaatgagaaggggtatggcactgaccacagcagcatactgctatgaacgtggttaacagatagacaggcacgccccctggagggctgctcccttcactactggcgcattatcgtgcagttcactttggaaaatatttttcttctaaatctatttttagtattgaacagcacactggagtttttgtccagaagtttgactttagaagataagaaataactgagcgtattgcaagcaggagttagaggaagagactcagtacn

SEQ ID NO: 24148 - DNA, 3918 bp, Homo sapiens; identical to SEQ ID NO: 22949
  misc_feature 3915, 3916, 3917, 3918: n = A,T,C or G

SEQ ID NO: 24149 - DNA, 741 bp, Homo sapiens; identical to SEQ ID NO: 21831

SEQ ID NO: 24150 - DNA, 1966 bp, Homo sapiens; identical to SEQ ID NO: 22146
  misc_feature 1961, 1962, 1963, 1964, 1965, 1966: n = A,T,C or G

SEQ ID NO: 24151 - DNA, 910 bp, Homo sapiens; identical to SEQ ID NO: 22341

SEQ ID NO: 24152 - DNA, 991 bp, Homo sapiens
  misc_feature 1, 991: n = A,T,C or G
ncttcttccccgtagcgtgatgacgtaagcggcgttggcgtggatgagggatggattcgttctgtccgatcccagaaggaagtcttgttcatgcatgtaaatgatgggtcatctttggaaagccttcaggttgttgcagattcaggccttgacagtagagaattaactttggggagttctgtggaagtacaagggcagctgataaaaagtccatccaaaaggcaaaatgtggaactggaggcagaaaaaattaaagttatgggaaattgtgatgccaaggatttccccatcaaattataacagagaggcatcctctggagtacctgcgacaatatcctcactttaggtgtaggactaacgttctgggttctatattgaggattcgcagtgaagcgacagttgctattcattctttctttaaggacagtggctttgtacatattcatactccaataatcacatccaatgactctgagggagctggagaccttttcaacttgaaccttcaggcaaacttaaggtacctgaggagaattcttcaatgttcctgctttcttaacgtgtctcagggacaactttcatctagaaagtgatcgtcaggagctttactcaaggtgttacctttggtccgaccttccgagctgaaaattctagagcggagcactggcagacgtttatatgatagagcagagaatttctttgttagacagccttcagatctatgcgcgttaaacgcaactgtccagggtacaccagcgggtctcaactgtccgaaagttgacctggtccaatcgaatggcccgagagctctgagatgttaaaaacaatctacaatcttatgagacgcgacaatagacgaccaaatatcaccgagtggtaccacgactgaagggtaagagaaaatgtgatgaaaaaccctcgtgatgagcagccgtcttgttctcgtctcctcctcgcttcttcttgcatctttttccgtgaaatcaagacn

SEQ ID NO: 24153 - DNA, 3677 bp, Homo sapiens
aggaatgaaaggtcataagccattagaaatagtggcattattatgcaataacaacaccctagctaacctgcttttgtcatctgtagcacttacaataaagaatgatgaccttccaaccctggacactacctcgataaagcaaaccagagatcctctctacactttctatggaagccataaaagttgccatcaatatatccactttcatagttctatacttttatactttctagacttttttatagactttatgatcagatctttttgtctcaaaggataggttttgcaagattcaaaggaaaatcaaactccttggttgttccagctttgaagcttttgcttcagtaaatttgtttaaagaaccagatcacataccatttatcaaattctttacttaagtcagaatactttgcagacatacatatttggaaaacaaactgtttcttgttcactagatagaatctgtattgtagtaagaaactacttacaaggtggctttctttctgctttgttactctatgtattactcaataatatatgtatggtcacaggttcctggagttgttttatttctttatgacagacacatgagtatgcacctctctctaatcctctgatgtcactgcagcttcagtctctctcactctgtttttgagtgccttcaaaatgccagcatcctggaacattcttttcctgatctaaatcctacctctgactatttcattatccatgaatattggaattcacccatattccaatgggcttaactctacaaactagctaaaaccttggacaagaattttgaccgtatttctgttttgttcctccatgtcatttttaggttatatttttaacttttatttatatcttatttcttcacatatttcgtctctctgttgaaagattttatccttatttgactcttcactttttttactttcaccagaaatttgacgttcctttaaaattaaaggtcattgaatgtcttttgaacacctttttctcaactgaagtcttcctgaatgcctcccctttctgatgaaaggatcctgagtgctgctgttgctctgccctgttcccatgtgcccactcccttccgtacacattttgcaagactatactctttattttagtcaaattaatttaaaattgctccctgggtttctgctctctcatggccctgtccctcaaaaacttctgtttactttttctagctgttttcatctaatttgtttaaaatgtatgatggatccataatatatgaaggatgtaatgaaaaggaggttgcagtgttttatataatatgatcgagcacctccgtgatgaaacatttagcaattggctagtccttcacagccagagtggaagtttgtgctgtggacaggtctttttactcccttccagttctcctccaaaactggagaaaaagggaaaaaaaaagaactctttcaaatgaggagatttgattgcatttttttaggtgaatgaaagcttggagttgagcatttgggccttagtcagcatttttcctttctgacttaaaatctcatgtccttttccttaaagttaatagtactcaggtttttaagactaataaccacacaaggtgggtatctaagaaggcagctgttaatacattctccatctttcctgtctggcaacaggaaagatattattggtgagatagtgcaaaattgtgagaattggttatgtttgatgatgaataaattcaagatttttgaaggcttcactgctatttgggatgggaaggtgagtttacaaaatgaaaaaggtagatttttatgttacagaaatcagtaacgggtttcttgttgtgttaattacctttcacttgatttgccatgatgtttcttcctcattattgatctagaagtttgcctcttggatagtaactagcaacttagtatctactttaaaatttgtggcttttctcttcagggtcccaggccataaaacaacggagagctgtacttgcttgtcacttggaggaaccacatccttgagacagcctgctgtcttgtatgtcttcagtaggaaacttctgacacacacattcaagggagttcctgcccctgagaagtgttcccatagctttccagtcgcaggttactttcacactacgtcagcttctctggtgagatcagggatgttacatattacttgaaaatgatttcataggaagtgaggatggggcaagaaaggaggtagaagctgaattttgcttaacttcagaaggaaatctgatacttgccttggctagttctgatcaactaaagagcctgtgtctgtactggatgtgccaaagagtcaagttgtttctggaatatccagctcctctgaatgaacacagcttcctccctacctgtcttttatgggtgaaaagggaccgtctgatgagcatgatagacatcctgtacaggactcaagactgtttcattgcatttgaaagttggtgggaagtattttattctgctagagctcctaaccctcctagaaatatcttttcatgctctattaattcaattcattagtttaaaaagaaacagtgtgacataattttggtgtttacttcttaagttgtctccccaagggcatatatgtagcctctgaaaatgggatgatttcttctcaatcttccataaatttgaatatgcattttattcatttcttgacatgggctgtgtgactgttttccatcagcagttctggctttgtccacaagggagcaataaagtacgttagctttattctcaaccttctaaagaaagatcccacttttaaatctcttctggaatagcctcttagctcaaagcttattcatgtattttgattatttaagaaattttcccttattacaaagtccagtcgtcgttcatccctcatgatgccaagcaatgattgatgtgtgggtgtggagtccttgtgggtcaggcatcttaattaattagactttttacatattgatgatccccagattgaaagccaggaccttcccataggggcgcctttgtgtgctaaaggcagagcaggcaggcttctccactcctatctcctccgcaggccaccaccatcacatctataggaggaacaagagcactgggggaactctggagtatgagtaaggaaatgcttctcaccttctctgctccaaagagatatctgttacatcagggaacaagtcctctaggtcaggcacttcctcctgaccagtgcaacgggcactccaggttagaaactgtgtgtgctccctctctgtcagttacttgtctaagggctcctatccgtggtcatcagctctctggccatgagttctgtttgtgcttattgcagcagcatcttcacaacaaacaggtcagtaatcaacctgggaaggggaaaagacgacagtaaatatttaccccctgtagagccgggaggcatttacacctggaattgggcttcttaactgattttctggctggcagctcacccccagcaagtctgacctgagcatacagggcacagagagggtgtctacttgtaaccccacacttgataaaaaaacaaaattgaagtgtgatggtttaggacgaagtggcaggtgcaattgtcggttcgatttgtgttcccaacagtctgaaatcatggcctttcccattctaagaaaccagtggtgc

SEQ ID NO: 24154 - DNA, 2381 bp, Homo sapiens
  misc_feature 1, 2, 2371, 2372, 2373, 2374, 2375, 2376, 2377, 2378, 2379,2380, 2381: n = A,T,C or G
nngtggacctcgcgacggtcccgcggagacatcgatataagaagaaatgggctgccacagagcccaaattccctgctgttcgactggctttgcagaattttgacatgacttacagtgtgcagtttggagatctttggccatcaatccgtgtcagtctcctctcagagcagaagtatggtgcactggtcaataactttgctgcctgggatcatgcaatcttgctgccaatgatctctccccgtcccgaatagccagactacagaagatccttcacagctatgtgcctgaagagatcagggatggaaatcaagttcgagttacctcatgggatggcaggaaatggggagaactggagggggacacctatgaccgggtgctggtggatgtgccctgtaccacagaccgccactcccttcatgaggaggagaacaacatctttaagcggtcaaggaagaaggagcgacagatattgcctgtgctgcaagtgcagcttcttgcggctggactccttgccaccaaaccaggaggccatgttgtctattctacctgctcactctcacacttacagaacgagtatgtggtgcaaggtgccattgagctcctggccaatcaatacagcatccaggtacaggtggaagatctgactcacttccgaagggttttcatggacacattttgtttcttctcatcctgtcaggttggggagctggtaataccaaacctcatggccaattttggccccatgtacttctgcaaaatgcgtaggctgacatagtatcacccaatccctgaagcaagaatacaaagggtatactctgttggatgcaccagaaactggaaactgggaccagtggcagagatgcactctcggtcctgtctccatcctgttcgtgtctttctgcagttttcggcaataagaagtagaagatttgctgtcctgctgtccaattgtggagcatcagcaggtttccaactcactcattaacccctaccccatctccaggcctgtactaaagtttgctgcccgcttaggggcttagaaggagaagccagtgagcaggctcacactaagttgtaaacataggagaagcatttggccaataaagttgttgaaactctatagacctggggctgcagttggggacttcatgtcagtgcaaatgccattagttccatttgtaccagccagttactgagcccctgtcacccttgaagtgagttccacctgaccagtcttgagcagccaacaggctcaattaagcccgcctggtttttccatatggctcatgatctaatttaaggaacaagtaactaaaaatgttaagccagtgcaaaataatctgcttacctactcacattggaaaagccctctgagctgaataattctggccattcctgctgtcaacaatactgctgcccaaatgtggcttaggaggctgcttctgccacaaaaccgtcatactcttgtgcgtgccttgttctttgttcattcatctagcaggtattcccagacctcgtgtatgacaggtagctagggagctcttggagatgtagcagttgggattgtgggagattactgggcttcctcatcctttagaatggtaactctccttttgctttctgaacacctaggaatttcctgatgttttagttttgttggattccagactttttgttgtttctagtctgcagctgagctctggtgccagtacttaggtccagcccctaatccctaactcttccctcagcatcacagggcttcactgcacacactgtgtacagggcaagatttcatcatttacttgactgcatactcgatatgtagtatatggtaactattagccaaaagaccgtaacctttagctggcagggatataaacacaactgctcagggtcacttgcacgatattatatctatacaccttcatcacaatcgccctggcaaacatcctgtagcagacaacggcgtgacaacacccaggaacaccatgacggacccctctggctcatcccacacccaatatccaccctcattcctgacaacactacaggacacacgagcaaaccgggccaaaccacaaggggcacacaacgacgacaacacacaggcaaaaagccgacgacccaccccacaccgcaaaccgacgacacaccacggccgaaaacaacaggaaccacacaccaagcacgcaacaaccacgcgcaaaaacgacccacgacaaaactccacaagcgtgaaaccccaccagcagacacatgcacgacacgacacaaacaaagaacacccgcagacaacacaaacgaaaccgcctgagcgtacacgagagacgacacaaaaaagcaagaaaaaaaaggacaacaacaaagagannnnnnnnnnn

SEQ ID NO: 24155 - DNA, 293 bp, Homo sapiens; identical to SEQ ID NO: 24147
  misc_feature 293: n = A,T,C or G

SEQ ID NO: 24156 - DNA, 991 bp, Homo sapiens; identical to SEQ ID NO: 24152
  misc_feature 1, 991: n = A,T,C or G

SEQ ID NO: 24157 - DNA, 1545 bp, Homo sapiens; identical to SEQ ID NO: 23819
  misc_feature 1, 2, 3, 4, 5, 6, 7, 8, 9, 1541, 1542, 1543, 1544, 1545: n = A,T,C or G

SEQ ID NO: 24158 - DNA, 1782 bp, Homo sapiens; identical to SEQ ID NO: 21380
  misc_feature 1766, 1767, 1768, 1769, 1770, 1771, 1772, 1773, 1774, 1775,1776, 1777, 1778, 1779, 1780, 1781, 1782: n = A,T,C or G

SEQ ID NO: 24159 - DNA, 322 bp, Homo sapiens
acctcaaggaggcagagaagcagcaggcataaactttcctaaatcaagtaaacagtgtcaggaattccgagtgctggttataggtataccgaaacgcctgatgacccctatctaatttctagttatctacacttagtcatttacacacagtctcatttggcatccagaacatgtaccttgtgaaggctttccgtgcacatcgggtcaccagtgaaaagttgtgcagagcccaacatgagcttcatttccaagctgccacctatctctgcctcctgcgtagcatccggaaacatgtggccctacatcaggaatttcatggcaa

SEQ ID NO: 24160 - DNA, 1452 bp, Homo sapiens
  misc_feature 1448, 1449, 1450, 1451, 1452: n = A,T,C or G
cgacccacgcgtccgatatctttcatgactattttgacaaaagtttaaaacacatatgaagttcaaatttttgtcaaaatagtcatgaaagatatgttatttttgcataatgagggagctcttggagatgtagcagttgggattgtgggagattactgggcttcctcatcctttagaatggtaactctccttttgctttctgaacacctaggaatttcctgatgttttgttttgttggattccagactttttgttgtttctagtctgcagctgagctcgggtgccgcggccgcggcccaccccctaatccctaactcttccctcagcatcacagggcttcactgcacacactgtgttcagggcaagatttcatcatttactgactgcatactcgatatgttgtttttgtaactttagccaaaagaaagtaacctttagtggcagggatataaaaaattgctcagggtcacttgcagatattttatttttaaactttttttttttttcctggaaaacatcctgtgcagaaaagggtatataattttagaatacctgaaggcttcttggcttttccactttccttattcctcctcttcctgccactctttttgtcccttctgtctttcctgctcatccttatttgggtattagaggtgtcagttgaggagggactttagctgaggttaagccttcttttgggatttgcattgtaattgagggccctggaagatctctgagactcaaaatcaggtgaagctaggaagatggagctttaaggagcatggctagtgctctgagtaggaccgtaaccgcctccgtgcgtggcatatggtccctgcatgctgttcactctgtatagtacttagtattcgctgaggctaagaggcctcaggtgcctgggcttctgcccttggactcctggatatccagcctagtgctaattgaatgctaagcagtggtaattcaaaatgagagggtcccctgcctctagagtcatcatctaattggggacaggcagacctagataagaaaagcagagaactactttggaaaacagtttatctgctgtaattgaacattcagctaccctataacccagttaatccaatactggggataaatcctagagaaactcatacatgtacaccaggagatgtgtacaagaatattcatagcaaccctattcacaaaagcaaaagcctagaaataacccagatgcccatgagcaagagagtggacaagtaaactggaatattcacataatagaacattatacaattgtcaaatgaactataatgatacctaaccatatggatgaatctgagcaataaaccttgaacaggaaaaaagtttaatcccagaagagtaaatgtagcatgatgccctttctaaatgaaaggttttctatcttttctatggaggtattctttacataccatatagttcannnnn

SEQ ID NO: 24161 - DNA, 334 bp, Homo sapiens
  misc_feature 1, 2, 3, 334: n = A,T,C or G
nnnaccatcaaagactgtggagtcattgatggtctgtgtgtcctcacccaaaggggcctgatgtgccaccccgggctctatctgtaccacgatgtacaagagttatattaattatacaacacatatctggacacatacaaggaaggcgggcagtttaaaaaaaaaaagttaatcctgtgatattaatggaatgacattttgaggtcttgagaatgggcacaaaagtgggaaatgaatttcagtatgggcaaagacactgaggatgatgttgattagataattcactccgtaatgatcatgctgtgtgctaataagtataaccctggaaagaacn

SEQ ID NO: 24162 - DNA, 2416 bp, Homo sapiens
  misc_feature 1, 2, 3, 4, 5, 6, 7, 8, 9, 10: n = A,T,C or G
nnnnnnnnnnagcaagtgtttttggttgtgtgccggtagccatgggtaggcgggaatgatgtgatgtgattgattgtgctcccatatgccccaacctggtagaaaagttcctctcagtgagaaatcatttattttaatggcaaaatttttacatatcagtaaaatctgttatacttaaaactatgtatacagtacatttctggcaaaaaaccttatacatctttcagttgtcaagacaaagtaaaaatatggttgcataaagtcacaaaaaatataaactgctgaaaagataataaaaaaagattaaaaatcatttgcattgcctcccttacctcttcaatattagtaacaatttgcaaacaacaaaaaaattgtgaaaattctgttgcaaccttgacacacttaaccaaaggttgtcatttcaaatatcctagcttaaaaaagaatttactgcaattgtctgtgcatttatcatactatttatagaagtgcaatatttaaatattttcaaaataaaacacagtaactaaaatgaatcacaataacttataagagaagcaaagtttacaaaattaacaatttttaaaaggtcctatttaattggttcctccttttcttcccccctccccacaacagcgtatatagcgccattacttaattccatatacaaatttgtaactttaaaaatacagtcttctgttaacatcaggaacattatgctgcacttagagaccctaagtaaaattagaatcccctaaagagagggccacataaaaagtaaatacagttttgaactcatatttaaatggaacttctattactttgtacagctttcaaattagaagttgaatagaacaagccctggacaaaaagcagcaagatttttcttttgaattcagtgcatgattctagaagtgcttgagtcaaatctactagagtcaccatttatgcaagctatcatgacatttgagttcattatcatctggttacataagtgctcactgtatttgccaaaaataatcctaaaatatgattcttaaaatagaaaaaatatagctctgttgcaatgggaaaatgattaatacaaaaaaatcaatttcttaaagttaacataaggcaaatataaatgatacaatattatcatacacgataccaattttatctgaggtgactacatcttcatttacatctattgtgtgatgcaattaagaatgacaaaaaaaaatatcagtgtaaatcagaaatcttaggaaaatccagtatctttaaaaagtaatttaagcccaaaacaaatgtgaccacttattaatagaattgatttgttccatattttatcaaaataataataatgttatatccaactaaagagttataaccaagtgtcatatgtaaactttaattggatcctagtttgaaataatcagctataaagaaatttggagttaacttcagaaatttaaatatggcttgattagatgatattggggaattattacttttacaatggtattacggatttttaggagaatgtcattatctgtaggagatacttgaagtattttcacggtgataagtatgtctgtaacatccaaatggttcagggggaaaaaagcatatatacatacacaaacaaacacatatatgcatatatatgcataactagctgtatctatacatatataggtatagagaaaacaaatgacaaaacattaacaactgctgaatctaaatggtagatatacatgtgcttaccaaacagtttttcaatttttctgtttttaaaaatgttcataataaaatttgggggggaagtcatatcagagcacttaaagtttgtaagagatagttttctatgcactgaatcaatttaaaagatacataatcaaataagtagcaatgtgtgcatatactcaataatgactgacatgatgggccagaggaatttgtgaaattggcaaaaataatatgatttatctacagtatatgcaactcagctcttgtaacaaaaagaacattttgtgtacagaatatcgtgggaatattttaagactaaaattagtgctagagtatctgaatatataaattctgtgtttttggacttgtaaagctaaaatgaaatttaaattaggtctgatatctgatatgacttaccatacactacagaattttaaaagggggatatggaggccgggtgcggtggctcacgcctgtaatcccaccactttgggaagctgaggtggtggatcacgcggtcaggagttcgagggagggatatggaagaagttatccagactgttactactgctggaagatactagctatttatgaagttaaggagcccagaaaacaaaatcacctataaaggtcttgggaattctaggcaaatatttattaataaatttatacacgcggacgc

SEQ ID NO: 24163 - DNA, 408 bp, Homo sapiens; identical to SEQ ID NO: 21570
  misc_feature 1: n = A,T,C or G

SEQ ID NO: 24164 - DNA, 689 bp, Homo sapiens; identical to SEQ ID NO: 21367
  misc_feature 1, 2: n = A,T,C or G

SEQ ID NO: 24165 - DNA, 1782 bp, Homo sapiens; identical to SEQ ID NO: 21380
  misc_feature 1766, 1767, 1768, 1769, 1770, 1771, 1772, 1773, 1774, 1775,1776, 1777, 1778, 1779, 1780, 1781, 1782: n = A,T,C or G

SEQ ID NO: 24166 - DNA, 985 bp, Homo sapiens; identical to SEQ ID NO: 21932
  misc_feature 1, 2, 3, 4, 5, 6, 7, 8, 9, 10, 11, 12, 13, 14, 983, 984, 985: n = A,T,C or G

SEQ ID NO: 24167 - DNA, 604 bp, Homo sapiens
  misc_feature 603, 604: n = A,T,C or G
acttggcaacacaggggattgttatacctccagctactgaaaaacacaatcttattcagcatgcaaaagattactggcaaaagcaaccacaactgaaattgaaggaaacgccagagccagttacaaagacagaggacatccacctatttcaacaggaccacctcaagatgaatggggaccacagcacttctggcatgatgtgaagcttaggttttattacaacacatcagaacaaaatgttgtggactaccatggagcagaaatcgtgagccttcgtttgctgtcactagtaaaagaagaatttctttttctcagccccaacctagattcacatggactgaaatgtgcatcttctcctcatgggctggttatggttggagttgctgggactgtccatcgaggaaacacttgtttgggcatttttgaacaaatttttggactcatccgctgcccttttgtggagaatacttggaaaatcaaatttatcaacctgaaaattatgggagagagttcccttgctcctggaacattaccgaaaccatctgttaaatttgaacaaagtgatctagaggccttttataatgtaatcactgtatgtggtann

SEQ ID NO: 24168 - DNA, 1367 bp, Homo sapiens
agttctagatcgcgagcgccgccctttttttttttttttcactagacaaaaatctatttttaattgtataaaattatacatataaaatacatagaatgtactaagaagatgagtaaaatctttgacaccagaagtggacagatcaggaaacaatttttctcaagttatttgggatcttactggttggtatttgagaaaaataataaatccaggaggtacgagggcaattcttcccacaactcacaccccttaatccacacgtcccagagaaaggagaaacaggagtgttgatgaaagaaagaggggaagagtattaaagaccattactggctgggcagggcactctcagcagctcaactgcccagcgtgaccagtggccacctatgcagtgtcttccacaacctggtcttgactcgtctgctgaacaacctgggccggctgtgaacgtagttcctgagagatagcaaacatgcccaacagtgagcccgcatctctgctggagctgttcaacagcatcgccacacaaggggagctcgtaaggtccctcaaagcgggaaatgcgtcaaaggatgaaattgattctgcagtaaagatgttggtgtcattaaaaatgagctacaaagctgccgcgggggaggattacaaggctgactgtcctccagggaacccagcacctaccagtaatcatggcccagatgccacagaagctgaagaggattttgtggacccatggacagtacagacaagcagtgcaaaaggcatagactacgataagctcattgttcggtttggaagtagtaaaattgacaaagagctaataaaccgaatagagagagccaccggccaaagaccacaccacttcctgcgcagaggcatcttcttctcacacagagatatgaatcaggttcttgatgcctatgaaaataagaagccattttatctgtacacgggccggggcccctcttctgaagcaatgcatgtaggtcacctcattccatttattttcacaaagtggctccaggatgtatttaacgtgcccttggtcatccagatgacggatgacgagaagtatctgtggaagggacctgaccctggaccagggcctatagctatggtgtggaagtcagcacagagcagtgccctggctgtgtccctggacgggtggacttagctagggagaaagtcgaggcagcagccctcgaggccctcacagatgtctaggcaggcctcatttcatcacgcagcatgtgcaggcctggaagagcaaagccaaatctcagggaagtccttggttgatgtatctgggtctcctctggagcactctgccctcctgtcacccagtagagtaaataaacttccttggctcc

SEQ ID NO: 24169 - DNA, 622 bp, Homo sapiens
  misc_feature 620, 621, 622: n = A,T,C or G
actttctgatttttctacaaagattgtgtattacttgtataataaaaataagagctttaaattgtgaaattcttctggatttggttttctcattttattatggaatttttcatacctaaataagatgaatagttgggtaattttttttctgctttgtcagttattggtgtttgttaacttcttaaaaaaaattaaaaagaacttgggaagctctgtttttctatgccctggaaacatttaaatatttagaattttttgctctttgaagtttttataacatgtatgaaactgtccaaatctagtagtgcctttttaggaaatatggggttgttgtttttttaatttttttcatgctcattattttcttcaaactttatttctattctgtaagtttttggcaatttaaattttcccggctaagcacagtggctcatgcttgtaatcccagcacttctggaggcggaggcaggaagattgcttgagcccaggagttcacaatcagcctgggcaacattgtcgctactaaaaattagctaggcatggtggtgtgtgcctgtagtcccagctactcaggaggctgaagcagtaggatcactgagcctgggggcgaagtgcatgannn

SEQ ID NO: 24170 - DNA, 2538 bp, Homo sapiens; identical to SEQ ID NO: 20316
  misc_feature 2538: n = A,T,C or G

SEQ ID NO: 24171 - DNA, 907 bp, Homo sapiens
  misc_feature 1, 2, 3, 4, 5, 6, 818, 819, 820, 821, 822, 823, 824, 825,826, 827, 828, 829, 830, 831, 832, 833, 834, 835, 836, 837,838, 839, 840, 841, 842, 843, 844, 845, 846, 847, 848, 849,850, 851, 852, 853, 854, 855, 856, 857, 858, 859, 860: n = A,T,C or G
  misc_feature 861: n = A,T,C or G
nnnnnncacagtcacggaaaacttttgactgtgtgtacctccagcaatgagaagcagagagggctaggttgacggtctcaaactggcaccggggagccccgtgactgggttttaagggtgtgtgaatgaagattaaaatcttgtttgatattaacatgggttcagtttttttttttaatgtcactaagccatgctgtagagcccttctggaaggacttaggtgggacaaagagccagagtccacaacttctgtattgttcacagggccctagtgcatcctgggaagtttctctggcaccggaggtgagttttcctaggtaggaaagtgaaggttgcaggaaagaagaaattataaggctatattataatgtgatgtggaagtagaaagctactttgctctgtaacctaaaaggagtcattagattatttgctgctatgagttcattttctaggggtacttaataatcatgaaagtgcagggagaaaaacatttttaagtaagccttctcagtgaagtgacctttctccccaggactgtattctttttacccctctgccatgttaacagcatgcaaaccatatttacatttttacttagttaactcatagtctgttttcttaaatatccttgttaaaagtggtagctgttcacattcctttggggaacagcatttctctaagaaatgtttataggttttagccagacatagtggctcatgcctgtaatcccagcactttggaagccagagcaggtagatcacttgaggtcaggagttcaagaccagcctggcctacatggcgaaactccacctctaccnnnnnnnnnnnnnnnnnnnnnnnnnnnnnnnnnnnnnnnnnnnntgtttataggtttatttaacaatgtgaagtagtcctgggaagttgt

SEQ ID NO: 24172 - DNA, 1191 bp, Homo sapiens
  misc_feature 1, 2, 3, 4, 5, 6, 1191: n = A,T,C or G
nnnnnnagagaacgaactttattttcacaagaaaataaggcacaataagggggaagaacttaaacctcaacataatatcgtgtccaaaaatgtgtatttagaaaaataaaatcctgtggagtttgttatcctaatgtttattttatactagataaggtgacttgttttcttgtattgaggtcttactgtttcagatttgtttttgtttctgttctaactctaagcagacagagctcacaagtctttggcatccattttaggttgtacactcagagtcatcttataactggaaactgtcaggtggtcccccaccccagtgagtgtatgaaagagtcaagaaaaagattggaaacaaactattgggtgaataattggttgctctattattattattattattatttgcctttttttaatcaccatttatttgtgtaatctttctccattgattggctgtcattcttataatatctgaactaccccataaaataattctctgacttaaaggcatttagcttttgcttatcgtttttacatcctctattcaactaagacactgtcttgagagttattttttccagatggatcgttggcctaaattttcacacttctcccctgttcatcctttttcctcttccctgcttcctgggaataaaaggaacttttttaaaaaaattaattagtccacaggtctcattatctttctttatgattaatctatgactttttggtacaagaacaatggaaaaagtgaattaaggtaatgaacaaaacctttcacccacttaaacattttccagttttgagattcctcttcgtgtttgtggtgtcttccccttgttaccccttctgccctttttctctgactatggtaatttggtctttaggctcatatcagtctccccgagacattctgcagtcattatcaccttttgggtggattttatttgtggattttgttttttttaaagaaaagtactttttacattggtgcatatttgcttgggatagagtgtgtaattaccaatcgtattgatgtagtgattgtgcctgcgagtttttacaagaacaaattatttgtttataaggaggcatgtattggtcagttgacatgaatcacataaattggtaaaatataccgggtattaacagggatccacttacgagctgataatgagttttggcaagcan

SEQ ID NO: 24173 - DNA, 2105 bp, Homo sapiens
  misc_feature 1, 2, 3, 2104, 2105: n = A,T,C or G
nnncacaagaagatggcagccaggtaattgagaacttggttcaaaattcatttctcctgactaataactggactcaccaaccactctgtttcacttaagtcttgactctgcttaagtgtgtgtgtatgtgtgtatgaaactgaaattctggattcttaatatttctgggagtactttttaatgagagaattgtcaaatttggaaagatttattgagccttaggttacatggacagttaagcttaagtaaactgtatattgattatcaaacacaagctgtaattggaaaagttgagaggaaaagcatgagatcacaaattagggggaaaaaagaaaagggatttttaaatttggtgtattaaattcattgtccaagggggaaaatgaataatgtttcattagattccttatatgcaaaagtatttattttgaacatgtgtcctaaaatatatgcactaactgatgtgattaaaattgtccaagaaataaacttgagcataacatactttgtgtgcaccacagtaagctattctgcattgaagtggtcttttataactaaggcctggactttgctccaacagagtcgtggtcttctgaatagtgacttaaggagttttgtttgcttaagtcagataatagcacattcacagggaaacaaagagagttggtggatagaattttctgactattaatttttcttccatgaaattttattatgcctttggcactttctgccactcttacagcatatcacaagatatctgtttagcagaagattatgtagttactttaattttaatataaaagtagcttgtgatacattaccaagagatctctgattctttagtaagtttgagaacacctattctacagagatgataggtacttagaaatgaagactttaaagtacattttaatctaatataggccagtaattgggggaaggggctttgagcagtacaattttaagatgattttgagggttgtatttctttatcatttaaaaatatcctaaagtcagtaatttatatgaaggaaactcattcattattgaaggtattaaaaatagccatcatctgtattaggtagcagttttggaggatcatctttttcttttgctataaagccctattaatgaagaatacttccagtagagttaatagctgtagcttacctagtgtgttaatgaagtgtgtttatttatgtgacttgataccagtagtcataatagagactgaagaggtatgcgttaagcacgcctacttctatgcagtaaacaggctgcagctgcctagattagattcttagaaatgtcatattttgaattgttttatttcttgtaggggaagctttgtcccacttcattcatttgcatgccataggaattacatattggttatcattacgtatctaacaagattcagaaacaaaaatcttggacttttcacatccgaaatatgtcagctcttaataaatgtgtggtgcttaagtctacatatggcatccatagttgatctagagtatggatatgagtgtgttgaccagttatcagtaggtggacaaatatttgggcatctacagatgagactatgcactaagtgtggactgagtcctaaagaagcttatagtcaggtgttgtttaaaacattatcagaattcttaaacccaaggaatttaattttatttggtatttcttaagcctaaaatgaaccaagagaaagatgatgttagaaagtacttgtagtgaaagatgatttagaaagtactggtagtgcatgtgtggttctgacttcctggcatggcaccattattataatagtttgagaaatttaggatgtgagattctcacattttatggtagaagacttggaactgaagtattaaatataggttataaatatgttacgattaattttaagttatgtgaatgaaattaggcagtgagtgaggaaataggtataataagtgttaatagagtgggtaaggggaagtaaatagatagagatactaaataatagtgtaaatgagatttaaaagcttagtgattgtctacaagattgaataagaatatgtataatgaaaaagaccaataggagaggagaagnn

SEQ ID NO: 24174 - DNA, 1001 bp, Homo sapiens; identical to SEQ ID NO: 21314
  misc_feature 681, 682, 683, 684, 685, 686, 687, 688, 689, 690, 691, 692,693, 694, 695, 696, 697, 698, 699, 700, 701, 702, 703, 704,705, 706, 707, 708, 709, 710, 711, 712, 713, 714, 715, 716,717, 718: n = A,T,C or G

SEQ ID NO: 24175 - DNA, 905 bp, Homo sapiens; identical to SEQ ID NO: 21290
  misc_feature 1, 2, 3, 4, 5, 6, 7, 8, 9, 10, 11, 12, 13, 14, 15, 16, 17,18, 19, 20, 21, 855, 905: n = A,T,C or G

SEQ ID NO: 24176 - DNA, 1340 bp, Homo sapiens
  misc_feature 1163: n = A,T,C or G
acatctccacaaagtactcccccttctcagggcagatgatgctttgagaacatactttggccattacccccagctttgaggaaaatgggctttggatgattattttatgttttagggacccccaacctcaggcaattcctacctcttcacctgaccctgcccccacttgccataaaacttagctaagttttgttttgtttttcagcgttaatgtaaaggggcagcagtgccaaaatataatcagagataaagcttaggtcaaagttcatagagttcccatgaactatatgactggccacacaggatcttttgtatttaaggattctgagattttgcttgagcaggattagataaggctgttctttaaatgtctgaaatggaacagatttcaaaaaaaaaccccacaatctagggtgggaacaaggaaggaaagatgtgaataggctgatgggcaaaaaaccaatttacccatcagttccagccttctctcaaggagaggcaaagaaaggagatacagtggagacatctggaaagttttctccactggaaaactgctactatctgtttttatatttctgttaaaatatatgaggctacagaactaaaaattaaaacctctttgtgtcccttggtcctggaacatttatgttccttttaaagaaacaaaaatcaaactttacagaaagatttgatgtatgtaatacatatagcagctcttgaagtatatatatcatagcaaataagtcatctgatgagaacaagctatttgggcacaacacatcaggaaagagagcaccacgtgatggagtttctccagaagctccagtgataagagatgttgactctaaagttgatttaaggccaggcatggtggtttacgcctataatcccagcattttgggagtccaaggtgggcagatcacttgagctcaggagctcaagatcagcctgggcaacatggtgaaaccttgtcttacataaaatacaaaaacttagatgggcatggtgctgtgtgcctatagtcccagctacttgggaggctgtggcaggagaatcacttgaacccaggaggcggaggttgcagtgagccaagatcacgccactgcacagcaacctgggcaacagagcaagactagagtctcgaaaaaaaaaaaaaaaaagtnccacctcccaggctaatgtgttaacagtgttttctatgattctaaacttgttttctttgtatttctaagaaatacaactaggccctaacttttggtctgtggtcagaggtcagtgtctgtgctattccaggatctattatttcagtttgcccttttattctctccgtttgtaacagt

SEQ ID NO: 24177 - DNA, 4515 bp, Homo sapiens; identical to SEQ ID NO: 20660

SEQ ID NO: 24178 - DNA, 636 bp, Homo sapiens
  misc_feature 1: n = A,T,C or G
natgctttatcggccgcttttttgatgtttttttgcaaaattcgcccttagcgggggggttgtctaggtacattctctgaagaggaagcagctggttggacaggatttcttgaagagccaggtgctaagggcatcaggtcgacatccatagtaaccatgtgccataacatctacacatttccacttgttttacagacaaggtaacaggcagaaggaaaatccagagtcttgcagtaagcagatgacaaaacttcaatatgcttgggcaccacttaggtgaccccagggagatttagtgtggccttaggaaagcaaaagagcactttttattggaaatatgagcttgtcactgggaaagatttgtaaaattgatcaagaacttgatttataattatgcctcaaaaaaaaagttctcatttagtagtggagcaatctagaaaacataccttttttgtttgtttggaagatcctctttccctggctgtattgtagtgtttgctatttgatgtggaaataactaataacttaagattttggaacagaacaccctttagatttccaaaacacaattcttatttcagggaagacagaccaaaaatatctcctgagatcattggtttctttataaattgtggt

SEQ ID NO: 24179 - DNA, 3430 bp, Homo sapiens; identical to SEQ ID NO: 21135
  misc_feature 2331: n = A,T,C or G

SEQ ID NO: 24180 - DNA, 1282 bp, Homo sapiens
  misc_feature 1282: n = A,T,C or G
acaccgactacggcggactaatcttcaactcctacatacttcccccattattcctagaaccaggcgacctgcgactccttgacgttgacaatcgagtagtacgcgggggtcggtccgggcagaaggagaaggtcgggatgtagaagctaggggtggccggcagctcgctcatcggtgttcgtgggcttagtcggtccgtgcctcgtctctccctggaaagggagggaggcttcgacgtcgagagggagccgctgccgcgttagttccgagcttgaagtcactaggacttctctcaaacttgtgtgctgaggagactcagatgttggcctcagctcctaggctgaactcagcagatcggcccatgaaaacttctgtattgagacaaaggaagggatctgtcagaaagcaacacttgttatcttgggcttggcagcaaggaagaggacaggtagtggagatcctgcaatctgaaaagcagactgaaaggtgacaaagaagctgaagatgggtggtggagagaggtataacattccagcccctcaatctagaaatgttagtaagaaccaacaacagcttaacagacagaagaccaaggaacagaattcccagatgacgatcgttcataagaaaacaagaaagaggacatggttataactcatcagcagctgctggcaggccatgcaaaatggggggaagaacaaaaattttccaaataatcaaagttggaattctagcttatcaggtccaggttactttttaaaatctcaaggctaatccgaactatgctggttgccaaatttagtgagctggcatcaacaagtgttcttccaaacacacaagcacgggggtcccggtttcttaatccttcagattagcgcacatcggccttcaagttaaagctttattaaaggtacggggttacactacgaacacgtgtttagttagagtgtcacggaattattgcaaatgtgttgtaacacaaaatcggcggggcaacctctgggggggtcacaacatacagcgagtgcaacaaaacaaccaccttcggttgtggctcacggctcaccgaggcggagcgacgacactacgaggtgggctcgaagagcgagtccgccacgaacagtgtagggcacaacacagtacatggcagcgagcaagcagactctcctgtgcgcagaaacatctctgcgctggtgcgacggcgatccgactgcacactatgactctagcgacaccccttcgtccgatggactgctcccgactaccaccacggcacacgaan

SEQ ID NO: 24181 - DNA, 2771 bp, Homo sapiens
agtgagatgtatcccgcgtactatcattataccctttccctcaatgccatcttacattttagggataagttttaagccaaactataaggctacctggaatgctgagacaacacacaaattctgctgagtccccgtcacagactacttctgaaggtcaccggtgagggcctaaacaagagtccacttcttgttagtataataactttttatttgacatctacaagattttggcatcttgcagctttttaccaggtttatacaatctcgatttttcaatagtgcaacctgtggaagcaaaaaaaaaaaaaaagaaaaaaaagaaaaaaagaaaagaaagaaaaagaaagaaaagataaaaagaccaactgtcccctcacttgtttttataaacatctattataggcgaaacaaaacttacccatattatatagataagtgtctattcacatttgtacattaccatttttaacagcttgagataaactctacgtcttacaacacattaaacaatattcaagttactgagtaacaacaataacaacaataacaaaagaacacacagcagaagcctcaagtgtttcctcattgtctacaactcaggtatggtttcctttttatgagtgacaaagcaaattaagataatgaagtaaaaaacgattgtttgcaagatgaaagccaatttgtacttccttctaaaactacctttaagttgcaaatgtaaatttaagaggctcatagccatttctgcagcacacattaggaatactattaatacattaaaattaacttttaagagttttatcacagaaaaatgtatgtattcattaccttgaccagaaacccagggcagggagaaggggaaggaggggtctgcagggtttgaagcaatacccaggtataaacactataaaaatgcaataaccaatgctgtacatctaacaaatgtttctctctgttactcgactcctgtgttaatcttgtttcagcatgcttccaaagacatgcactgtcagaacaaaaattagaaaataacctgaatgcatgatatgcaacctttcatttcatgctttaataaacctattaagttggaaaaagaaaccaatatatattttctatatttatagactcaaaacacatgcatccggggatacctcccacagcaatggcatggatgtactgcgttaaccctgagcactgtataaacataaagtaaagccagtttgggaagttccaagcattttaaaccaactgtggtctgtagcctttaacacactcacaaacagactgacacacacgcacacacacatccccctctgctcacccgaagtaaaagcagatgggaattatcaggggagaagctaaaggaaagacatatgtaccaccatcagcactgctgattttcagttttgctatctattccaggtttgtccttactcccaaaaaaactaactagagagcacaactgaaaaaaatatataattctttggaaactgtccctgatttttatgcaaatgatatgcttcaacagcatttcagatccatccatgttgaaacctgtctgttcttcatgcgttgctcaagttggtgatgctctgagggtgatgctgttgccatagctgtttctgttggaccgcaagctgttgagactggtctgaagttgataggagatttacaagaggagacacacaatttgccggaatgatcaaacctacaatccgttgcccatcttccgttcttagccgcacgatctgcatcttcacgtttgtgccactgacagatgctagaacaccctcaacttttgtccagacactcagcactgaaccacataatacataatatgtacggcaacgaagacctatttcacaaactagccccaagcttgcttttttgcaattgccgcgccaataagcatgagtacaagtatctgcagatgaattatactgatctaaccagtgcatcagggcatcatctgagacgaccttcttatatttcttttttagatcagcataaatttctaatttgagctgcttcccagtatttggtcgataaactaagaaaagtttctttttaggattcacttctttaactaagatggcagttttcttgttgttccttatttgcaatgacaagtaaaagccatcgtctggtcctgtcagctcagcccaaatcttggtagcttcctcccatgacattcccctctctacactaattgtgtataattctacgtggccagaggttgaatatcctggagtcagaaactttttaacatcacttttccgcactttttcatctccagaaccaagatctaagattcccatatcatatcttccattttttttggcattttgaacaactgcagtaagtgtgtccgcaaaatactgaaataacgcattctgctgatgcacctccatgcctaaaattctatttaagaattttcctatgttgttataatctttatcgagagtaagaattcccgagcgatcttctacatttatcaggccaacgcctatcagtccttgtcgaacatctttaaaaaattctccaggatagtctggaggtggtgataccataggagaatccaagtttacaatggatttcatgacaatttctaaagcatttcttccatacttattatcaaagttgaacctgctcagatctctagattctgttgcccttctatcgccatgtgtaagtgcccccaaactctcaagtcttttagcaacaatagatgcaaatctttgttctcctgccagttcacatatcagaaagac

SEQ ID NO: 24182 - DNA, 2455 bp, Homo sapiens
  misc_feature 2455: n = A,T,C or G
attgagccaaaaatgaactgagcaaatgacatttccaaactctttttttgctcaaaaataaataatatgttcccctttgatattaaatgcagatgtgaattgtggattagctatttactgagccctaggaaaaacatatttaaagacaaggaaaccattcatttacatctcatatcattgctttttgcttttaaatatcgccttgaggtttgtctacactctgccaaaacaatccctgaacataagtttggtcagcctcataattcagtgagtcgagcaaccatttgttccaagtgataaattgtactaaatgacaaactgcccaatcagggcagagctccatggacccagcctccagcccttattttataagactaacccctcttctgaaaaactctgaaggcttaaaagctagcatttggatggaggatacttcctttttatccttcagctatgtatggcactttacataaaataagaggtaaaaaaggagagaaactgatgtgtataaagtaatgcctttcttcccaagcaaatcaaacctctccctatgtaaaagttgatagtgtaccaagagacacaataccactggtgggctggaactagctcgttctgatgcataaaagttgataattaaagtaccagaaattttgtaagctagttgttaaacattaccattattaaatatgaaattataaaacacagtggaatacattaaaaaccaatgtaataatcaaaacataccacttcccaattattttactaccttatactatttattagtactcttgagtctatttaggtctattacatctttacagtgaaaacaggatacaatattgtgctactgtgggtctcttcctgactgcagattcagtaacatggtgttcgtagcttgaaactgtccacagtgggagtatttacaccatagaaactggctggcaaatgctacaaactagcaattttaattcctggaaaggcaattgttgagcatttaccagcacacaatgaatgccatattcttttttttttattaggaaataaattattggaggcagtataaaattatttaaaaagtatcaaatgcaatcccttatcttcagatggctataattttggttatataaatgttttggtttttaccttctttaaagactcctattaggttaaaagtcatatttgatgactatattttattcataattaaattattaaatcaccttttctcctgataatgctttgccagagaattcttagcaattcaactgtagtctaagcaataactcagggctaaattcagggaactgttagcccaatcagatatcactaaaaatgtacttcaccatctattttggagtttataattttggcatttgctaaaagtaggaaaaacagtaacatattactgtgcccagattctaataaatatagctcaattgaaaccaaaactgttacattaaacaaattacactctggcactatgctaaatcaccacagatgttttaggtgtttgatttccaagcaggatggtatatcatttgtttggttcaatatatgaggcaccatttgtagtcttttaggaaataaattagcttttatcacagatttaggaaacttgtctaaaaaaactgtgatcatcagttacagagggaaggaaacatattgaacacaaggcatcatagtagctggaggccttaaaaattatgcacgaccaaaaagaatgatttggtgagagatgtgtagctgattgacaattttagtgtgaattcatattcatttaacccagcagcaatctacataagctatgctttttcccgcctgtatttatgtttcttagcttataaagtcccaatatattatatcttttgttgctttggcagttttaatttagagctctgcgttcacagagatgccacctatagcaaaaactatctttaagaattggaaaataaaatgaatgttttagataaaatattgcaagccattatgtgtagagttaatgtatggaaatttgcatttgtttttctgaatcatggtgtacattaatcactcattgaattctatttctaagcaaataagagaatcaaacatttctaaaaaggaacatatgtcttgtattataaccagggagacaggtaaaatagtaaggtactattaagcaaaaaaaaagctgtatgaaatgtagctatctaatgggattttaccgatggtgcttctagaaattgaatctttgaggattccgtggttatggtcccaggaaatgattcagggaagaactataaaagatgtggaggaacgattggcgaaatttttgaaaacgctgtgggaatgtggctttaaccaggaaaatacaaatgtgttcataccgggtaagagaagtacagtaccgagtgaaggggagtgataaggggagtgaataaaggaaaagatagagaagagaagtgataagagggcn

SEQ ID NO: 24183 - DNA, 1861 bp, Homo sapiens
ggagtcgacccacgcgtccggatggcggctgcgtcggggtcggttctgcagcgctgtatcgtgtcgccggcagggaggcatagcgcctctctgatcttcctgcatggctcaggtgattctggacaaggattaagaatgtggatcaagcaggttttaaatcaagatttaacattccaacacataaaaattatttatccaacagctcctcccagatcatatactcctatgaaaggaggaatctccaatgtatggtttgacagatttaaaataaccaatgactgcccagaacaccttgaatcaattgatgtcatgtgtcaagtgcttactgatttgattgatgaagaagtaaaaagtggcatcaagaagaacaggatattaataggaggattctctatgggaggatgcatggcaatgcatttagcatatagaaatcatcaagatgtggcaggagtatttgctctttctagttttctgaataaagcatctgctgtttaccaggctcttcagaagagtaatggtgtacttcctgaattatttcagtgtcatggtactgcagatgagttagttcttcattcttgggcagaagagacaaactcaatgttaaaatctctaggagtgaccacgaagtttcatagttttccaaatgtttaccatgagctaagcaaaactgagttagacatattgaagttatggattcttacaaagctgccaggagaaatggaaaaacaaaaatgaatgaatcaagagtgatttgttaatgtaagtgtaatgtctttgtgaaaagtgatttttactgccaaattataatgataattaaaatattaagaaataacactttcctgacttttttattattaaaatgcttatcactgtagacagtagctaatcttattaatgaaaaacaatagacaaacatctgtgcataatttttcagacacaattctgtaaatatttggaaaccttttaagtatttaaacttttaaatttttgaaataaagtattctaaactaatataaataaggacaatgaaaaaacatgaaaggacttagcataatgttattttatcttttctacaactttgtttaaattacctttccaaagatatttgtgtttatgtaattttccacggaataacattaatactctaggtttataaaccggtttcacattatttcatttgatcatcacaagagctttgtgaagtaagccgagaagttgttactggtatttaataatagcaatagaggagttaaagactttcccacagcttgcaggtcaagacaagaaattcaggtctcctaattctcagtggagctctatttctgttaacccaaattgctgctctgttttaggtctcaatttcatctgtaaaatgatactaatagtacttatcccattggatttttgttgagatttaaataaatagccaaaagccaatacataataaacactcaataaagattaaccataaggagagtcatgatctggttccaggaatacattgttagatgactgaaaaattgtattacttcaatgaaaatactataaataataacattttcatatattagttggttctcatgcatacataatctaattttatttgatcctcacaactgtttaagttttattaaatatacattatccctgtttgtataaatagaatcatacaatacctgcctgctttcattcaacaaaattatcatgagatttttccatgttgtgtacatcaatagttcatctattttattgctcagtaatattccattgtgtggatgtatcactatttgtttacacattcaccactgatatataagttgcttccagtgtgaggctgttttaaataaagctgctatgaata

SEQ ID NO: 24184 - DNA, 563 bp, Homo sapiens
  misc_feature 1, 563: n = A,T,C or G
nacccacgctacgcgtccgggaagtgcgatgcacggcggcgattttcccttctgtcagatcttgatgaacaaagcagtcataattcatctctagaaagatctatatcctggcatttggaatgctttttatttagaataggagcaaaaaatggaaaaagaaaaaggaaatgatgatggaataccagaccaagagaattccttggatttttctgaacactttaaccaacttgaattgttggaaacacatggacaccttattcctactggtactcaaagtctttgggtaggcaattctgatgaagatgaggagcaagatgacaaaaatgaagagtggtatcgattgcaagaaaaaaaaatggaaaaagacccaagcagattgcttctttgggctgctgaaaaaaatcgggtaaaaaaaaaaattacagagggaagtgtgacagtaggaaaagcactgggttcaagccagaagacctgcctttactgttatggccatcatacctatctcttgattgtgaggaccaaatgagacaatgttcatgaaagcacatattaagctgcaaagn

SEQ ID NO: 24185 - DNA, 2538 bp, Homo sapiens; identical to SEQ ID NO: 20316
  misc_feature 2538: n = A,T,C or G

SEQ ID NO: 24186 - DNA, 1214 bp, Homo sapiens; identical to SEQ ID NO: 20119

SEQ ID NO: 24187 - DNA, 525 bp, Homo sapiens
  misc_feature 524, 525: n = A,T,C or G
cattaaatcttgtgatgacacctcacatcaattgaaaggcttgggctctgaatctaaagcaatagattttggaggggcaacaggatgaaatacaacagggaacattgcacccgggttaactgattatcaacctgaagccagtactttattttcaaaacactcatatgttgcaaaaaacacatagaaaaataaagtttggtggggggtgctgactaaacttcaagtcacagacttttatgtgacagattggagcagggtttgttatgcatgtagagaacccaaactaatttattaaacaggatagaaacaggctgtctgggtgaaatggttctgagaaccatccaattcacctgtcagatgctgatagactagctcttcagatgtttttctaccagttcagagatgggttaatgactagttccaatggggaaaaagcaagatggattcacaaaccaagtaattttaaacaaagacacttttttttttgcaacacaatatacatcacagtgaaatgtgtaatcctnn

SEQ ID NO: 24188 - DNA, 1290 bp, Homo sapiens; identical to SEQ ID NO: 20742
  misc_feature 1, 2, 1281, 1282, 1283, 1284, 1285, 1286, 1287, 1288, 1289,1290: n = A,T,C or G

SEQ ID NO: 24189 - DNA, 485 bp, Homo sapiens
  misc_feature 392: n = A,T,C or G
actggaaatttgaggttgctctaggtgacctgcaccatatacacacagagccccaaggactgccagcgttgatgtgtggagcagtgacagcatgtctgcaggcactgtgctttctgccagggcagccacctgttagcacttccagtctgtgtgaagacagtcctgcaaggtctgcagcctgagatcagaccacatagtttagacggccacctcagaccacaaggcggccaccccagcaagttgtcaggctggtgttgttggttgctggggctgtgacatgcagcattgtcttctgagagcttgtcttcaaccagctggagagatgttggtccgtcaagccgcttagctctgccagctacccacacagcctgcagcaccgggtcccttctggntcaccttcatgaggctgggccctccatcccagtttgtttgcttctgttgaagattcaggttcctgtcccctccctcagctacctgaataatgt

SEQ ID NO: 24190 - DNA, 1120 bp, Homo sapiens; identical to SEQ ID NO: 22234
  misc_feature 1, 1119, 1120: n = A,T,C or G

SEQ ID NO: 24191 - DNA, 853 bp, Homo sapiens; identical to SEQ ID NO: 22576
  misc_feature 1, 850, 851, 852, 853: n = A,T,C or G

SEQ ID NO: 24192 - DNA, 612 bp, Homo sapiens
  misc_feature 1, 2, 3, 4, 5, 6, 7, 8, 9, 10, 11, 12, 13, 14, 15, 16, 17: n = A,T,C or G
nnnnnnnnnnnnnnnnncaaccgagagaatgttttctgaaagaaaaatactataaattgtttaccaaatataaggcttcactattgttagcacacataaaaacaatacaatgggctcacatttcatatagtatcacttaccaatcccactgtcatctaaccgcatgtagccttccgccagcgagctgaaaccagttaatcctcccatggctgcataaggaatgtcctgtcccactggtttttcctgagccaatctttcttgcttagtttccactactgtgtcatgggcatatgcaggctgaccacaagcacaagtgaagcagctatggaatcctgaacacttggaacatgtattgcatgtaaagccaggcgcagcaccgtgctgatcagcaaagtgtttgcacctgcagcgaaatgggctgagctaccattcaaggggacataaaggtaagcccggcactggcagccagtcacttggcagggcagatcaatggggcgctgctgaggaatcgcttccaagtcagttttatgttgtttatacctccggtactccaggtactcgtccaccgccgccgcgccgccgagaggcaacgtcaaccgctccggacgcgtg

SEQ ID NO: 24193 - DNA, 3164 bp, Homo sapiens
  misc_feature 3123, 3150, 3163, 3164: n = A,T,C or G
gaaatacattacgatcattaataacaggctctaatgagaggaatttaataaataatcattaaaaatacaggataattttattatgttctcaatatgttgctgcacttcttaccacaaaacataataaaattatatgactataatatagatttcaagagctaaaaaagccttatatttccaagtaaaagaacaacataaattttgcaaaatatgacgagcattactgcagtataaagtaaatatctggaattaaaatataccatcatttagatatagactaaaaaaaaagaatataaatgttaatgattcctttctgcctgcagtgagcttaaaattacaaccaaaaattttaataaatatgtagcacctacaagacattttattaatagcttacataatgtggaaatttgagcaatttattttagaatttttgaatctaaaaatcaccagcttgacattcatttgagaaagtgaaacataaagcggaattccgacgaccacaaccaccacctcgcgctggacccctgcctcagtgacgagaactatgactttagctccgccgagtcgggctcctcgctgcgctactacagcgagggtgagagcggcggcggcggcggcagctccttgtcgctgcatccgccgcagcagcctccgctggtcccgacgaactcggggggcggcggcgcgacaggagggtcccccggggaaaggaaacgtacccggcttggcggcccggcggcccggcaccgctatgaggtagtgacggagctgggcccggaggaggtacgctggttctacaaggaggacaagaagacctggaagcccttcatcggctacgactcgctccgcatcgagctcgccttccggaccctgctgcagaccacgggtgcccggccccagggcggggaccgggacggcgaccatgtgtgctcccccacgggcccagcctccagttccggagaagatgacgatgaggaccgcgcctgcggcttctgccagagtacgacggggcacgagccggagatggtggagcttgtgaacatcgagcctgtgtgcgtgcggggcggcctctacgaggtggatgtgacccaaggagagtgctacccggtgtactggaaccaggctgataaaataccagtaatgcgtggacagtggtttattgacggcacttggcagcctctagaagaggaagaaagtaatttaattgagcaagaacatctcaattgttttaggggccagcagatgcaggaaaatttcgatattgaagtgtcaaaatccatagatggaaaagatgctgttcatagtttcaagttgagtcgaaaccatgtggactggcacagtgtggatgaagtatatctttatagtgatgcaacaacatctaaaattgcaagaacagttacccaaaaactgggattttctaaagcatcaagtagtggtaccagacttcatagaggttatgtagaagaagccacattagaagacaagccatcacagactacccatattgtatttgttgtgcatggcattgggcagaaaatggaccaaggaagaattatcaaaaatacagctatgatgagagaagctgcaagaaaaatagaagaaaggcatttttccaaccatgcaacacatgttgaatttctgcctgttgagtggcggtcaaaacttactcttgatggagacactgttgattccattactcctgacaaagtacgaggtttaagggatatgctgaacagcagtgcaatggacataatgtattatactagtccactttatagagatgaactagttaaaggccttcagcaagagctgaatcgattgtattcccttttctgttctcggaatccagactttgaagaaaaagggggtaaagtctcaatagtatcacattccttgggatgtgtaattacttatgacataatgactggctggaatccagttcggctgtatgaacagttgctgcaaaaggaagaagagttgcctgatgaacgatggatgagctatgaagaacgacatcttcttgatgaactctatataacaaaacgacggctgaaggaaatagaagaacggcttcacggattgaaagcatcatctatgacacaaacacctgccttaaaatttaaggttgagaatttcttctgtatgggatccccattagcagttttcttggcgttgcgtggcatccgcccaggaaatactggaagtcaagaccatattttgcctagagagatttgtaaccggttactaaatatttttcatcctacagatccagtggcttatagattagaaccattaatactgaaacactacagcaacatttcacctgtccagatccactggtacaatacttcaaatcctttaccttatgaacatatgaagccaagctttctcaacccagctaaagaacctacctcagtttcagagaatgaaggcatttcaaccataccaagccctgtgacctcaccagttttgtcccgccgacactatggagaatctataacaaatataggcaaagcaagcatattaggggctgctagcattggaaagggacttggaggaatgttgttctcaagatttggacgttcatctacaacacagtcatctgaaacatcaaaagactcaatggaagatgagaagaagccagttgcctcaccttctgctaccaccgtagggacacagacccttccacatagcagttctggcttcctcgattctgcattggagttggatcacaggattgattttgaactcagagaaggccttgtggagagccgctattggtcagctgtcacgtcgcatactgcctattggtcatccttggatgttgccctttttcttttaaccttcatgtataaacatgagcacgatgatgatgcaaaacccaatttagatccaatctgaactcttgaaggacatgaatggcctaaaactgattttttttttttccgttaaaatgtgtgtgtcaagatacggagatttcagggttaaagtatatttcagttttctttagggcaacatatatttgaatttaaaagcactttatttaaaaaaaaaaaaaaaaatccgactaaaaaaaaaaaaaaaaggaaggccgctagactagtctagagaaaaaacctcccncacctcccccaaaacctgaaacatagnaatgaataaagann

SEQ ID NO: 24194 - DNA, 4345 bp, Homo sapiens; identical to SEQ ID NO: 21910
  misc_feature 1, 2, 3, 4, 5, 6, 7, 8, 9, 10, 11, 12, 13, 14, 15, 16, 17,18, 19, 20, 21, 22, 23, 24, 25, 26, 27, 28, 29, 30: n = A,T,C or G

SEQ ID NO: 24195 - DNA, 1659 bp, Homo sapiens
  misc_feature 1, 2, 1659: n = A,T,C or G
nngattactttatttaaataccacattagaaactttaaatatttcataaataaatctcttttttttgggggaaactgtacagaatttattatgaaatagcttaatggcaagtggtaatttagaagaattaagttatcagataggagatatattaaaatatttaaaaattggatatattcttgaagcccttttacacaagtaatttctataatttgattgtaatgaaagtataatataccttgttactattatcagattaatttttgaaagtagaattccttaatcaagccaaggttatgctgctttataagaaattaatcaggtagtttaacactagagctcattagccaacctgtatgtagcacaaaataatcatctctgataaatacctataaatatattttattcatacttttaaatattttacaattcaaataaaaaccttatatgtagacaatctgggctaaatttccatgtatgttttgaaaaataatgttagcatgaatagattcatatttaaatatgattttaaatactcttaatagaggagacataagaaatatttacataaaagctaagtagcatgatacagctcatggttattttcctcataggaaaacaattacttgatttttttttttgcataggattaagactgagtatcttttctacattcttttaactttctaaggggcacttctcaaaacacagaccaggtagcaaatctccactgctctaaggttctcaccaccactttctcacacctagcaatagtagaattcagtcctacttctgaggccagaagaatggttcagaaaaataatgattataaaaaataacaattaagaaaaataatcacatagaggtaaaataaagcaactaaacatcatagttttgcatttttagaaaagcatttaaacatttagaattatagtaaatatattacatttattctaaaacttcaaaattattctgtttttgtagtactgaaaagaagatagtgccatttgaaacaacagatgcatcttttatacattttcacaagtttgtttttcatatttttaaaggccccatttatctgtaacagtggtatttttatttagagtatcggctacttaatatatacatgcaacaatatatgctttaatagtcatttaacttttaggaatatttcatcacattaagtggttaagcatagtgttaaaagagtggaatttaaggaataagaaaatattgaaaatacgctgttattttcatttgttcactataatagaatgtttttgcccataaaagttatcattgcccaactgaattcctaccaagaactaacaagtgattctcaagtggggagaaatattattaaaataaagaaaatagagggctcagttagaaagtacaagataataggccgggcgcggtagctcacacctgtaatcccagcactttggaggccaaggcgggcggatcacgaggtcaggagatcgagaccatcctggctaacacggtgaaactccgtctctactaaaaatacaaaaagaaatcagccgggcatggtggcgggcacctgtagtcccagctactcgagtggctgtggcaggagaatggcgtgaacccggaagagagagagagagagagagcctgcagcccgggggatccacn

SEQ ID NO: 24196 - DNA, 508 bp, Homo sapiens; identical to SEQ ID NO: 21293
  misc_feature 502, 503, 504, 505, 506, 507, 508: n = A,T,C or G

SEQ ID NO: 24197 - DNA, 886 bp, Homo sapiens; identical to SEQ ID NO: 23046
  misc_feature 1, 2, 885, 886: n = A,T,C or G

SEQ ID NO: 24198 - DNA, 369 bp, Homo sapiens
tagacacagcattcaagtttaatgcattttaggaacaggtttcagtttacatatttaacgcacattaaaaaaacacaaagccaaaagaaatttctaatttagaaacatatacatcaaatacatagcattgattactattttaaaataactatagagaaatacaattgttggttctggttgtaccgtcacgtcctatttcttcctggcaatctgatttggaattcgtgaatcattttctcaataaaaaaacagaagttataaatggtagttcatttccaccattaaactgtttcctttcaagttgcatcaatgactttgaagcacaaaccacctgaagtgtgtgtagagtcacacagagtgttcccgcgt

SEQ ID NO: 24199 - DNA, 1452 bp, Homo sapiens; identical to SEQ ID NO: 24160
  misc_feature 1448, 1449, 1450, 1451, 1452: n = A,T,C or G

SEQ ID NO: 24200 - DNA, 337 bp, Homo sapiens
  misc_feature 337: n = A,T,C or G
ccctttcgagcggccgcccgggcaggtacatgcaggtcacaggggatatgatggcttagctttggctcagagacctgacaggggcaatctacctagctctgtttgtaaaatggggatcctaatataacctcttgggataggttgtaagcagtggtggtctggtaaatgttaacaatctagtgtgcagtgtggggagaggaaagtccggatttgtaatatttgctgatttctgtggtgtaaatactcccatcactggcaattttaaactccaatgtaacgtcactgagcacagatttgggaaaaggtgcatggcagtacctgcccgggcggccgctcn

SEQ ID NO: 24201 - DNA, 1214 bp, Homo sapiens; identical to SEQ ID NO: 20119

SEQ ID NO: 24202 - DNA, 1372 bp, Homo sapiens
  misc_feature 1, 2, 1368, 1369, 1370, 1371, 1372: n = A,T,C or G
nnctgcgtccatcagcggatctatacattgacctcttgttgttatcaaaacagcagtctgatgggaggaagactgcatcttcgtcccatcaggatgttgtttataaatgaatgcctcagttctctgctacccttttcacagctttgtactgtttgccttatattctatttgtgcttttaaagtgtgtctgttgggaaaacaaaatgtgtaggtggtttgtaagtgaataatttttatttcttcttgtattaaaattttgtttttttctctactttgggagatgtttatttacattgtcagactattcacaaaacagattctaaaatttgtttgctcgtatgctgttcccttcaatgtgatatcagagattactatgaatgttagtttcattccgtgaaacattacttccatataaagacagatctcttaataagtgaatctagtggaagaacataggtatcattctaattccatggtaaattttgtcatgattctatatgaataatggggtccttcaggaagttggaatttttgccttctcttttaattgcagtgaagttctctttataacttctaaaattcggaattctagatccttgcttttgcagaatttggtgctcagacaatatttaaggacatttcagcgagacaaagtgcatgtttttatcgagtaccctgtgcaccacattatatctggcaattctttttgtttcattatgtgcatcaatatttttctcagctactattacctgaaacttgtttaacatgtattagacctagaattttcattttctttctcacatagttgcttcctggtatctgatttagaaataacatttaaatgccaagtatctgggggattgaaggaagggtctatatgagcaggtgaattagcagtactgtttttgtttagtggatattgttagtgactttttgtgtgtgttttgctttgggacctttttattttggtgttgcaaaaagtaacatattttcatcattgcttcatacgacatggagttaggacagggaaaaatcattcaacactccttatgcattaaatgatcaaataaaccagtgtaggatattaagactatcaattggtgggattaggcttgacattttatttttataaatatatattttttctgaatgtgtctgagtccaagagtgggcaaaaaataattttctactttggactaatctatagaggtttttgaaagtctgcattactaacttgttgaattcatgatattctgcctatggcacaaattgtaaacctttgtttttctaaaataaagtaattgaaaacctgccaaaaaaaaaaaaaaaaaaattttcggccgccaagctaattccctttagtagggnnnnn

SEQ ID NO: 24203 - DNA, 1782 bp, Homo sapiens; identical to SEQ ID NO: 21380
  misc_feature 1766, 1767, 1768, 1769, 1770, 1771, 1772, 1773, 1774, 1775,1776, 1777, 1778, 1779, 1780, 1781, 1782: n = A,T,C or G

SEQ ID NO: 24204 - DNA, 2538 bp, Homo sapiens; identical to SEQ ID NO: 20316
  misc_feature 2538: n = A,T,C or G

SEQ ID NO: 24205 - DNA, 920 bp, Homo sapiens
  misc_feature 1, 2, 3, 4, 5, 920: n = A,T,C or G
nnnnnacccgggcggtacagattcctcttagtcaagtcctgattaaaactccagctaagacattagtaagccttggttagtgaagtggcatcaggaagtgcctacattttcatggcctggtagcgttcagtgaaaatgttcattaacagacacaggccattcagtcccgaatcccaagacactgaagactctgtttgaatcagactcacgggttccttcctagccactctcagggacaggaatgcttctggtgaagaagttttcggtggtggttcatggagcttccctacaccaacttggaaatggcattcattttattggcttttgttatcttttccttatttaccctggcttccatctacactactccggatgacagtaatgaagaggaagaacatgaaaaaaagggaagggaaaagaaaaggaaaaagtctgaaaagaagaaaaattgctcagaggaagagcacagaattgaagctgttgagctatgatctcatagccaccgatatttctcgctaagaagacagaggaagcaatccatgggaactacttatccacagttaaacaagaggaggggataatgaagaaagttaaaatcacttactgattaaacacgatgataataacctttaatgaactcaatactcgggaaaggcttcacatttctgggactcagcattatccaaaatatctattaagagccatacaccattctagctgcaattgattatacaaaaaaaaaagaccaaagtggttacaataataaaatagaacacagagaaagaagaaaactacatgtgttacaatttggtaagataaacaaacaaacaacatgaatttaatcactttttttggtcctgtgacacacatgataatttttgtcttcattctcctaacaaatgataatgaaaagctataan

SEQ ID NO: 24206 - DNA, 3769 bp, Homo sapiens
  misc_feature 1, 2, 13, 3769: n = A,T,C or G
nncgcagcacggnatgaggcttcgaggccggctaggggaggccgtcgctcatatccgacgtcaccagttcgcgccggcggtagacgaggacgccaacagcagcggagaaacgtttctctttcctctcagtttgcgcacaccatggcggcccctgcccagcagactactcagcctggcggcgggaagcgcaaaggcaaggctcagtatgtgctggccaagcgcgctcggcgctgcgacgctggcgggccccgtcagctagagcccgggctacagggcatcctcatcacctgcaatatgaacgagcgcaagtgcgtggaggaggcctacagcctcctcaacgaatacggcgacgacatgtatgggccagaaaagtttacagacaaggatcagcagccctctggaagtgagggagaggatgatgatgcggaggctgccttgaagaaagaagttggtgacattaaggcatctacagagatgaggttaagaagattccagtcagtggaaagtggagcaaataacgttgtcttcatcaggacacttgggatagagcctgagaaattggtgcatcatattctccaggatatgtacaaaaccaagaaaaagaagactcgagttattttgcgaatgttacccatctcaggcacatgcaaggcttttttagaagatatgaaaaaatatgcagaaacatttttggaaccctggtttaaagctccaaacaaagggacatttcagattgtgtacaaatctcgaaataacagtcatgtgaatagagaagaagttatcagagaattggcaggaatagtgtgcaccctcaattcagaaaataaagtggatctcaccaatccacagtacacagtggtagtagaaatcatcaaagctgtctgttgcctgagtgttgtgaaagattacatgttgtttagaaaatacaatctccaggaggtggtgaagagccctaaggatccgtcacagcttaactcaaagcagggaaatgggaaagaagctaaactggaatctgcggacaaatcagaccaaaacaacacagcagaaggaaaaaataaccagcaggtaccagagaatactgaggagctggggcagacaaaaccaacgtctaatccacaggtggtaaatgagggaggagccaaacctgaacttgcaagtcaagccacagaaggatccaagtcaaatgaaaatgacttctcataggaagtcatttggtgttggaggtgggtttctcacctggggctctacgagatgttgctggggctccaccttaaattgtgactaaaaacagttttttatttgtgtgctgcattatgctgttctcacagtagtgagcaatgattgcgcagccctgttaacagtttttttagggatctttcagcctttatggtattacgtagaggcagacccatgtgctgctgttgcaaagaggggaggataggagggggatgttggcctctcccaggctcctcttctgcagtgccagctgacttaagggagtgaactacctgtgaagtagaaaatcagagggaagttttcattctaaggaaggagtttttacatgccacagctcagctgtctgcctgccactttgttgtaaacattgcaaaaatgtggatcatgtaggttagaagtgaattgtttagtgaagtttttgtacttttgtgattttcttgtttatgtctgtttttttttttttttttaacatttgtgtgtaatatagctgacagtccagtgtcgcaattttggaaggcaagatgtgagagagacgagaaccattttaggcatagaactacagacatttctgaaaaggttggtgatgaagaacttcagtcttctgagtatacttcagtatactagtgcaacaagggacacaaagaaattctgtcttaataaagaaagctacttctcaagggtattatgtggactcagtccaagctctcctgtcccattgtgcattgtctgtgacatgcaacttacaaaactagcaattgtaacaataaatcacagccacttgacaagaaaggatattcattattttcaaatggcttttggactatcaaaaacagtaaggcttttgttcagaaatcacctttagtcaaaaggtttaagaagcaaattatttagtagcagaacttatctcaggaaaggaaaatatgcatggttggtgagaatctaataacattaaaatgctggggcaagatgcagtacaaagttgaagagactttattctcaataagttgatttactgatgatatgtcatatgatgcaaaaaaggttttgtgtcattaactgaaaagtagcagcttctctatccaggatgatgagtcaacaggtttcactaatatttgtcatgctgtagcatttgtaagatttgtaaatgatgaaattcaaagaaaactttttctattgctaggagcctgccagaacaaaggccaatatataatgttgtgacatcatatctgataaccagaggtctggtatctacactcctggtgccccatcagtggttgtctccataagtcattttgcgttattaaaaaaaaaaaaagaaatcctgatgttgacattatagcacactgctttctccacagagatgctgatatcaaaaacttgaagatacagtgaagttctgaataatgttacaaaactggttacctgtatcaaagacccatttatgcaaaaatgttaaaaaaaaaaaaaacacccaaaacaaaaacctggacagacagcacataaacctcctgcaccatacagacatccagtggcttctcagaggaagcgttctctacaggatatttgaattgaaaggtgaattgccagagtacttacaataaaacagccagcttttgctgagtgctttggaaatgaaaaatgactacagaaagtagcctattttgcagacgtttttcatcacatgaacaaatggacaagtctctgaaaggttctggggaaaaaaatttttcttaaagcgacaagactcttagatctaaaaggaaactgacttgccaccttgccagaggaattcttgaaatgtttctgcagccacttggccttgaaaataaagggtgcaactctcaagtcttgttctaacccggctggaggaaccacaagacccaatgaaatagcattttctctccttttcccagcactagtatataacctatgaggaacccttgtctctgaatctgctcagcttgaaattttgtctctgaaggaagagaatgaactcagccctagtctgacagtcctagatttctgtgaaataagagtattcttcaacttagtgctcacactcacataccatgagggttctctgcaggggtttaggggtttcctgaatttgaaagttttttcaaggcctctttttgggtaaaacaattgaaaaggcagacaccaacaaagtctgcaaaattaactgtccagattaagaatattaaggagctgtaaaattagcttgtagaaatggacttatccttaagttttaaaaagttaggaaatcctaaaaatgttaggcttcctgcacaagtggctatgttcatttatggctcgtgacctggaatggttttccttcctctagctggtgcgttggtggtaaccgactctatggttggcgggcgcagataggggggccctcttagttctattgaaggggctccgcgagggctgcgggaaggacatccgggggggggggttccgccccattttggcgcgacaggcccacgctttgcgctcttgtttttccgcccactctctctgagattctccn

SEQ ID NO: 24207 - DNA, 1233 bp, Homo sapiens
  misc_feature 1, 2, 3, 4, 5, 6, 7: n = A,T,C or G
nnnnnnnccttgtgataaaaaaaaacacaattccccctgactgggggccgtgccggggtacagtgaatagacatttggcatagtagatcttaatacttgccacaaagctactgagataatatgataatgatacaagaataatgaaatagacaaataaaacagaaattctccagaaaatgtgtcaaatatgtgtagctattaaaaacatgctggagcatttttaaattgtaaggaaatggtggattatttggaaacaggcattaggcaaataattacctgagaaaataaaaatatcactctacctcatcccagataacacagggtccaaatagattaaaattaaaatgacaaagctacacatggccagaaggaacatgtagaagaataattgcatccattgagtaaagaggcatgggatggaaatggagtaggagaaacttaaaacacattaatttttaagaagtaagaatgtggaaaattttctattttaatagtattttcaaataaatgtttttgaaagaagaatagacaatgaggacttgctaaaagatttagggaggaaagtcacatgatcacatttgcacttgaggaagataaatgtgtgcaagcagaaaggaaggggcactccccaggacagcaatttgggtgaagcagatggttttataggtggtcaccataagccaataagaggcaacaaggacctgcgttgttgcagtgatggtggagatggacagagtggctgcagcaataaacattaacaagtttactcgagtttttaaaatattcttatgaaataaattattatctcaggaagttgggcatgcccttaacataggcaaaataaacttctaagttgattgaggcctgtgtcagatactttttggtttattactgtctctagagtagagctaccaacagtgcgtgccgacactgtggaggacttgcatgtgccaggtgtcattaactcatctaatccacataactccaggaaacggggcattataacttcattttacatgaggagattatggcacatagagttcctggaactcacctgaggtcacacagatacgaaacaccatacccaggattcctgggatcagagagcatgtgctgaacctctccatcacgctgcctctctgcttttagggcagctctcatgggggtatcgtgaggatcaggaaacacagtgtctgtgaaacactctagagctgagctcacacggtacctcgg

SEQ ID NO: 24208 - DNA, 512 bp, Homo sapiens
tacagacccagtgccttccttcctcttctaacagcattggctgctcccctttccagttccatgaagccaccatctacaactctgtcaacagctcaagctggaaaagaatcaccatccagctgcctgaccatgtctcctctaggtaggttgcaaattaaggtaagctttgtgaaattatctggcctctctacagagttcatgcagtgagctgaaaacaactgacagtgtgaggcagagctttacatgcagccctggtgccctctcccatcttccctccttttctccctcctctcaccaacccatgcccccaaatggcaactgcatgttccaggaggaaattggagtgtgtctgtaaatgattcagagatctcagatttcctttgacttaataccatagcatgtacgcgggatggcacatgcagcgcaagtaggtctacaagacgctacttcccctatcatagaagagcttatcacctttcatgatcacgccctcataatcattttccttatct

SEQ ID NO: 24209 - DNA, 4040 bp, Homo sapiens; identical to SEQ ID NO: 22258
  misc_feature 4012, 4013, 4014, 4015, 4016, 4017, 4018, 4019, 4020, 4021,4022, 4023, 4024, 4025, 4026, 4027, 4028, 4029, 4030, 4031,4032, 4033, 4034, 4035, 4036, 4037, 4038, 4039, 4040: n = A,T,C or G

SEQ ID NO: 24210 - DNA, 3540 bp, Homo sapiens; identical to SEQ ID NO: 22956

SEQ ID NO: 24211 - DNA, 2072 bp, Homo sapiens
gggagtcgacccacgcgtccggccgccgccgccgcccagagactgctgagcccgtccgtccgccgccaccacccactccggacacagaacatccagtcatggataaaaatgagctggttcagaaggccaaactggccgagcaggctgagcgatatgatgacatggcagcctgcatgaagtctgtaactgagcaaggagctgaattatccaatgaggagaggaatcttctctcagttgcttataaaaatgttgtaggagcccgtaggtcatcttggagggtcgtctcaagtattgaacaaaagacggaaggtgctgagaaaaaacagcagatggctcgagaatacagagagaaaattgagacggagctaagagatatctgcaatgatgtactgtctcttttggaaaagttcttgatccccaatgcttcacaagcataccaagaagcttttgaaatcagcaaaaaggaaatgcaaccaacacatcctatcagactgggtctggcccttaacttctctgtgttctattatgagattctgaactccccagagaaagcctgctctcttgcaaagacagcttttgatgaagccattgctgaacttgatacattaagtgaagagtcatacaaagacagcacgctaataatgcaattactgagagacaacttgacattgtggacatcggatacccaaggagacgaagctgaagcaggagaaggaggggaaaattaaccggccttccaacttttgtctgcctcattctaaaatttacacagtagaccatttgtcatccatgctgtcccacaaatagttttttgtttacgatttatgacaggtttatgttacttctatttgaatttctatatttcccatgtggtttttatgtttaatattaggggagtagagccagttaacatttagggagttatctgttttcatcttgaggtggccaatatggggatgtggaatttttatacaagttataagtgtttggcatagtacttttggtacattgtggcttcaaaagggccagtgtaaaactgcttccatgtctaagcaaagaaaactgcctacatactggtttgtcctggcggggaataaaagggatcattggttccagtcacaggtgtagtaattgtgggtactttgaggtttggagcacttacaaggctgtggtagaatcatacccccatgataccaacatattaaaccatgtatatctgtggaatactcaatgtgtacacctttgactacagctgcagaagtgttcctttagacaaagtgtgacccattttactctggataagggcagaaacggttcacatccattatttgtaaagttacctggctgtagcttcattattttgctacactcattttattgtatcaaatgttttaggcaacctaagaacaactgtaaaagtaaagatgcaggaaaaatgaatggtgggtattcattacttcatgtatatcaagcacagaagtaaacaaaaacccatgtatttaacttttttttaggatttggcttggtgattttttttttgggggaaaatggcctaacttgcttggtgtggtaaaattagtcacagggcaaatacctggagattgagggcaagcttggtaaatggtcttatggaaattttcatggaacattccaggcatattgggtaggaacaggtgtttaacatccatgtagggggaataaaaagttttatagaaggggctttgcaccaactttctcaaggatttcaggtaaataagctgggtctggaaacttttttaaggaaattggacatcttggaaaattaattcctaattccccttgtgggaggcaaagtgcgctcttaccaaggtttacaccacaaagttttttcatacgcgacaattgtcatatttaaacagctgtaccatggtcaaataatccccttttttttcccaccttgagaaaaagagcgtccaatttcctggagagggggggtgctccacacactgctgttggccctcaaaattggcttgggtttacttagaggcaatttgtcacctagattgggacaaacgggtgtcacacttggtgaa

SEQ ID NO: 24212 - DNA, 1715 bp, Homo sapiens; identical to SEQ ID NO: 23747

SEQ ID NO: 24213 - DNA, 547 bp, Homo sapiens
  misc_feature 535, 536, 537, 538, 539, 540, 541, 542, 543, 544, 545, 546,547: n = A,T,C or G
acttgagaaaaatggatatttttgtagtaactggttgcagaactctatgtatgcccattaggtttggcgtattaatttttattgttttgttcagttctatatttctgctgattgtctctttgatcaataattgagatgttgaaatctctcaatttaccaaattttcttgtagttctagcactttttacttcatatatagtgactattttcttgttttaaatgtttatattttcttattgaacctttatcattatgtagtgatgcctccatttcaaatgcttcttctctttttgtatcatactaacagagccacaccaacttcctttttgttgacctaatatgctattttttacacttttactttcctactcttaacccctaggctagcctgcttctctacacttttactttcaaacatttcatgtcattctgctttgctgtagcttttggaagcaccatataacagattgtttaaaatccaatctgataatcttggtcttttaatgagaaaatttagttaatttacatttgttannnnnnnnnnnnn

SEQ ID NO: 24214 - DNA, 2305 bp, Homo sapiens
  misc_feature 1, 2305: n = A,T,C or G
nactctttccccttattggcccctttttttttggaggttaaaaaccaggctcactcccgatctcagaatccttgttggtaagggcaaataacgttttaagagtaatgccgaacatttgtagatgcgtttaagtcacacgagccataatatatggcgtacttgtacagtaaccgactttctgaaagacaccaggtcccataatgctagttatactttatcacagcaccagagttccatttaatttatggtccctctcgggacaccactggtcggtttaataaaaccataataatccattgcacagatccgaagacctcaggaccagatcacaagggaaaccgattagcagcagaatttgttcatgtttggtggcagactggtggccaactggagggaggggagttttactgtgggtttttgaagaggtctcgtcacaagaccagagatgcctcttgaagagatttttaggttgtaggtttgcttactctaaagaacatcttgcccagaagtctgatttgagatgaaatgaagagaaacagtctgcttttgaaccaagtaaggtattcttgggaataatttttagagccatgagaaatctattcttacaggggtgcttttcaggcaaatgcagaaaatttaaaagagtctagaacaaaaaagtgacaatgtcacaaccttgctggaatctcaggaaaaagaattaaagatggcagctgctgtgaaaagctgtgtgactcctggcggagactgcagggacaaggtcatctttcacaaaaaatggaaaggtggcctagatgaggaggacacagactctccagaagttatgcaaacaaaatcaggcaagatgaagaattttaaggcacacctccattggcccacagagagtgttcttcatatgacaatgatgttaaacaccatctgtcacgtaccaggccatgtcctaagtattttaaatatgttaacacatctacaaagaggaaactattagaatctgtaggacctcttaagcccaaagggtctactgcaggcaggatgggcgttacagaaaaaaataaaaactctcattccaaattgctcctaagatggacaaattggttacttctccagaaggtctaatcaaggttaacaaaataggtaagttcgtggagttagaatgcatcttccctggagttcagaggtatttgggatgaccaaaggagtctgctggacagtatgtgtgttttacaaaatggcccccacagtgattaaagaccagagacttatatctctgcatttgtcaagctggaacagtctttagtgaacacagcttacctcttttaaaactgctggtttctactgaaggaaacatggatgacatttagtgttctgtgactggtctggcaccctacttttgttgacaaagatgggaaggggtctaaaagtcatgtcacttataaaagaacttgggaggaacttttttcaaaagatccaaagattttggaaggagagattagagcagaactaagaccacttagaagataggtagatttcagctcaatataaggaatttttttttaatatcagtgcagttccaaatggaataagctgtttgaacatggcttagcagaagctgaatgacaacctgttagaaattctagggaattctgcactgagtacaacattggattatttctttgggctgtttccaactcaagattctgttatttcattataagcattttgaggaaggcagttggtataaaggtgaccttagtaataaaagtcagtgtgaagtctaaagaaattccacaatgaatttaaagacaagaattttagggacaaggatacagaaatttgcctagtaacttgcacacagcagatggtaaatatttattgactcaatggagtaatgttaaaaataaggtttcccatggactgtgtgagggccaggcatacttaacatcctttgtgagagagaggatggaaacggagtctactgtgaaagccacaagttttggggaaatacactcctgcaaagaagctggaggttaacaaccaaggcaaaggggccagaccacagggagatcttccaggtccaagagcactgcagggcagatgagaagcagggatgattatgttgaaagtgcaagataaggccaggcgcggtgtctcatgcctgtaatcccagcactttgggaagcgggtggatcaattgagatcaggagttggaaaccagcccggccaacatggtgaaaccccatctccactacaaatacaaaaattagccaggaatggtggcgggcacctgcaatcccagctctcaggn

SEQ ID NO: 24215 - DNA, 3523 bp, Homo sapiens
  misc_feature 1, 2, 3, 4, 5, 3520, 3521, 3522, 3523: n = A,T,C or G
nnnnnccgcagcgaggggccggagatagcctagttgaaaggcccgggcgtctcggcggggagcgcgttccgcgctgtagggtaatcgcgccgggcggccggccggctggccgggcctcagcgggagccaccgggggctgcgggcggccgtgggacctgcggagacctcctcggggcgcagggaacacgctacagccttcgccgcggcgggcttgtggggagcggcgtcccagcctttcccgggaggctcagccaggtgcctggagcgggagagtcggactcagattcctgctttacctagaatagcaacgtgccctgttcccgttgtaccctcttaaatactatacttcttaaacggcctgtctcccgggaaatttggatatgtgcagtgcatctcctcgaagatgctgatggtggaaatttcttgaaaccgctctcgtaatttgccacgtgctgttgcaaatattctggtgaatgaacacagaatcagcatggctttcctttgctgagaaatcactgatgggaagtgagacttgttaaacttgaaagtgaatggacctgagtggaccctttgatcacatcagtaaacatgagcggtaccaaacctgatattttatgggcaccacaccatgttgatagatttgttgtgtgtgactcagaactaagtctttatcatgtggaatctactgtgaattcagaactcaaagctggatctttacgtttatctgaagactctgcagctacattactgtcaataaattcagatacaccctatatgaaatgtgttgcctggtatcttaattatgatcctgaatgtctgctggcagttggacaagcaaatggtcgagttgtacttacaagccttggtcaagatcataactcaaagttcaaagatttgataggaaaagagtttgttccaaaacatgcacgacaatgtaatacccttgcctggaatccactggatagtaactggctagctgctggtttagataagcacagagctgacttttcagtgctaatatgggatatctgcagcaaatatactcctgatatagttcccatggaaaaagtgaaactttcagcaggtgaaactgaaacaacattattagtaacaaaaccactttatgagttaggacagaatgatgcttgtctgtctctttgttggcttccacgagaccagaaacttctccttgctggtatgcatcgtaacctagctatatttgatcttcggaatacaagccaaaagatgttcgtaaatacaaaagctgttcagggtgtgacggtagacccatatttccacgatcgtgttgcttccttctatgaaggtcaggttgcaatatgggatcttagaaaatttgagaagccagttttgacattgactgagcaaccaaaacccttaacaaaagtagcatggtgtcccactaggactggtctacttgccactttaacaagggatagtaatattattagattgtatgatatgcagcatacacccactcccattggggatgaaactgaacccacaataattgaaagaagtgtgcaaccttgtgacaattacattgcttcctttgcgtggcatccaacaagtcaaaatcgaatgatagttgtaactcccaaccgaacaatgtcagacttcactgtttttgaaaggatatctcttgcctggagcccaattacatctttaatgtgggcttgtggtcgtcatttatatgaatgtacggaagaagaaaatgataattctttagaaaaagatatagcaacgaagatgcgtcttcgggctttatcaaggtatggacttgatacagagcaggtgtggaggaaccacattttagctggaaatgaagatccacagctcaagtcactctggtatactctgcactttatgaagcaatacacagaagatatggatcagaaatctccaggcaacaaaggatcattggtttatgcaggaattaaatcaattgtaaagtcatcgttgggaatggtggaaagcagcagacataattggagtgggttggataagcaaagtgatattcaaaatttaaatgaagagagaatcttagctttacagctttgtgggtggataaagaaaggaacggatgtagacgtggggccatttttgaactcccttgtacaagaaggggaatgggaaagagctgctgctgtggcattgttcaacttggatattcgccgagcaatccaaatcctgaatgaaggggcatcttctgaaaaaggagatctgaatctcaatgtggtagcaatggctttatcgggttatacggatgagaagaactccctttggagagaaatgtgtagcacactgcgattacagctaaataacccgtatttgtgtgtcatgtttgcatttctgacaagtgaaacaggatcttacgatggagttttgtatgaaaacaaagttgcagtacgtgacagagtggcatttgcttgtaaattccttagtgatactcagttaaatagatacatcgaaaagttgaccaatgaaatgaaagaggctggaaatttggaaggaattttgcttacaggccttactaaagatggagtggacttaatggagagttatgttgatagaactggagatgttcaaacagcaagttactgtatgttacagggttcacctttagatgttcttaaagatgaaagggttcagtactggattgagaattatagaaatttattagatgcctggaggttttggcataaacgagctgaatttgatattcacaggagtaagttggatcccagttccaagcctttagcacaagtttttgtgagttgcaatttctgtggcaagtcaatctcctacagctgttcagctgtgcctcatcagggcagaggttttagtcagtatggtgtgagtggctcaccaacgaaatctaaagtcacaagttgtcctggctgtcgaaaaccacttcctcgatgtgcgctttgtctcattaatatgggaacaccagtttctagctgtcctggaggaaccaaatcagatgaaaaagtggacttgagcaaggacaaaaaattagcccaatttaacaactggtttacatggtgtcataattgcaggcacggtggacatgctggacatatgcttagttggttcagggaccatgcagagtgccctgtgtctgcatgcacgtgtaaatgtatgcagttggatacaacggggaatctggtacctgcagagactgtccagccataaaatgttaccaccttaagagaacccttcaagtgtggagctttctagtaggtgtccttcatagctcagaaacatacctcagaacaagccattcatgacttacctgtaatgggaaaataaatcattctatcagatcagcagttttgatgtttgagtgaaaaaaaaacatgtcggccgcctcggcccagtcgactctagactcgagcaagcttatgcatgcggccgcaattcgagctcacttgcccaattcgccctatagtgagtcgtattacaaatcactggccccgcgttttacaacgtcgtgacnnnn

SEQ ID NO: 24216 - DNA, 383 bp, Homo sapiens
  misc_feature 1, 2: n = A,T,C or G
nnggtcttctgctcagttcttcctgatccccgcttctttctcatgttgtaccccaaattccatctcagtgtctgctccacaaaatgtaaccaaacaatcttctgcttatccatttggtaccatcaaatgagttggtgttaaactgcattctttgaagtcttggggattctgaggagccctcttagggaacatcttggggaagggaaagaaaggggaacttgaggctgggcaggtctgttgtctgtcttcaatcagagcagctttgttttctgttatgtattggttgtccataaaaacaaaacaaaacacagttgcttgaagaaagcataccgctgctaaataaataaagcaatagcaaataacttttgaagatgggccagagc

SEQ ID NO: 24217 - DNA, 691 bp, Homo sapiens
acgcggggggtgctcacagctgcccattgcctaaagaagaatagccaggtctggctgggtcggcacaacctgtttgagcctgaagacacaggccagagggtccctgtcagccacagcttcccacacccgctctacaatatgagtcttctgaagcatcaaagccttagaccagatgaagactccagccatgacctcatgctgctccgcctgtcagagcctgccaagatcacagatgttgtgaaggtcctgggcctgcccacccaggagccagcactggggaccacctgctacgcctcaggctggggcagcatcgaaccagaggagttcttgcgccccaggagtcttcagtgtgtgagcctccatctcctgtccaatgacatgtgtgctagagcttactctgagaaggtgacagagttcatgttgtgtgctgggctctggacaggtggtaaagacacttgtggggtgagtcatccctactcccaacatctggaggggaaagggcctcacctgggccacaggaggacactgcttttcctctgaggagtcaggagctgtggatggtgctggacagaagaaggacagggcctggctcagggtgattctgggggtccacttgtctgtaatggtgtgcttcaaggtatcacatcatggggccctgagccatgtgccctgcctgaaaagtctgctgtgt

SEQ ID NO: 24218 - DNA, 4399 bp, Homo sapiens; identical to SEQ ID NO: 20975

SEQ ID NO: 24219 - DNA, 1782 bp, Homo sapiens; identical to SEQ ID NO: 21380
  misc_feature 1766, 1767, 1768, 1769, 1770, 1771, 1772, 1773, 1774, 1775,1776, 1777, 1778, 1779, 1780, 1781, 1782: n = A,T,C or G

SEQ ID NO: 24220 - DNA, 1033 bp, Homo sapiens; identical to SEQ ID NO: 22857

SEQ ID NO: 24221 - DNA, 4448 bp, Homo sapiens
aacgcttacaaattccaatcgccattcaggctgcgcaactgttgggaagggcgatcggtgcgggcctcttcgctattacgccagctggcgaaagggggatgtgctgcaaggcgattaagttgggtaacgccagggttttcccagtcacgacgttgtaaaacgacggccagtgaattgtaatacgactcactatagggcgaattggccaagtgagctcgaattgcggccgcatgcataagcttgctcgagtctagagtcgactgggccgaggcggccgacaaggtttttttttttttttttttttttttttttacagcctctaagtcatcatttattgatttatagagcactcatcacatgaatgaggtgctttacaatacagtaaacatcacaacagaactcacatagttaaatacaatcaacaaattacagaactaaaaaaactgaaatgaagcaacattatgtcaaatttcaaagatgctgagaagtggcagtacaaaaaaggtaattccaccaactggagaccagacgggcaaagatacacaggcaccacagcccaaagcgggcagattcgtcgagggtgagtgggcatatcaaataaaatctcacaaccaagaatgaaggccgttaaagatactgacacccacgtgatcacagtactagtggaataacctcacaaacatgttaccttagtatgacaagtcaacctcatatggattttaaactcaaaaaagaggccagaaagccactcagatcatctatcccatacaagcacagactgaaatctatatgcctctacgagaacttggaataaatttaggaaacagccaacagttctacaatccataagatctatggagatgttgttgatggttggcacaagtttagggggaaaaatcattttcctaaagcagagaggaatcgcctcacactgatgaggcactggtgggacaaaagccacctcgttcagtgtcacctgaatgtgggtttcgtatcaaatgtagaggcatttaaatttacattatcagatgaacactgagaaaggcacagatgacatctccgacagaggaagggaagttgtaacatctatgtaggcctgtttcagtatgtaacacactcagggcaggtggaaaagcatgtggagacgcactcatgcctggctctcacttccactcccgtagagctagccctaaaaaaaaaacccacatggttttatcaaactaactgcattaaagtggcacttaaagttcaaaaatagttgtccctgagttactaggtcatttgctgcttgctgaagagtcagatcccaagtttcacctcaacagattgctagcagaattatagcaataggagagcaaaatttgaactccgttttgccacaagcaaccaccatgtgaacaagttctgattttaaaagggagggatcccatctcttaaaagaatttttttgtattagccaggcatggtggcatacacctgtagtcctagctactcaggaggctgaggcaggaggatcacttgagcccaggaggtcaaagctgcagttagctatgatcgttgccactgcactccagcctgggtgacagagagacccagtttcttaaaaaaaaaaaaaaaacagtaaaaaggattgtattccaagtccctggagggtgtgcagtgctgacattttggggcaactatttttacagtctttggaaaaggaaaaaaaaaaccaagtcacaaagttcttaaagaaaactgggttctaatgaatcaatttccagtcacaacacacttacgagtttctataaggtttgtgggtttgtataatgtttacaggtttttataacgcttcagagtagaggacagggacttagaaaaaaatcactctctactgtgactacatcctcaaccattttatttctgcttaaaaaaggacatacaacgtttgtagaggtctgggctcttggcaggagttctttcactcttctgccaaagcatttctccaaaccccacagagcagagatgcacgaattctcactgattctcacaatcaaacaccatgtcccatctgctactgtctcaagttctatcccttataagccaaagactacttcccacacacaacctcacaacaaacatgaaggagcctaaggcctgcctttaacactgcacatgttcattttaccatttgctgaagttgttttagaaaactgtatgatatgaaatatattgaagctcaaacattaatcacatccaagtgtactattgttagtgacgggatctacacgtcaaatagcaaagcatttacccctgtaatgcttttagattcacagaagaatctagatagaaccaaatacatatactgccatggccatgtgattttcaagtattaaaagttcatttgcataaggaatcaacctgagattttcctaaaccacttctctggcactcagtattatagccttcattcaatacaataaaagccaacaacttgacaattattgaaaaaaaattatattttggaagaactcactacataaggtgacagaattccaaaatcaaattacatgaaaatatacatcgcaatttctttgtacaataggtgagaaaaatctgcagtatagaagaatagaggcagagaaatatgaaggactaaggagaagggtatgagagtaaataggatttgtaatagcaaacccagaagttaagtagaaagcctgtagctgtgcatgcttcatttatccaaccttaataccaggcaactgaagagggaaaagtcagatttgctattgtttggggaaattttcagtaagttgaattaagaaccatctatttttagttctcaggggtaatgactgggatcaagagctcacaacggccaataaatgttattgctatatccaatccaagaggtgggtgcaactagaatacaaaaaggacaaagcacctagtgatgactccttcgaagtcatcattaaaaatcaagtaattgctcattaagtatttcagtatttgaactaaatcatttgagaacattctggcaggtaagagataaaagcaaaggggagtgtgtcaaaacaaagaagatacaaaagtttagtaagtgaaaagagtttaatgaagcctcaagggtttaagggaaattaaatggaaacttttaatcctaattgcttttcatctgacatgcttaaaggaatccttttaaactgataagaaacaatgaataggaaagaaaacctgctaaaatctcttagaatttacacgattcttattctactacaagaaagcattatttggtacaaggtgtatttgtggatgtacatgaacagtatatatattatccggatcatgttgtgctatgtacaggtctttacaattcttcctgaaggttaaaacagttcattagaattcaaaatgcgtaatcatctgtaagttggcacttgttaggctcttgtcagcattgataactggcatgttttattgcagcccagttccagccagtgtttgccaacttgtacaacagaagtccagcaataggtgggtagagtgcaggaaaaacagtgccatgtttctcaattggagaccctgaaataagtgaagttactagctgctaaataaatgtcactcaaaagcagtctcttggctttttcttacacagcgggcaacttttcttttaaattctccatttctatcttccctccattctttcgcagcatcaacattagcaggtgagtctccattagggtctgccagcatagaaatgacactaatcatgatggtttccacagtgtggatagggagccagcgttcctctggcttttcataaccatacttatcttccccaggctcatgaagaatagaaatgcacacatcaccatttttatcaacatttgggtgccagatttctgtaatgaatttcattttaggaggtcggaggggataatcttttgggaaagtaagatgagccttaaaaacaccaccttcataaagtgtatctggagggccaataataaggacttcccatcggtagagatcattgtcatctattaaacctgcagaaaagccttccactggatttttgttgagttctgccagctgtcttcgcagtagcagtgccgactgcagctccgtcatcctccctgccgagggcccgggctggcgccggggcttccgaagggctggggacaggctctgggggcggctggagcggggtgtgccgaggaacccgggccccgcgaccggagcgccggagccgaggaaggccgggctgaggcggcgggagcggcgcctcgctgccggtgcgagtccgctcgcttcagctcttttcacagcgactcacgcccggaaggggagggtgcccgggctgccgcggcgcgcactgggacttcgctcgcccgcttccctccttcaacccgcccgtcagccccaccggtgccttcccccgcccggacgcgtgggcggac

SEQ ID NO: 24222 - DNA, 1108 bp, Homo sapiens
  misc_feature 1102, 1103, 1104, 1105, 1106, 1107, 1108: n = A,T,C or G
cgcgtccgctgtatctgaagaaaactacatgtgtcggaggtttctaaagtaaaaatcttgtaagaaaattgtcaaaggggctaatgctacaaggctacactcttcctagagttgaaatattttgttgctgcagccgagtgacctccataaatactggactgaaaaaacattgtaatactacaagtataatgacatttagaagattactttgggctggtgggacatgctgtgaatttagattacaaatgaatattataaaggggatgatttttaaccaaaggaatatatttttaacttgaatcttttcttgcattgtatttttctaaaagtttggcttcctttcttggtagtcaagagtatgggtaataaggagttatatgtctgctatctgtgttgctcatttaaaaaaagtatacattgaataaggctgtttatcacatgcataaaattaaatatttttgtttcaaagaaacatctcaatacacttaggggtgtattgtttcccacatattaagtcagggtggataaattagttattataactaaacatagtatagtccaacattcgttgatcccaatacaggcaaacaacctggtcaaccttttgaagtagaagaaatgaaaattacttgacaagattaaaagtaaaacaatttaaatgttttactgaaagtttatatagtatagtctatgtagataaaagtaccacttgtcttttctgtgaattatgactattcattgttaaaaatacctaagagcaattatagtgggacatctaaggtctctgtaaacagtgaattagcaactcagctatgtgtttctaccctgatttttttcttttcatgggtatctgaagcctctaagttttttcaaaatggagtttcccaaaattgagtgaacacaatacttaatgtatgttctagattgcaattcataaatgtatggagattttgatgtgatttaatgggctatctggctatccattgttcattattttaagtgagataaaaattagggtggacaccaaaaaaaaaaaattgtgggggccggaaattaaatttgggggccaaaaaggagcgaacgggagagggttacaaacacnnnnnnn

SEQ ID NO: 24223 - DNA, 2455 bp, Homo sapiens; identical to SEQ ID NO: 24182
  misc_feature 2455: n = A,T,C or G

SEQ ID NO: 24224 - DNA, 890 bp, Homo sapiens; identical to SEQ ID NO: 21535
  misc_feature 1, 2: n = A,T,C or G

SEQ ID NO: 24225 - DNA, 1941 bp, Homo sapiens; identical to SEQ ID NO: 21404
  misc_feature 1, 2, 14, 15, 20, 71, 1941: n = A,T,C or G

SEQ ID NO: 24226 - DNA, 2410 bp, Homo sapiens
cgtgccgagccactccaggggcagggaccatttcttcattttctgaaagcactttaatgattccccttcccccaaactccagggaatggaggggggacccgcaaccaccatgaacagcaaaggtcaatatccaacacagccaacctaccctgtgcagcctcctgggaatccagtataccctcagaccttgcatcttcctcaggctccaccctataccgatgctccacctgcctactcagagctctatcgtccgagctttgtgcacccaggggctgccacagtccccaccatgtcagccgcatttcctggagcctctctgtatcttcccatggcccagtctgtggctgttgggcctttaggttccacaatccccatggcttattatccattcataaaatgaatgtgggtgaagccgccctaaggattttcctttaatttctctggagtaatactgtaccatactggtctttgcttttagtaataaaacatcaaattaggtttggagggaactttgatcttcctaagaattaaagttgccaaattattctgattggtctttaatctcctttaagtctttgatatatattacttgttataaatggaacgcattagttgtctgccttttcctttccatcccttgccccacccatcccatctccattgaatcaatggtgcaggacagaaagccagtcagactaatttccttctttcctcgcacttctccccactcgtcatcttttaactagtgtttcacaaggatcctctgaaaccctctctgtgccccaagtacagatcccattacttctgctttcgtatctcctcaggcaaaagtggagggtgccttatgggccctcctcataggttgtctctgcatacacgaacctaacccaaatttgctttggtgccagaaaaactgagctatgtttgaacaaagatgtcgtgcaaactgtacatacaaaatctgaaactgacactgtcagttctatactttgcacacgtgaagtgtcagaatattttcctcagtagtacaggtgtatttatcactaaaattcacaattagggaaaagaataagtgaatcaatgaattgtggttctcttaaaacttgtgtcattaaataagttagcagaaaacacaaagttctgttttgatggagcttttagtctcgatgaccaaaaccaaacccaactgatatgtactatattcttaaattataaaataagataaattataaaagttaaccataatgaataagaggctggggttatgtgctataagataaatgatcagccttccctaaagataaataaactgaaccacaattcacaaatgtgtttattattcttccctgcttctataacatttataaaaggaatttgtgctcagttgtggtctattttagtgttaaaataggtaaatgagtaagaaatcctattgcagaacatgatgcctttattgctggaatatccaaaggcattcaaaatattaaaacttgcccagaacatttacactactaaacacaggaatgttataaagatatatgtacatatatatatataatatataatgtcacaagccactaagaagttaaaattgtgccaacattttctacaaactactctttatgtgacacatcaaagcattaaccacataaaatatgaactttttctgttcacactggaataaggcatctgaaagccctaaacactgctgaagtgaaaattagaagaaaaaactcaacattcacataacatcaaatgtacatgctgcacgcacacaaaagacactgagaatatttttaagaagccacacatcacagaatttgatagtcaacttcatgcaatgagttccttttatatttcatcaaaaggtttacttgcccctttacttgttccaaatttccaagattaactcttaaatttgaaaaagtatctttttaataaaaatcaggtatctctttatatccatgatctatatggatagtgatttggattttttcaatcaaactctccctaagatacactcaggctgtgtttccattttagaaagtccatggcagatagctcaaattaaaaagaagcaatttgtccagaataattggttactgtcatgaatagtagacatttttcggggtgggggagtgagaggctctctaataagggaatcatattagttaagattaccagtaagaaaaaaaatagctgtaaactactccatattcaaagtacagaactggctggatgctgcggctcacacctgtaatcccagcaatttgggaggccaaggcaggaggatctcctgagcccagcagtttgagaccagcctgagcaatagtgaaaccctatctcttaaaaaaaaaaaaaaaaagtacagaactatatattctacagtaacggacgcgtgggcggacgc

SEQ ID NO: 24227 - DNA, 1214 bp, Homo sapiens; identical to SEQ ID NO: 20119

SEQ ID NO: 24228 - DNA, 442 bp, Homo sapiens
acggcgccgggcagtacgcgggggaaccaaactttagttttctacattaatgagaaacactggtaactttgcttcattgaaaaaataattgcttgttctctgtcagatgcacttcgtcttagtaacatggccatggggaagacaaccacaggccagatagtcaatctgctgtccaatgatgtgaacaagtttgatcaggtgacagtgttcttacacttcctgtgggcaggaccactgcgggcgatcgcagtgactgccctactctggatggagataggaatatcgtgccttgctgggatggcagttctaatcattctcctgcccttgcaaagctgttttgggaagttgttctcatcactgaggagtaaaactgcaactttcacggatgccaggatcaggaccatgaatgaagttataactggtataaggataataaaaatgt

SEQ ID NO: 24229 - DNA, 964 bp, Homo sapiens
  misc_feature 1, 2, 3, 815, 958, 959, 960, 961, 962, 963, 964: n = A,T,C or G
nnnacctaacaaacccacaggtcctaaactaccaaacctgcattaaaaatttcggttggggcgacctcggagcagaacccaacctccgagcagtacgcgggggaggaggagttgagagaacggagcggacgccatggcgaccaacatcgagcagatttttaggtctttcgtggtcagtaaattccgggaaattcaacaggagctttccagtggaaggaatgaaggccagctgaatggtgaaacaaatacacccattgaaggaaaccaggcgggtgatgcagctgcctctgcaggagtctaccaaatgaagaaatagtgcagaagatagaggaagtactttcctggggtcttagatacagaatacgatataagccagacttgaaagagggctccagaaaaagtagatgcgtatcctgtacaaaacagatcctactgatgaaattcccactaaaaagtcaaagaagcgaaaaaaaaaaaaaaaaaaaaaaaaaaaaatttgttgggggcgggcttggggctctggagaaagtttttttagaacccttttctttttggggggcgcggggccccagtgttgtgttaatttgggacttctgggggccctacaggtgggcccccaaaggggaagactccctggggctcgtggacttgaggtggtttgggtgttcttccccccaaataaaaaaaaacggcgcgggcggcgacaccgggcggcggctctgtgaacccacactcccgagggcgggcgttccgagaaggggtcccatacggggctctctcaatcacacggggggttccaggggacctcgaaaaangatgaccgccgcccgtggcgtgggatgccaacgatcacgacacaacgacaaacgaagtgacgagcaccggaagccacacagagagagggacgagcagcaacaccacaccggcgcagcacaagacgacaccaccagcacaagannnnnnn

SEQ ID NO: 24230 - DNA, 1420 bp, Homo sapiens
acgcgggggccccaaactcaccacctggccgtggacacctgtgtcagcatgtgggacctggttctctccattgccttgtctgtggggtgcactggtgccgtgcccctcatccagtctcggattgtgggaggctgggagtgtgagaagcattcccaaccctggcaggtggctgtgtacagtcatggatgggcacactgtgggggtgtcctggtgcacccccagtgggtgctcacagctgcccattgcctaaagaagaatagccaggtctggctgggtcggcacaacctgtttgagcctgaagacacaggccagagggtccctgtcagccacagcttcccacacccgctctacaatatgagccttctgaagcatcaaagccttagaccagatgaagactccagccatgacctcatgctgctccgcctgtcagagcctgccaagatcacagatgttgtgaaggtcctgggcctgcccacccaggagccagcactggggaccacctgctacgcctcaggctggggcagcatcgaaccagaggagttcttgcgccccaggagtcttcagtgtgtgagcctccatctcctgtccaatgacatgtgtgctagagcttactctgagaaggtgacagagttcatgttgtgtgctgggctctggacaggtggtaaagacacttgtgggggtgattctgggggtccacttgtctgtaatggtgtgcttcaaggtatcacatcatggggccctgagccatgtgccctgcctgaaaagcctgctgtgtacaccaaggtggtgcattaccggaagtggatcaaggacaccatcgcagccaacccctgagtgcccctgtcccacccctacctctagtaaatttaagtccacctcacgttctggcatcacttggcctttctggatgctggacacctgaagcttggaactcacctggccgaagctcgagcctcctgagtcctactgacctgtgctttctggtgtggagtccagggctgctaggaaaaggaatgggcagacacaggtgtatgccaatgtttctgaaatgggtataatttcgtcctctccttcggaacactggctgtctctgaagacttctcgctcagtttcagtgaggacacacacaaagacgtgggtgaccatgttgtttgtggggtgcaaagatgggaggggtggggcccacgctggaagagtggacaattacacaagggtggacactccccacagatcactgaggagaagcctggagccacatgcatgaggcacacacacagccaaggttgacgccgttaacaaaagcccaggctgtcctgggagcactgggaaggccagataagggcgtgagccgaaaaaaggggagatcccctaagttgtgaaagagggattatgggagaaattaaagctcgttattacgggg

SEQ ID NO: 24231 - DNA, 529 bp, Homo sapiens
actggagcaagctttattcgttgcatcaaacctaacttaaagatgacaagccaccactttgaaggtgctcaaattctgtctcagcttcagtgttcagggatggtgtctgttttggacttgatgcagggtggttgcccatcacgagcttcatttcatgaactctacaacatgacttttttttttttttttttgacttttcattttttttaaatttattttgcttattacggaaaaacgcaccacataattcaactagcaaagaagactgcttcaggacgtgtaaaatgaaaggcttccaggcagttatctgattaaagaacactaagagagggacaaggctagaagccgcaggatgtctacactatagcaggcgctatttgggttggctggaggagctgtggaaaacatggagagattggtgctggagatcgccgtggctattcctcattgttattacagagtggggttctctgtgtgcccactggtttgaaaaccgttatacaataatgatagaatagtacctcggccg

SEQ ID NO: 24232 - DNA, 1366 bp, Homo sapiens
  misc_feature 1, 2, 3, 4, 1366: n = A,T,C or G
nnnnaagctcagctcagccctcttccttattttgctcccaaagccttccccagattttttttgcttttcccccttttggaagtttactgcctactttctttttcatctttgtttaagattttaactggcattgaaggacctttacttgcaagtgatgttggacgtgacagatctgctgccagcccggttgtaagtagtatgccagaaagagcttcagagtcttcttcagaggaaaaagatgattatgaaattttgtaaaaagttaaggagcactctacgaaaaatagcaagcaataaagtaagaaccgtgataagtgcggcgagaaagacgaagaaaacgagactcttcattaagatctcgaagtgaagcgttccaaatcttctgtaacaccaaatctacgcaagcgtaccagtgaatctcgttctagggcaagaaagagatcatctaagtccaagtctcatcgctctcagacgacgttcacggtcacgttcaagacgcaggaggagaagcagcagatcaagatcaaagtctagaggaagaagatctgtatcaaaagagaagcgcaaaagatctccaaagcacagatccaagtctagggaacgaaaaagaaaaagatcaagctccagggataaccgaaagacagttagagctcgaagtcgaaccccaagtcgtcggagatcggagtcatactccaagtcgtcgacgaaggtctagatctgtgggtagaagaaggagctttagacatttccccaagccgccgcaaggccggaaaccctaagcggccagaggctgaaccgcatgaccgtcgagggctgaacctcaagccgcagatgcggagcaccagctgctggatgccagacacgtaagcgaagatgacgcagtatccgcgattcccgacgaaggaacgattccaagagtcttgacgcgcaaagaagaacgaaagagttaacgccatcttaacacgttccggcataacgccgatttgaggataaaccctttctgacaaaaggtgtttgccgaaacttcacaccacgcgggtgacaaacacaataaaacgcttccaccaagagagcgacggtatttaccccacaacgttcgttgaagaaatcatgcgtaactgcggatcctaacaccagcaaatttgtttcacaaccttaccacccatcccaccagtgggaaaaaaatagtttcctttaaacaccccacataacactactcccaccgcccacatcatactagcaaatacttaactatatacaccacgcccattttatcaacccatgtcacacataataacacacacatcataacaacaactatacataaataattatattaatacaaaacaacacatcatttatcacn

SEQ ID NO: 24233 - DNA, 1159 bp, Homo sapiens
  misc_feature 1158, 1159: n = A,T,C or G
cgtccgggcctcgggagcgcgcgcggtcgccgggacttctccccctcctagcccgcaacgtgcgcgcgcccgtatgcaaataagttcgattcaagagaattttgtgccgggagccgcgcgtgcgcagagggaaagcggaatctacaccttcccggccagcggtagcaactgcagaactgcaggagactatctttctagacaaggcagttgaggaggagggagcgcttgagggggactggcctggcgtgcactccgcacctcggggacattattgcgcgtggaacggctgcttttggaagactattgcccagaagaaaagatgtttggttttcacaagccaaagatgtaccgaagtatagagggctgctgtatttgcagagctaagtcctccagttctcgattcactgacagtaaacgctatgaaaaggacttccagagctgttttggattgcatgagactcgttcaggagacatctgcaatgcctgtgtcctgcttgtgaaaagatggaagaagttgccagcaggatcaaaaaaaaactggaatcatgtggtagatgcaagggctggacccagtctaaagactacattgaaaccaaagaaagtgaaaactctatctgggaacaggataaaaagcaaccagatcagtaaactgcagaaggaatttaaacgtcataattctgatgctcacagtaccacctcaagtgcctccccagctcaatctccttgttacagtaaccagtcagatgacggtcagatacagagatggttctggttctaacagaacaccagttttttcctttttagatctcactttcctggacaagacaggaagatattgttggtgggatccacctataaaggcgactgggggcagtctcattgacacccatcttttccaagcttgctgagcaatagacaggagctgtgaaagccagaggagcaggggcagaagctctgcctctccaatcagaatgtcgacgggtaatgtcaagggacacaacaacgtttgacttctgaaaaccacgtcactggcctttttcgagttcaacggtcgcctgaccccgcgagcgggacactaggcacaccaatcacgtaagatcacgacaccacacgagtaaggcagccggcatcggcacagagacgacggagcgcctcgcnn

SEQ ID NO: 24234 - DNA, 1234 bp, Homo sapiens
  misc_feature 1, 2, 1185, 1188, 1189, 1202, 1217, 1232, 1233, 1234: n = A,T,C or G
nnagatacggggtttcaccatgttgccaggctggtctcgaactcctgagctcaagtgattcacccaccttggcctcacaaagtgtcaggcttacaggcgtgagccactgcgcccggctcacagggtaaggcttctgtctggtgtgttgtattacggattttgcttaataggcacagtgaggcattaaaaagaaaattcagtatgcctgtagaaaggataatccttgtttaaagtctccaaattgcagtcaaagatgttttgactgtgcctttttttgttcccctgctgtcccttatgtagacttctgtcagtacccatggcagcctgtcatcttgttgacatctccttctggactgtgagctctgtatctggcttgtttttcatccccagcttctagttcacaattaggtagaaccctattactctttgaagaaggaacaagaaaatgtgggccagttttcatttgccattcttccatgtgagttagtatggttcgtaagtattcctggtgatacgctagtattggcaattctgtgaggttgaacaaaggggtggtatggtgtgctagcgtgggaattaggagacctctgggtcttgacagtgccctggccactaagcaaaggcagttcatccttggagtctcaatgtgcttttttgttaattgagatatgcttgaagtatcagccctaaatagtctgattctgtgacctacaaacccttacttaattcagtgttactataaatgattcttcccttaaacctactttttacttagcaaaagaaaaaaaaaaaaaaggaaacgcttatgtcgccctccccgggtttgaaccccagatccccctcctagttggaggccagttgtacgatgcttcagcttttggttcctgcctcctaaggttgttaggagttactgtgtgtagctgcttagaacattgcctgggtctcagtaagccgcttaagtgactgctctcattttcgctgtaaagcaccatactgtaataacatcccatgaagcatggggcggggaagagtatatggtaccttatggactttgaggtggtggggtagtaggtaaattctgaatatgtaagctacatagcattctttttgtaactaaaggataaaagttttaagatgggcatgttatatggctagcactggattttaatgatgagccagagtaanaannctggcaaggggantttttgttttgtaanaaatctcttaaaccnnn

SEQ ID NO: 24235 - DNA, 1001 bp, Homo sapiens; identical to SEQ ID NO: 21314
  misc_feature 681, 682, 683, 684, 685, 686, 687, 688, 689, 690, 691, 692,693, 694, 695, 696, 697, 698, 699, 700, 701, 702, 703, 704,705, 706, 707, 708, 709, 710, 711, 712, 713, 714, 715, 716,717, 718: n = A,T,C or G

SEQ ID NO: 24236 - DNA, 816 bp, Homo sapiens; identical to SEQ ID NO: 21390

SEQ ID NO: 24237 - DNA, 2006 bp, Homo sapiens
  misc_feature 1, 2, 3, 571, 2006: n = A,T,C or G
nnncgctgcccgctcgcgtgttccgcgtgctccgtggtcctcttctccgtctcgtcgtgttgtgttctctcgtgtcgcgtcctcctggtcttccgtctcgtgcgtcgcctcgtcgcgccgtgctgcgctctctgcgtcgccgtctctgccgcgctccgtctctcgcctcctctctctgtgttctggctcgtcctggctgctcttcgtctcgtggcgcgctgccgtcctcgtccctctctctgctgctcgctccttgtctgccggtgcttgctctgcttttcgctagtctccatgctgttctcctctgcgtctgtctttgtcgtgtgctgtttgtctcgtccttgggtctctgtctgggtcgggtctcttgtgtctcggtttgctttgtcgtgtccgctttgttgtctgtgttggtctgttcgctttctctctggtgcgctccgtttctcgttctgtgccttccctctcggctgcttgtgctccgctctcctttctgcgttgccgggcggtggcgggtgtccggtcgctagctgcgtgtcacgagagatatggagagcgcgcaacagataanaggatgtgaagtgcgacgaggcatgtttgttgtagccagcgggtgtgtgctctgtggcgtgtatgtgttggttccgctccgtttgaaatgtggaagcttgggcgcgcactgtcgtttagtggtccgggagacgctccctgttggaaggttgtttacgcgagagctgtgcgggtgaatttgtaatggtggcttcttctcacccccgggaagatctctgtctttgggacacactttcagaatcctcctttgggaatatttccacgttagctgttccgagatttgcaccccggtggtagaaggaatcgccagttcagtggtatagcagttatacaaatatatgtaagctctattactagattaacttgaaacagtagagtggttactaattatgtgttattaataaaaatattaacaaaaagaccaaaatgtgcaagggcacagtaacaaaaatataattatcaatatagctatcttattagagtaaaccatagtatcatcaggcttaaaaaaaactaaggtcattgttttttccgactcttccttataaatacagtggataactctgatcagttatccttatttacattccctgtgtacaaatttgctgatattgaacactattttcaaacacatcatcatctgattaaataggttattattactgaaaacttatcaaagctttcaaggctattaatggtttcatgcaacttaaaacttctaattttggaagcaaccggttaatgaattttttccttttattggtaaacagccaccatataccaatgacattatcaatatgtaaatatggtatttaacatgcttatatttttcttaagagctggaatacagactttgcaatatatctgaaacatcatcaaatattttgataatgccattacaatacaacctatgtgtggcattaaaaaaattacgaaccggtcatagtgcatttttctgaacttaaattttctagaggctaacataacaaaattatcattttgacacagtatattgcaagtgtcttttataaagttcacagtcttttcttgttgcctctttctaaacgatccttttctagaaccagtctgttttccaatgctgccatttttgtggcttcttttgcttaaaaattcaccaaaactggaatgctgaagttcagagtgttctttcaggagttgatcatattctttcgaaagtctctctgactgcatcttcatttccatcacatcattttgtgccttagaagggcatctgaagtcttccttaattcagttttcagtttctcctggtcttctactagttgtggattttctgcttccaaaacacattcttcatctttaccatggcgtttcaaaatcctttatagtaaatagataatcttctcataaatttttttggacagctcttgttagtattttctgcttgagttttaagn

SEQ ID NO: 24238 - DNA, 315 bp, Homo sapiens
  misc_feature 263, 277, 312, 313, 314, 315: n = A,T,C or G
acgcgggggcaggcgcacttcctgaagctgaaggtcagcatagacaaagggcctcagaatcgcgcaggcgcaattgtgccctggttcgccaagatgtcgttcccaaagtataagccgtcgagcctgcgcactctgcctgagaccctcgacccagccgaatacaacatatctccggaaacccggcgggcgcaagccgagcggttggccataagagcccagctgaaacgagagtacgagtacccgggctgttgagctgctcactngagtgttacagcangcgatgaagacttggcagaacagctgctggtctannnn

SEQ ID NO: 24239 - DNA, 1214 bp, Homo sapiens; identical to SEQ ID NO: 20119

SEQ ID NO: 24240 - DNA, 1001 bp, Homo sapiens; identical to SEQ ID NO: 21314
  misc_feature 681, 682, 683, 684, 685, 686, 687, 688, 689, 690, 691, 692,693, 694, 695, 696, 697, 698, 699, 700, 701, 702, 703, 704,705, 706, 707, 708, 709, 710, 711, 712, 713, 714, 715, 716,717, 718: n = A,T,C or G

SEQ ID NO: 24241 - DNA, 430 bp, Homo sapiens
actggagtaaattcagtatgaaggaagaaagcgctcctgcgtgttagaaccttgcccatgagctggaccgaggacaggagatggactccaggaaaattggatttcttcaagcagcctcccttggaaatggaatatctttaaaatcttctttgcagaaagacagttagaatgtattaatcagaatagttgaagacttattttcctttttattttttttcaaaatgagcattattatgaagccaagatcccgatctacaagttccctaaggactgcagaggcagtttgttttgatgtggacaatggcacatctgcgggacggagtcccttggatcccatgaccagcccaggatccgggctaattctccaagcaaattttgtccacagtcaacgacgggagtccttcctgtatcgatccgacagcgattatga

SEQ ID NO: 24242 - DNA, 694 bp, Homo sapiens
  misc_feature 1, 2, 3: n = A,T,C or G
nnncgtccggaaaagtcaaaatcatttttcaatctgttcccagtttctaaacaattttaaatatttatgagaagcaaaccctatgtgtagggcatctgttggagtgggatgcttttagacatatattaagtatgtacatgtttaatatgtatatttaaaatgcatatatattttattatatctatattatcctatatagatatatgtaacttagctttattgttagctccataagctgccagtgttgcttttctgttggtagagctctcccatttggtgacatggaaaatacctttccattatcacaacaaagcagttgctcagtagaaagtctagatttctgtcttataggtgatttctgtcttataggtgattataatcaagtgtaggcttcctgaattttgacatccttttagaacttgggtctggaattccagaaatgttaattgctgcttgtatttgttcttgtttgttttttagccagtatttgccctttctatccagccttatgaataatagcagtaaaatcacagtatcttggtcagtctttatttttttccttttttctcttttaagagtcagtcatccaggccagagtgcagtttgatgatagcttactgaagcttcccactcctgggctcaagttatccttccattttggcctcctgagtagctagaccataggtatgcatca

SEQ ID NO: 24243 - DNA, 500 bp, Homo sapiens
  misc_feature 500: n = A,T,C or G
acgcggggctactaaaatggttctaggtgctgtgtggacaggtgatacaaaagcctgactcacacggttgacattcattcattccattttcatttctctttgagtgatcctgacaagcagagggtctcaggtggatattactgtgtctttgagacctctctaatccttatctatctctcattttaatacagagagtttcatacgcagaccttaagtagacatagtatccagctaaaagggtctcactctgtcacccaggctggagtgcagtggcgcagtcatggctccctgtaacctcaacctctcagactccagcaatcctcctgcgacagggaagcagtcaatggtgaatgctggcctcgctgattactcacctggagacctttctgaggatcagttttctcatctagaaaatgggacaactgccagaccaccgaagaaaatacagaaaacagccccacacatcagcatgtttggttgctgccagtctacttggatcn

SEQ ID NO: 24244 - DNA, 1517 bp, Homo sapiens
  misc_feature 1, 2, 1512, 1513, 1514, 1515, 1516, 1517: n = A,T,C or G
nnccgagacgggggcggcggccgcgcgggtctggcgggaccggtttggaagactttgccggcctgcagattggccttaagagaaggacggagccacatactgctgacggcccagaactggcagagagaaggttgccatggctgctgttgacagtttctacctcttgtacagggaaatcgccaggtcttgcaattgctatatggaagctctagctttggttggagcctggtatacggccagaaaaagcatcactgtcatctgtgacttttacagcctgatcaggctgcattttatcccccgcctggggagcagagcagacttgatcaagcagtatggaagatgggccgttgtcagcggtgcaacagatgggattggaaaagcctacgctgaagagttagcaagccgaggtctcaatataatcctgattagtcggaacgaggagaagttgcaggttgttgctaaagacatagccgacacgtacaaagtggaaactgatattatagttgcggacttcagcagcggtcgtgagatctaccttccaattcgagaagccctgaaggacaaagacgttggcatcttggtaaataacgtgggtgtgttttatccctacccgcagtatttcactcagctgtccgaggacaagctctgggacatcataaatgtgaacattgccgccgctagtttgatggtccatgttgtgttaccgggaatggtggagagaaagaaaggtgccatcgtcacgatctcttctggctcctgctgcaaacccactcctcagctggctgcattttctgcttctaaggcttatttagaccacttcagcagagccttgcaatatgaatatgcctctaaaggaatctttgtacagagtctaatccctttctatgtagccaccagcatgacagcacccagcaactttctgcacaggtgctcgtggttggtgccttcgccaaaagtctatgcacatcatgctgtttctactcttgggatttccaaaaggaccacaggatattggtcccattctattcagtttctttttgcacagtatatgcctgaatggctctgggtgtggggagcaaatattctcaaccgttcactacgtaaggaagccttatcctgcacagcctgagtctggatggccacttgagaagttttgccaactcctgggaacctcgatattctgacatttggaaaaacacatttaatttatctcctgtgtttcattgctgattattcagcatactgttgattcgtcatttgcaaaacacacataataccgtcagagtgctgtgaaaaaccttaagggtgtgtggatggcacaggatcaataatgcctgaggctgattgacgacatctacatttcggtgctttttccctaagctgtttgaaagttacgcttttctgttgttctagagccacagcagtctaatattgaaatataatatgatttgtcaggtcttataaaaaaaaaaaaaaaaaaaaattgcggccgcaagcttattccctttagtnnnnnn

SEQ ID NO: 24245 - DNA, 1982 bp, Homo sapiens; identical to SEQ ID NO: 23828
  misc_feature 1860: n = A,T,C or G

SEQ ID NO: 24246 - DNA, 1715 bp, Homo sapiens; identical to SEQ ID NO: 23747

SEQ ID NO: 24247 - DNA, 906 bp, Homo sapiens; identical to SEQ ID NO: 23820
  misc_feature 1, 2, 3, 905, 906: n = A,T,C or G

SEQ ID NO: 24248 - DNA, 888 bp, Homo sapiens
cgacccacgcgtccgcacatgttaacttttctctctctagctctatatattcatatctgtctgtctatatatagctgtatgtattttaaaggtggctcaatcccttgtttaaaattggccataaacggagattagaggaagatgatatgtattcagtgctgccagaagaccgctcacagcaccttggagaggagttgcaagggttctgggataaagaagttttaagagctgagaatgacgcacagaagccttctttaacaagagcaatcataaagtgttactggaaatcttatttagttttgggaatttttacgttaattgaggaaagtgccaaagtaatccagcccatatttttgggaaaaattattaattattttgaaaattatgatcccatggattctgtggctttgaacacagcgtacgcctatgccacggtgctgactttttgcacgctcattttggctatactgcatcacttatatttttatcacgttcagtgtgctgggatgaggttacgagtagccatgtgccatatgatttatcggaaggcacttcgtcttagtaacatggccatggggaagacaaccacaggccagatagtcaatctgctgtccaatgatgtgaacaagtttgatcaggtgacagtgttcttacacttcctgtgggcaggaccactgcaggcgatcgcagtgactgccctactctggatggagataggaatatcgtgccttgctgggatggcagttctaatcattctcctgcccttgcaaagctgttttgggaagttgttctcatcactgaggagtaaaactgcaactttcacggatgccaggatcaggaccatgaatgaagttataactggtataaggataataaaaatgtacctcg

SEQ ID NO: 24249 - DNA, 408 bp, Homo sapiens; identical to SEQ ID NO: 21570
  misc_feature 1: n = A,T,C or G

SEQ ID NO: 24250 - DNA, 1946 bp, Homo sapiens; identical to SEQ ID NO: 23780
  misc_feature 1, 2, 3, 4, 5, 6, 7, 8, 9, 10, 11, 12, 13, 1132, 1133, 1134,1135, 1136, 1137, 1138, 1139, 1140, 1141, 1142, 1143, 1144,1922, 1923, 1924, 1925, 1926, 1927, 1928, 1929, 1930, 1931,1932, 1933, 1934, 1935, 1936, 1937, 1938, 1939, 1940: n = A,T,C or G
  misc_feature 1941, 1942, 1943, 1944, 1945, 1946: n = A,T,C or G

SEQ ID NO: 24251 - DNA, 971 bp, Homo sapiens
  misc_feature 1, 2, 3, 823, 956, 957, 958, 959, 960, 961, 962, 963, 964,965, 966, 967, 968, 969, 970, 971: n = A,T,C or G
nnncaaaaatggcatggacgagccgggggtaatcggacgaggaagaggaaggagctggatacaagacaagtgtacaccaaatgtgaaggtgatgaggttgaagatctctatgagcttttgaaacttgttaaggaaaaagaagaagtagaggggatatcagtaggtgctatactttctgactatcagcgtattcgagtggaaaatgtgtgtaaaaggcttaatctccagcctttagcttatctttggcagagaaaccaggaagattgctcagagagatgatatcatctaacattcaagcaatgatcatcaaagtagcagcttgggtttagatcctgataagcatcttgggaaaaccctggatcaaatggagccttatctcatagagctttctaagaagtatggagtacatgtttgtggagaaggtggagagtatgaaactttcacttggattgccctctatttaagaagaaaataattgtggattcatcagaagtagtcatacattcagctgatgcatttgcacctgtggcttatctacgctttttagaattgcacttggaggacaaggtgtcctcagtgcctgacaactacagaacatctaattatatatatactttttgaaaagtgtttcggaacattgttcattaaaccaccatttctatacaaaaaaaaaaaaaaaacccgggcctcctatgccggcgggcggcaaccacgcagctcctcgacgtgccagtgggtcaaagctggttcctggccccggttttcctgtgtccaggggcaatcggcccgctccccaaaggagagcgaataaattcgaaagcanggacgggaaagcgcacgacagcacccaacacccaacacacaacacacagacaccaacacccgcgcacacccacaacacacaccaccacacaccacaccacccaccgagcacccacgcgcacacacacagtaannnnnnnnnnnnnnnn

SEQ ID NO: 24252 - DNA, 859 bp, Homo sapiens
  misc_feature 1, 2, 3, 4, 5, 6, 7, 8, 9, 10, 11, 12, 13, 849, 850, 851,852, 853, 854, 855, 856, 857, 858, 859: n = A,T,C or G
nnnnnnnnnnnnncgaaagtcttctagaattaattaacgcggggttatcagaattaaccatcctcttcttggccacttcacatttgaggttgctagccagggaaggttctcctgagtacagagtctccttgacctacagtggagttacgtccagataaacccatcgtaacttgaaaacaccctaagtggaaaatgcatttaacacgcttaacctactgaatagcttagccttgcctaccttacatgtcctcagcaacttaaagtagcatagagttaggcaaaatcatctggcaacacagtgcactgtagagtaccggttgtttaccctcacaatttcatggccacatgagagctgtggctcactgccactgcccagcatcacatgagagcattgtactccatacctgtagcatgggagaaaatcaaaattcaaactttgaagtacagtttccactgaatacttacagcttttgcaccgatataaaggtaaaaaaaaaaaaatcctaagtctgagactgtctgtattagtctatgtaaagttcactttaaaggtaaatatttcttatgaagaataacaaaacattctatgtcatatatattttggggttttccaacattgttctggatggtatatgtcattgctccttttctcataaaattgatagtcaagatttgcttctacagaaaagggaatttaaactattttctttctttctttctttcttttttttttttttgagacagtttccctgtgttggccaggctagagtgcagtggtggctgatctcggctcactgctacctctgccccgccaggtcccgcgttaattaattctagaagactctcgannnnnnnnnnn

SEQ ID NO: 24253 - DNA, 777 bp, Homo sapiens
  misc_feature 1, 777: n = A,T,C or G
ngcccgccttggcctcgcaaagtgtgggattacaggcgtgagccactgtgcccagcatggtgtttcttatatcaggtgttttagggagctcgcttgcttattccattctttaatccttacagtgtgccacacgtatgaagtttataacgtattaatgatctcattacccaaaaccagaacataatttcacaagggttcctacttctgtattgttttattatctcaaaaatttaaataacatgttctgctgtttattgttcttgttatccactgtattagcaccttccctgatgtgctttggaggttgatcaatgaatttctgagactttctgctggaattactttaagggtgtcttattagatgatgaaaagttggctgagacacccttcaagtgaccatgtcattgttttcttgctatgtctttagcttaatgattaagatacaattctttttaaaatcaaatggtattagttattatgtttcccaaattagaaatcgattttagttaacattttattttattttattctattttatttatttttgagacagagtctcgctctgttgcccaggctggagtacaatggcgcaatctcagctcactccaatctccgctcccaggttcaagcgatttttctgcctcagccttccgagtagctgggattacaggcaccactaccatgcccagtaatctttgtatttagtaagacgggttccccatgttggcaagtcggtctcgaactttgactgtagtgttgccccttggctcccaaggn

SEQ ID NO: 24254 - DNA, 1309 bp, Homo sapiens; identical to SEQ ID NO: 23323
  misc_feature 1, 1308, 1309: n = A,T,C or G

SEQ ID NO: 24255 - DNA, 2133 bp, Homo sapiens; identical to SEQ ID NO: 21530
  misc_feature 1, 2, 3, 4, 5, 6, 7, 8, 2133: n = A,T,C or G

SEQ ID NO: 24256 - DNA, 2670 bp, Homo sapiens
  misc_feature 1, 2, 3, 4, 5, 6, 7, 8, 9, 10, 11, 12, 13, 14, 15, 16, 17,18, 19, 20, 21, 22, 23, 24, 2643, 2659, 2660, 2661, 2662,2663, 2664, 2665, 2666, 2667, 2668, 2669, 2670: n = A,T,C or G
nnnnnnnnnnnnnnnnnnnnnnnngtacttttattgaaaaggtacatttaaaaaaatacacagacattttaccatttacaggttgcagatatagatgctctaaaagagtccactctattttgttgttctatgataactcttgcccctgatatcacaaacattccagtcttgttgatatcggcttagaaaggggggcatgggagcatgacctgcaatatattcagcgaacagaaagacaaattgttcaattataaatttttttatcttctgtacattattgcattagggagccacaaaattatgtagcatcattacaaatgaaaacaggttaaaaatgaagaagatacttatatagaaatacatggattcattgtcttcttgcagaatgcacaagaggtgcaaaaatgtgcaatttaggaagctctttttctgtttgtatacgtttgcttagcaacacaaaccagtgaggaagctacaaaataagttaaacaaaaatagcaaacaggtagtaattatagctatgttatatggctttctatttcatttaaatatctccaaataaaatgtgaaataaagaaaatacattattttatcttttattctcttacagagaaaattcaaagctactttgcttcctaacatttacacagcaactaaaaatgtttaattcagacaagagatacagatctagtactacacaggatacagcagtacttgggtcgaaacagtacacaatccctgtcaacaacagtacaccaaaaagagaactttgtgatccgttggtaagatagtatccacaagtaagcacttgtgttcactgttttttgttccacactagaatacacccagttggataccagagttatttacagacatctgaggaagatcctagttttcaagtctgtcaggaaaatattccatattgttttaagccagatcatacccatggaaaaatagagaatggttttctttctttttctttctgaccaatacatgctcaagaaatcaaatatctgagatacacaaattgaacgcggtagggtgggggaggaagtagggagataaagcctatgctgctgattcctcaattataggagcagtctctaaaagccctcgtcaatctagtgatgtgtttctctctggaattgggggactgggtggtgggctgcattttgtgggtgaatggggggtactgcaacacaaactgcttaaattgctgaatccttgtggctttctttctcaacttcctactggccctcaaacgtcttggggtttgcagacgttagtacggagcaaagaggatggaggcaggagtggcgcggatgggcccatgcccaggcctcagaagagctggaggaatggctggagcctggaagagcgaggcagagggccggggtgggagtgacagcgctgaggacacggctgccgccgctgcgagaggtgaggacaggaaggctggggccaaaggcttcatcatatctttctggaatgcaagttttgctgctagaatactcgggctccgctggagtttgttgtaagggctgtattttggcttcagtggtttccctgcaactcgatctttatgccttcggctagaaatgtgctgtttgagttgaatttctgaattaacatgaacatcacagatttcacaatgaaatgtcttgttctgtagtcctgaccccttactgccattctgcatctttaatcttgatccaggtctaggataggatttaattggaccagccccattacgagcttcaaccatggtcttgtgtttagatcctgtgttgtgtgcctctagctgtgacagggagttcacagccactttgcatagtgaacaataaagtaattttttggctttttcttcttctgattcaacaacagtaccgggagctccatttgtgctcttggagggagaagtggctgctccaggtggcaggggtgttgtgccagatttgaggagaaatgagccactttcagagcttgatggctgactggaactgctggcttttaacttccctttatcttctgatttgtcagagttgttgcctgtgattggagtgatggagcagctgggattagcctttgcgctgtccttggaaggaaccattttgggtttatttttcgttgcgtctagtgctttgaccttcttggcatgtttacttcctttgtagtgggcctcggcctggctatctgagttaaagcgaagctgacagacattacaagaaataacttgtttcttctttgggggaatggatactccaaatgtatggttaataaccgctttttgcacaggatccattgtgttaaaatttggaaagagcccaacagcagaactactgtccactggaaaagacataaatggtttgatatccagtgaaggctgcatcatcagggtaggtgtgcgcacaagagcaggaagggtagtagtgtggcatgtactgcctggtttccagagagatttctatgcccaagggtctaaacaaacatgaaaccattgagctttgacgtgaactagatggaacattaaaacttgaaatggtgcctatcataaaaatcatgtgacaagagtgcaaatctcccacgtcactcaatttgattacaggctaccagccactattctgtcccccgcgttaattaatnctagaagacttccgannnnnnnnnnnn

SEQ ID NO: 24257 - DNA, 312 bp, Homo sapiens
  misc_feature 1, 2, 3, 4, 5: n = A,T,C or G
nnnnnagtccacagtgtaattaaaaggactccaaggaaatatttagcagaaattgtgttaattgacgatttcagtaataaaggtaatggctgtgaaactcacattttgtctataaaataagttaagcatgaataattgcaaaaaggtgatttcaaaataattagctttaaaaaattaatagcatctattgatagcatctgttatcaacaagttgacactgtgccaagcattgtatgtgagttattttgtttaatactaacagtaatcctttcagtggatatcattatgtccattttacacgctcagagatgt

SEQ ID NO: 24258 - DNA, 694 bp, Homo sapiens
  misc_feature 693, 694: n = A,T,C or G
accaaaacatttatgaccttataattttatagtgcaagaaaaaggacaaagacaggaatacaaataaattatcccgcgtactcccaccaccaatggaacccctgaggctgccttgtctgaggacatcaacctgattcgagggactgggtctggggggcagcttcaggatctggactgcagcagctctgatgacgaaggggctgctcaaaactctaccaaacctagtgcgaccaagggaacactgggtggcatgtttggtatgctgaagggccttgtgggttcaaagagcttgagtcgtgaagacatggaatctgtgctggacaagatgcgtgatcatctcattgctaagaacgtggctgcagacattgccgtccagctctgtgaatctgttgccaacaagttggaagggaaggtgatggggacgttcagcacggtgacttccacagtaaagcaagccctacaggagtccctggcgcagattctgcagccacagcgtcgtgtagacatgctccgggacatcatggatgcccagcgtcgccagcgcccttatgtcgtcaccttctgcggcgttaatggagtggggaaatctactaatcttgccaagatttccttctggttgttagagaatggcttcagtgtcctcattgctgcctgtgatacatttcgtgctggggccgtggagcagctgcgtann

SEQ ID NO: 24259 - DNA, 868 bp, Homo sapiens
  misc_feature 1, 867, 868: n = A,T,C or G
ngccactcttctgggagaatgaggttgcagagacattagataatattatctaataacagtactgttcgtttatataataaacttgggagatataggagggagatataggatggctaacttttatgtttatattatgttaatcaattattttttcttacataatatattgcaactcagaagcaatgtttgcttctggggtaatgtttataaacttttgcatgtgaagatgggcaatttggaagacttttggtttctggaagaacagaaatactcctgtaaaaattgagaaaatcttcacataggcagtgggaaatagaattcagacagcccctaagtcctttcttcttatggttggtggttgttattgtgctgcttacgtttgtttgagcatgttataagacttgaatcttctttaattggagacagagtcttgctctgttggacagagtggagtgcagtggcatgatctcaggctcactgcaacttcacctcctgggtcaagcgattctactgactcagctcctgagaagtgggattataggtgtgtgcatgaccggtaattggatttagagaatgggttcccattgtggcagttgtcctaactgaatcaagtgacccagctggccccaatggagatcacgggtgaaccacgtatcggcctaactgatttaataattacaggaactgttcaccaggagtaatagaatggcgtcacagaaaaagagtgccaatatctgtttggtactctctgttctttccattatgtcctatataatttatttggaatagagacaccactacataatgagtaaacaacaatacaacaacaagacacagaacacaaaacgaacgagacagagaactacnn

SEQ ID NO: 24260 - DNA, 931 bp, Homo sapiens
acttttgaaatggtctaatagaaaacacattactttttaattttattttaaaattgacttaaaaaaagaattcctgttttataatattaaacatatccctgcacattattgagcacctagagacaatatgtaaaatgtgttggttagaaggacctggaaggggctctgcttgactactttttctttcctcttctctaacaacgtttgcttcttgtaaaaagcaaaatcttaccttttctcctgtttcctactgatcactgtgctgagctaaagaaaatgttagtgatttgaatgctcaaggcagcttattgggcttgtatgtcttcctggaacactaggatttttcaagcctgtagatcaaaggtcttgggaaaaaagaaacaacttttttcagtgagctaactgaaatagaagagaatggcgactcctacccacacctcttggatcctggacatcagctctggctgtggggcaaatggcactgcatattggccaatgtggggaggatgcagccaacttaaggccccttttcagggagggaacgctgaccccacgctcctatttcccagctgcctgctgatgtttccattttctacccccaaacaacacctgcaggatagggaagaccatccatgcagcccagggcggtcagacttttaaggcagagttatgtggaaaatggacttggatgagccaaggaggaaatcctgcagatggcccaataagtggattatgtttgacttcagataagtaggacaagctagggagccagaaggttttattagttttgtttcactttccacaaaaccaccaaggtcccatctccaacagaacaggatgtgtgactgttccttgagtaaaaaaacaggaaactggacaaatcttgagagatcatcattaattagtacctgcccggccgccaccgcggtgg

SEQ ID NO: 24261 - DNA, 3951 bp, Homo sapiens
  misc_feature 1, 2, 3, 4, 5, 6, 7, 8, 9, 10, 11, 12, 13, 14, 82, 3950,3951: n = A,T,C or G
nnnnnnnnnnnnnngatattattatattttagttataaaataatcttgcgagcgcaggaatggtttttttttttttttccanaggtgttttctttatttcacaagtttcaagatacagtacaaaacgattctgtacatctctctattaacaggatttgtttacacaattatattacacttcaccaacctttatactgcatttcattaaatacaaaatacatttaccccaagagtcttccatggtgttccttcacaatgccaccttaaggtcttttaaaacttcctcttctacatatttatagtggttacatcttgattatatcaacattatgagttttatgagtttattttctaatcaaagagaatagtgtcagcctgtttctcaaaccaaataggaaaaacagcatgtgagatgattccctgcacataaccaaggaatccttttcatgcacacaacattggacttttacttgtgcagtcactttaacatacaaatcatctttccttgggatcgttttaaattttcttgaaataccaagtgggtggagagcttcttttcaatgaataccacacatttaaaatccagatcgtgcctcaggcattcaggagtgttatattttaatttatatttgagagtgatgactgatgaaaaatatttgcatgaaaatagaaattttcttttgttctgatcatttcttacatacttctagtcataataatgtgtaatacatatatatattatgagattcactttcaaaacaaatatcagctgtcactgaaatatagccctgcttgtcttggcaggtaaaggggctgttttcatgacacatcttgttttgaaatgtgcatgtgaaatgttagtccgaacctctgtaaaggaagtttttgcgtatgtagttagacattaatacacatgctatacacataaagaattgtgtttttcatttataggcctgcatgcatacttccaaaacactggtttgaagaatgaacatgaggataaaagaagggagagaaagacaaagcaaaataaaaaaaaattcctatatatatattaataaaatacttaagtttcctggaggcatcaacggctctttaaataaatcatcagatcatcaccagatcactggcaggggtttccaaaacttcccaacagtacagagacagaatggcttagtggtaagactctcacatgtaaggtaaaaattaacctaatatgcaaaaaagtaacaaatccttagtatcaagattaataatttataaattcatctgagttaagtgctaaacaatacattttgaaaagaagtcatctttgatttactttttctttgccattgactgctaatcaaaaataagccttacctagaaaacagaaactgaaacttcaaacacagagacagaaaaaaaaaaaaaaacccaccaatgctacctctgtaaaataaaactagaagcaaaatgaatagtttcaagacagtcggctaaccaacaaaccaaatgcacaagagaatactaaacagggttttactgtcatcaagttcgaaggcaggaagacagactagaaaaggtcttaggagagatgggctaccatggacaaatgaagccacactctatctgttaaatctaaattctaacattaaaactcctgaatcctggagttagtttaatgtcactgacattaactagctttagttattgtcattttattcaaatggatgccatttgattaggtaagtattgagcattattttaggagaaaaaccaaacccaactcctatttgcttaggtaccatgtcccatgaacaaaaaagaagaagagagcaaagtatttttgagacagtctttaagtgaagccataagaactaagttatttgaaagacaccattcacaaactgctggcagcaagtgacccagggtaaaatgaagtagaaacaagccaagaaaaggaaattcagaacattaacaatagaaaaaggcaagtggtaaactaataagaagtgtgtttttatatgaacaacaagactgcactttcccatccagccttaggtggcacacactgttttaagaaatgttttctcaaagcacgtactcaatggagggaaggaaagttagatataaaaatcttgctaaaggaaaaatgagggtggatggcagaagaaaaaagtgaaagttggtagtcatcttgggtggtttttcaacttttaaataaattataacagttccttctgaaggaagtgtggctgctaccgtggattacacttatttaacgcggggagaagggacagtggtggagacaccaaagtactgtaccaactgcactcaaatctctacatgtaagagaccaaacaagtctcactatttacaagagttgcctaaagcaacattacacttagggggggtaagtttcctacctttcacagatacgctttcatacatatggctctcttggtgactaactcttcgaatttggaagcaattatctgggaggaaagttttgcttaccaggtttcccataattctctaaacacaaaaaggtatacaacttcatatataaaagccttcatgttcattatagactagttaaatctagttctaactactaccccaacttcaaaaatcaaagcagtacaactctacaagcaataaacttttcaagttttctggcagatgagggattctgggaaaaaagcatgaaggttagtataaacatactgacatcagtaggcatagaaaacctgctcagatacgaatgcagtctcagacaagatacaggctggtgaacaccaccatctgacaataaaatgaaatacaaattcagtttaagctttaattatttcacgtgtgtaattatgtgaaactcttcagtttttttcccatactatttaaccagacaatcctgaagcatagtagccttgattttcctaatgttaacagtgagaaaatggtgactatgatagctaagcagtggctggctttctattataatataaaactatcagaaataaaaagatacctgaatagtatagaacagtacaaacaggttttggctttcatcaaccactgagtttaatccatctttgattctctgagttttagtattataatagtagtcactgtaagccataccctggcaatgatatttcatatttaaagaattcaggaaggtgatgtgttctttgtgcaaaaagaaatgcaaagtaaaataaatcctgggaacaaatgcttcaactttaggaaaagtatgtctgtgtctgtgatcgtagtaccccaaccagagttcgttttgttttctaatttctcccacttagtccatcctctggcttctggatcaaggctctgtatattcaaaacaaacaagcaaattacagagtaggtggggcaaactcgcgttagtgcaaggagtcagttcacaaggttttgcataagtatattccattccaaagaagtaaagctcacaaaaaactccttaacaaggcctttcattctttgaaggagaggagtatggtataccgtgtgacaatcaccaataagaaacctcccaaccctcccttttaaaataacaaatatgctgaatatgtctaattgcatgtggactggtaagagtttctcagttatcgcagttccaaaacattttcaagatagctttttttttttttaacttaaaaggcaagttctattttcagactttcgaacacgtttaaacttgcaactgggttttcctttttacactgatcagtttttagtgtcgatgcacaataccttaaagatggttgacattaagaacttatgcacactgaaataatgaccaaaaggatccaagaaagatagctggatacagtagacattactctgagtgtctcacatatgtttccagaaaagaaaaaaaaaagccactgaaagttgttattccatatggcactgaaacaaacattcagctcagtttaggtaagagnn

SEQ ID NO: 24262 - DNA, 1287 bp, Homo sapiens
  misc_feature 1, 2, 35, 54, 70, 1282, 1283, 1284, 1285, 1286, 1287: n = A,T,C or G
nnatggggcaacgtggaagaaatggccagaatttnaactggtcatcaatgcgancactttttacaaaagnccagagccagaataaccctttcattaaatcttcccaccaacatcctgatggccctcagttctgtacctggaatgcacatccatagtcactgtgtacaattgcttgagtgagttcatggtccgtaggaggatgaccactagcccaccaccttccactgtttctacagtcctggccagcaagtttggagttaaggcttcaaaatcctgcagcacacacatgccgaaggtattgcccaggatcttgtgggtctcgttgtagtagcagtagcgaatgtttgtggctgctatgaagagttcaaaggggtcgtcctgctttatgttcagtgttccattctttattttcttctgcagctgtcgcattcttttcttccggtgactgctaaaccccagctctttcttataacaccacagcactgaaggccgagccttcacagttgctttggataacatgtgatgaagtattaccacctgatcttttcctcgatccccaactacaacaaagagagatctttgccgctcagctactccattctcaatgagaatccggattcggttatccacctttttccgatgcatggtgaaaaattattactgcgccccgagcccgggggatcccagccagtggagaaggggaagcacgtgggagcacggaacaactccgaaagagaaggcacagctgactgcccctagcgtatgcctggtgtccgggtcacgtagtaagcctggctccgcggcacgcgtccctctcaggaactggtagacagcacgtgcgcaagcgcattaaagtcgcagagatggcgagcgagaagggaccttcctcaaggctgtcgctgagtaatgacgtaagccaccagaagcggagctgaggcctagatgtccactgcggttgcgcattttagtcccactgctcgcggtagctgggtgttggctgcggtttgcctcttcactcttcatatcccagctaaagtacctcggctaagaagggcaaaatagatgtccgcaccccagggcctgcccacgtaggtccagggttttcagcgtcagcctggttacgcgaaacgcgacggatccaacgatttgtgttcaatttaaccgatccccgttaagttgaggaaactcggccaacagacctattttattggtttcgcttggccctccacccccacagtactgatcttacagatgggaatcctgtaatctacccatgactgcnnnnnn

SEQ ID NO: 24263 - DNA, 340 bp, Homo sapiens
  misc_feature 1: n = A,T,C or G
naacccaagcttttccttttggcttttagcccattcagactttgccagagtcaagccaaggattgcctttttgctacagttttctgccaaatggcctagttcctgagtgacactggcaggggccctggacacagggctgtggagccacagtgaggagtggggcttttgtcctggggaacacgggaagctggtggagggttccctgccagggactgacatgacctgctttagatttcgctgtgatgtcctcacacagagaaaggccccgaagatggtctctgtgtctgagtctacaactctgtttcttccattcttcttttttttttttcatttttagggt

SEQ ID NO: 24264 - DNA, 1262 bp, Homo sapiens; identical to SEQ ID NO: 21868
  misc_feature 1, 2, 1261, 1262: n = A,T,C or G

SEQ ID NO: 24265 - DNA, 2538 bp, Homo sapiens; identical to SEQ ID NO: 20316
  misc_feature 2538: n = A,T,C or G

SEQ ID NO: 24266 - DNA, 2538 bp, Homo sapiens; identical to SEQ ID NO: 20316
  misc_feature 2538: n = A,T,C or G

SEQ ID NO: 24267 - DNA, 469 bp, Homo sapiens
  misc_feature 1, 316, 317, 318, 319, 320, 321, 322, 323, 324, 325, 326,327, 328, 329, 330, 331, 332, 333, 334, 335, 336, 337, 338,339, 340, 341, 342, 343, 344, 345, 346: n = A,T,C or G
nagcaggcagggtgaaatgtcttggaaatcctgaaagagaagggagtgtcagcattgtaggagcagtttctccacctggtggtgatttttctgatccagttacatctgccactcttgttatcgttcaggtgttctggggcttagataagaaactagctcaacgtaagcatttcccctctgtcaattggctcatcagctccagcaagtatatgcgtgccttggatgaatactatggcaaacacttcacagagttcgttcctctgaggacgaaagctaaggaaattctgcaggaagaagaagacctggcagaaattgnnnnnnnnnnnnnnnnnnnnnnnnnnnnnnntgttgcgcaccacagatatatatcttttatttgtcaattaaaggatcagcatagactccatgaaacttgagagacctgattaacatctgaaggcaacatctctgcaaaacaactaacttgagt

SEQ ID NO: 24268 - DNA, 3752 bp, Homo sapiens
  misc_feature 1, 2, 3, 4, 5, 6, 7, 8, 9, 10, 11, 12, 13, 14, 15, 16, 17,18, 19, 20, 3749, 3750, 3751, 3752: n = A,T,C or G
nnnnnnnnnnnnnnnnnnnnctcttctgtgtccgcttttttttctgtcatttcgtgtattcttttacctcccacgggggaggtaggccggccttgttgaccttgctccgaccctcggtttccaacccgcgttcccgcggctttttatggggggaaccacgcctgtgctgagccgctgttctttgccacgtatgccagtgcccgtgctatggggcccggcccaccgcatgggtttgaaactctttccagggccgagtcaccccacaacgtgttgttggttgttgtggtgttttttttaccatttgaaactgtgctttttatttatcaatttaaaattatctgttgatgctttcattatacaaaggattcactgttaaatactatagatatagttaaggcataattccagccctcaggaaacttatttggtcaagacaaatttgattaagagacaagctttacaaacaggtaaacagtttgaaataatgcacagtgttacaagtagaaaaatatttattaaagaaaaataagaattatggttatgaagcatgcacatttagccttgtctggaaaaagtttatgcgaaggtggtgcctgaggtcttttacattagataacttcttagtcctctgtcaggttctccacctggaatgccacagctagtttttcttctccaagggtcaaaatgctgctcttccaacaacaagcttaaacactaaacgtaaagcattaaacattcattgttatttgtacttgtcatttatacttgtgtatcttatagacaaatacttgtgtatcttatagacaaaacggtaagcccttaagagcagaaactgcttaaaagtcatttctgtatcactggtgactagtgaggtgtcttgcacagtgaaatgggtgaatgataggaactggagagagggtaagggatctagtctaggctatagggtttgtatgagcaaattccaagatagaaaagatagactaggttagtgcagcatgtgccaaatgttttgaagaatacatagtggacaccatcatcagtctttctgtgtcagaaagacaaacaaaaaaaacaatgaacaaagttatgctattctaggaaagacaaatggccagatctgacttttcaaaactactcacattgtgaaaaaagcaggaacaaatctagtttcaagttcagcatgccgttccctgtttaattcataaaacacaactggcagaagtattacttgaagcaaaacaaaagtaacgtgggaacttgcttatttgctaagccacaatgtatttttccaggaatagcataaatttgccatctttcttgtgtctatggaaaaggggtttagaattgtttcactaaaaattaaatttctatattgtcaaacatgattgtatactcaaattttaaaatgtgaagggaacacttactaagcatttcctgggtatgccactatattaagtcctagtaatatgatatagtttatttcaattttttttcaactcatacttcctttaaaatagcactgaccaaaagaaagttaacatgagcttcatgtacaatttttaatctttttgcagaaaaataaactgagaaaggctaaaattgttttatttaagccactataccaagacatattgatttcaccaatataaaaattgagatagtttacattttttggtacatctttaaaatctggtatgtattttatactgacagcacatctcaatttggacaagctacatttccagggctcaatagtcacatgaatctcaattgtaatcaaagaggttggcctgcatccttccattgtctagcacatctacttgtagacaattgtgaacatctgccactctgccaattctatatcccatcattgtaagttcagatcaacatataccactagcagaatttattcattaccaaatattaagctgtgagaccagcactatgtctggtactaaataaatggcaacaaaaatgctgacatgggagttcaaccattcatgcatttgcagatactaacacaggtaacagtgagtgaacaatcctccccctttttttcataccacttaatacaattattaattttcttatttattgtgtgtatatgcacatctgtttctcttatgacatgccacaagggaaggaactacatctatcttgtttgccattgtatccctgggccttagcagaatgtgttatacaaagtagatggtcaagtgtgtggaaaatgaataaatatggccatgcattgattaccagcttcaaccagcttgtcatttcattacactttgtcaattagtcaagagacattccacattttctcaatgaaagcagtgaacagaacaactgttttctcttcagcacaatatcttatagcccattccaatcattaaaaagtaatctgaaatttcccactagtcagaatcacatttatcctgtcttcattagactgtcctccaacacacaacaaaactagaatggctgaggcacaaatgaacaagtacaagaaaacagtcctttccagcaacctctcagacttaagaagacaaggacacacatgcacttggaagaaagaaaagaaaataatgaatagcatttaccaccacacagtcagtactggcctggcttttaagagctgtgaagacttcagaaacttctttggcaaactattttatgttaaacaatagaaatactgtagaaagccatgataaaggaaaacctaaaattagttaatgtcctgagtttttaaaaaagcaaaataaaatagcatgtaataaggtgaagcctattaaacacacacaaaatcaaatcatcaaaatctcaaacttaactcattctttagtaatataatattgtattataaagtcctttggctagtcttgacattgtagaaataattttatgtagagtgcaaaacctggaagaatatgagagctgacagtgagagcagctttttattttgtataaaatggtattttaacaatactggctttccccaaattaatttacagtcagttttatcatttttagcatataaagcctcctactcctagttaagtattttctgttttgtaaactactggcatacttaaccttttcatatcactgaaaacatttattcatctattgtatgtagatcgatcttttaaaaactgaatcgtgtttaaaatacactaaagaaaattacttttcccttttctttttggtgagcatttcaaaggtggggtaaattcggcctcttcactgtgttttcttttcttttttttctttttatggtcactttggtaaccactggagtcactgccttggaaaacagggtcctggtcctgaacttcctggtgctttttcttcttcttctttttctttggctcctcctcccagatgccattcgcattattagtattctgcagggctgactcttccattggagtgtcatctgcatcatctgctagctttgtggtaccactgtccacttcatatgtctctgggtctttcttctttttcttctttttaggttttttagcagcttcctcagtgccattttctgtaacttcttcagaaacttcaaattctagttcatcacccatgtttatctccatggtttgccactgctcagctgacaactgctcaggtttaggaatggaggcattgaaacacccatgtactaaacagccaatgtggctagaagacactttattaactatacccataagcttctgccctggttcagggcagaaaataaccctcgnnnn

SEQ ID NO: 24269 - DNA, 1764 bp, Homo sapiens
  misc_feature 1, 2, 3, 4, 5, 6, 7, 8, 9, 10, 11, 12, 13, 14, 15, 16, 17,18, 19, 20, 21, 22, 23, 24, 25, 26, 1762, 1763, 1764: n = A,T,C or G
nnnnnnnnnnnnnnnnnnnnnnnnnnaacaaagggaacgggggcccctttttttttttttgttgttttaaaaaaagaaaacaatgtttattaggatattctggggtgagaggatggccaaagggactatgtacattctgtagtgcttgagcaataggctaacagaaaattcgaacatcacaaaaccacttccaaagtccatattgcaaaacttgtacttctacaggagatgttcttccaagggtgttggcaataaaggctgttgcaaaacagctatgtgaggcagccatgtgggagtgaccccaggagaatgctccggtgtcctctggaaagcagatacacaggacgatggacaaatgtgtcatcttctaccagtgggaagctcagtaaacacacaatataacatggagacccgcccgaagcctaactggaggcttctcaacaaagctcagtcgacccctcacccctgttccgaggagactgggtgtctgaacccctcactcaggaatgaattctaaaaataccctaaaaatcagaagccgccttctactctaccgtgctataaacctgcatgaaacagaacgaacataagctgaaacacaccctcgggttaagagtgaaaaatgcaacaccatccaaaagagtacaagaaaaaaaccccacagcctaaatctcacacagcttctcagcaggagttggattaaactgagaaaataattttaatatcaagggataatgcacgcaagatgggaaaactttaaagcaaactctgcagtgaaaagtgtttcccccactcccttgggcgagggaagggagaagaagatagataatgaggagaactataaggccctggattcaggtttctgaaactgttttttttttttcaaccctcggaggacaatcagctcttcctgaatccagaaaagcacatcagaaatgcccaatgacagaccacagccaaatatggcagggcaaactgatttggttctgcgatttccattctcctctccacatccgagaaatgccttcagctacagctaaaaaataataataataaaaaaaaattcccgatcaagcatgcttggcacaccaggaagctaatgctggatcatatagccctccaatcattgtgtgtgtgtgtgtgtgtgtgtgtgtgtgtgtgtgtgtgtggtgacagagagaaccacgctttattggcggagccttatgtgccagcgaactgagaaggtccagggtaccttcacctgcactgccacagtcacccggtctcgccccaggtaatcaacctttactgattttcaacggccctggttccctatactcaggacatccactggattttctaattcttcttcctacttcactctagtcttaggatctgtgttatgcttgcaggtgtcaggggtcaatgtgcacattcgaagttttgctcctttgagcactgctgactgtttgctttcctcagctaaagcagctctggcatctcctattcccacctgcaccatggccggtacctgacagctgtgacttccccgccgctgtgcctacctggccaagctcatggccctctgaggcccagaggagtggctgcccaagtgctcagaggtggccttttaggctcaggatgaaggtgggtgtgtttgccttctctatcatggaagagctggatttgccattgtttgcacgtggcccaggacttacccctgggagactgagtctcagtttcatgaatgatttgtaaagagaatacagcgtctccgaannn

SEQ ID NO: 24270 - DNA, 3881 bp, Homo sapiens; identical to SEQ ID NO: 23987
  misc_feature 1, 2, 3, 3863, 3864, 3865, 3866, 3867, 3868, 3869, 3870,3871, 3872, 3873, 3874, 3875, 3876, 3877, 3878, 3879, 3880,3881: n = A,T,C or G

SEQ ID NO: 24271 - DNA, 501 bp, Homo sapiens
actcttttcggaagcagcaactgaagaaattgcatcccctgggcaatagatccactcacactgtccaggaaaatagccaagtttcagcatgttgatcatgtcaaagttcactacatcaaacaccttcattgctttatcatcccccacagaacaggacaatgctccctcagagctaactgcaatactctcaataactcccaggtgactacgaaaatgtttaacaaattcaattccctcttctatttttttccagaacttgacatgtccatcatgactggcagtaataataaaatctgttctgcatatatgaaatgttaaaagttaatttctaagacagatctatgaatcacttagtattcccaaagcaatcattcactaagaatctgacttgtgcataataggtttttttttaaaaaaaacccttctttaagcagaccactatattacagaacactgcaaattttgaaactcctttctggatgtcaaaacagttacagctgt

SEQ ID NO: 24272 - DNA, 1194 bp, Homo sapiens
  misc_feature 1194: n = A,T,C or G
actgagtagcattatacaaacaagtttcttttattgtttcctacacattcataataactatggaacagaaacattgttttaatttgctgtcctacctcggtgacctgatgaatacactgggaacagtccccagtttgagtaaggtcagttgaagcccttactgtataagtccaaaatttaagaaaaatgaatcccacgatgagcttctgcatgcttcggccgtgcgtggaccagtcagcttccgggtgtgactggagcagggcttgttgtcttcttcagggtcactctgcaggggttttctgggcttggtcttgcctccaaggtttcaggcactgcaggttttacacggctgtggtggatccaggttgggattccctctaccttcacagcggtgggagtgctcaggatgacagtctggggtcctttccaccgtggacacaaacaggctacgtttcagtccttgatccacactagatcacctggggagaaagggtgaactggggagaataagttaacagggcatctctcatttacccaggctgagattgtttgtgtaatttttcctgaagcctgtagctatcgctgtaactcaatttcacctaactctcggggagtgcctggaagtccccgcaatataggagggggcctatgatataatatttcataaggggaatatcctgttcttttagaaggggtacatctaattttaaataataccatagggagagcctgtatccattttaatcctgtttcctgacatactttccctaaactatttttgatagtctgattcatccgctccacctttccggaactctgaggccggtaggcagcatgcagtttccatgtgatccccaatacctttgccgtcttctgtaccaagtcagccacaaacgccagcccattatctgagccgatccgtaagggcagtccaaatctaggaataagatctcgaagaagcacacgagttacttcatgagctttctcagttcgtgttggataagcctccacctgcccagagtaggtacacacaagaactagtaaatacttgttacctccacactttggcatctctgtgaagtccacctggagatcttcaaagggggctgctccataagcttgtatgccagggggaacagctggaccttgtctcgcattatgctgtcgcggacgcgtgggtcgactccctatagn

SEQ ID NO: 24273 - DNA, 2538 bp, Homo sapiens; identical to SEQ ID NO: 20316
  misc_feature 2538: n = A,T,C or G

SEQ ID NO: 24274 - DNA, 2492 bp, Homo sapiens
  misc_feature 1, 2, 3, 4, 5, 6, 7, 8, 9, 10, 11, 12, 13, 14, 15, 16, 17,18, 2491, 2492: n = A,T,C or G
nnnnnnnnnnnnnnnnnnagcggtggccttggttgtcttccagtctcctcggctcgccctttagccggcaccgctccccttccctcccccttcctctcttccttctttccctccccttccctgttttgcccttgggggagccacttctaaggctgcttacccttgggggtgttcctctatttgcctgccacctctcttgtctctccctctgaagatggactcggccccacatacacatttttgtgttacagtcattgatggactctatttttttattattacttggaccttggtcgtttttatactagcaaaatgtcttgttttaatttgtgttttttggggggagggagggagtgaacttgctgattctgtagcaaaacctgggtgggggttggggtggggggtagtttactttgttgtaaggacttgataacctggctacagcgttttctatgaaatctacttggatcccatgcctgaaatttggaagcatatgtacaaaaatcatttttacgttttatttttaataaatcattgtgtttgaccgtacatgtctaacattttttttctaggatccattccgtaccgttttttaagggatatttgtttaagactttacgtgttaattctttattcttgatgtgtacttagagaaacttaagaggtcctgtggtttttttcccctctcctgttgccctgctagttgcgtgttgaattatatcccttacaggcaaaacttttgaagtggtggatgtggctttttaaactcttaagtttctgtgcatccatctcttgtactaagcgaattgtttatcatcttgacatggttggtcatttctatgacaatttacttcaaactgtgtactgtgtagttctatatagtttgtgttaagcatgtcattcatataaactgtttaaaatttttcagatggcctagtttcatccctcttactggtttgtctgtaatgaatggttaaaaataagggttatattttaccctcaaatgcgtttttgtactttcagagcaggtttaaacgttttttttttttttttcctatatccgaactgttggcctcatggaaatccctttcccgatctttgtagcaccatctactggcagaatggcagagtagctgcgaaacaatttgtttaaaaacttgcttaagacaattgcatcagatttggaagttttgccatcaaaattctttgcagaattggaagttaacacatttgcttgtaactgagatgggcttcacaggaatgtagttgccagttcatatcacaatagccctttctatatgaggtttgaaaatgtaaactgctatgcatagcttgggcaatagccctaaattgctatgacaactaatgaaccagctacgtatactggtattttaggtgcaagttgtaaagcaaaatatctgtgtattctgcttggttaacaaatgtatatttgtagccctttcctgcaatagcattcaagttgttgtttataagagaagaacaaaagtgataataggtgaaaattgcctttctggatagaaatagagaatagcaacgtttatggatatcacaaataaagaattcaattctttacatgattgagtgagagtatgtataacctggtgggtgggttcagagtaccttttaatctagtatgcttaacttgatgttaatatttaacttaaatatttgacttacatgttgacgttgaaggctcaaagctatactaagaagctttctgaaagattgggctttaaaataaaataatattttaatattgaaccattttttaacttcttgtcactgttcaattcctaaggtctagttcttgccagtttttttttttttttcctgattggcagggcttttaaagaagtaagaagaaaggttaagattattaggctaggttatagctgctcagtagtcattttgacaaggggtagcggagggtgggtacaaatagtgtatatcctctatgacaaagggggtggatgtttttacacttggaggtaatacatagtcaaatccttggctctcaaatagtggtacacttcccatacatatctgctaattttaatcctagtgatacacaattgacatgtgggctactcattgtaatgggcccagctttgggggctggagaggggccttaggttaacgaaaaaggagtcctggcaatttgcggtgttagtgccaaacctaatctgcgactattccacgtttgggggacgactggggtcatggatgtacacctatacagggacaggttaaaaaggtggctaatttcttcccaaggccatttacggctccaagcgtgcagaatttcgaacggttgggtcatagaggacggattgtaaggatataactatgacgtgtacccaaagcgtttgcgcaacagtgggatgcggacctggatatacacgtgcaagcggaaagtagttgtcacacaatataggcgcgcagagtcagtcgagcacaatatcggggtacnn

SEQ ID NO: 24275 - DNA, 3645 bp, Homo sapiens; identical to SEQ ID NO: 22602
  misc_feature 1, 3569, 3596, 3611, 3627, 3634, 3639, 3645: n = A,T,C or G

SEQ ID NO: 24276 - DNA, 513 bp, Homo sapiens; identical to SEQ ID NO: 20543

SEQ ID NO: 24277 - DNA, 1946 bp, Homo sapiens; identical to SEQ ID NO: 23780
  misc_feature 1, 2, 3, 4, 5, 6, 7, 8, 9, 10, 11, 12, 13, 1132, 1133, 1134,1135, 1136, 1137, 1138, 1139, 1140, 1141, 1142, 1143, 1144,1922, 1923, 1924, 1925, 1926, 1927, 1928, 1929, 1930, 1931,1932, 1933, 1934, 1935, 1936, 1937, 1938, 1939, 1940: n = A,T,C or G
  misc_feature 1941, 1942, 1943, 1944, 1945, 1946: n = A,T,C or G

SEQ ID NO: 24278 - DNA, 2021 bp, Homo sapiens
  misc_feature 1, 2, 3, 47, 2021: n = A,T,C or G
nnnccggaagtcctttaaacatccctcagaactcactcatcatcagnaaaattcatactggcaagaaaccctttgaatgtaaggaatgtggaaaaacctttatttgtggctcagaccttactcgacatcacagaattcacactggtgagaaaccctatgaacgtaaggaatgtgggaaagcctttagtagtggttcaaacttcactcgacatcagagaattcacacaggtgagaagccttatgaatgcaaagaacgcgggaaggcctgtcgtagtggctcatacttttctcaacatctcagaattcatactggggaaaaaccctatgaatgtaaggaatgtggcaatgcctttagtcagagctcacaacttattaaacatcaaagaatccatacaggtgagaaaccttacgaatgtaaggaatgtgaaaaggcttttcgttctggctcagaccttactagacatcagagaattcatactggggagaaaccctatgaatgtaagatatgtgggaaggcttattctcagagttcacagcttattagtcatcatagaattcatactagtgagaaaccctatgaatatagggaatgtggaaagaacttcatttatgacccgcatcttattcaccatcaaaatttgtactggtgatgaaacagaatatatgaaatgtgtagggaggcttttaattatggctcaaaacagaatttatcttgttaataattcctctagatagaataatgtagaaacattttatttgtggactacagcttattcagcctgggaaaaataatgttggagaaatactctatgaatagaatatactttggaagcccttaactaaacgcttacttctcttgacatcagataattcagtctagcaatatgatagataattcagtctgtcatactgaaaatgacagcacttttaacacctttctaaccttcttaacgtcaaagaatttttgtagaaatgtagtcctgtgattgtcattttttcccctaatttctctaattgttacattcttagtattttaatccatattaaatttatatggctataaatttcatctgtttacatcctgatttgtatactattttaaaaatacctttagtacctgggagaagtgacctctttatttttgaagatggcttgttctttttgtcccgggtaacattaaggctttcttattgtaaaaatgttcatgaacgacattttactcaatagagattcttcattatcttcatggtgttttgttgtgttactgtaatatcacttatgaaatcctattggtggatatcgtagtctcctctagatattttgccataatacatgccaaaatacaagtccctgctggacattctccctaagcacatctttgtatcatatcttttaattgcagaagtaatgtgtgaatatattttccttataaaagatgcaaacattacaaaaaggcaaatgtaccctttgaccatatcccaaaggatagtctttatcagttcattatttattgctgatcatttttctgttcatatatacatgcgtgtctcagtaaaaattataaaatgggggataattataatacctacctcataatgctttgtgaggattaaatgaattaagatcgataaagtgcttagaattgtgcctgacatgataaatacatactcactgaatgttagtcatcgttattatattcatcatcatcagtattattatttgtagaaaggctttttaacttctgcagaacttagtcaccattaggcagggtgtttgactgaagaaagaccctttgaaggtaacaagttaagaaaatttcccatcatcatgtacttactattgaacatgaaataatcctaggtgttgggggggaaagtactgtgaataatgtgtgtgaaggactttattccgactaatactctttttgtcgcattttatacccagtaaaaaagaaaagagaacataagcaaaatattggtgcactaatgaggaaaaaaaaaaaaaaaaaaaaaaaaaaaaan

SEQ ID NO: 24279 - DNA, 2771 bp, Homo sapiens; identical to SEQ ID NO: 24181

SEQ ID NO: 24280 - DNA, 973 bp, Homo sapiens; identical to SEQ ID NO: 23911
  misc_feature 1, 948, 961, 962, 963, 964, 965, 966, 967, 968, 969, 970,971, 972, 973: n = A,T,C or G

SEQ ID NO: 24281 - DNA, 419 bp, Homo sapiens
cgccagtgttgctggaaattcgccccttagcgttggtcagcggccgaaggtactccaatcaatccaccaggcttttaaactgtagatactgagaggatgaaagggaagatttggccaaaatttcccagtcataaggagtaagtctatttccatgagcaatggaatctaatactgttcttatataaggggagttggatccatattgtttaactcccttcctttatatcttttaacattttcatggtgaaaggttcacatctagtctcagctcgggcaggcgctcctacttgagtctcttccccggcctgtacggtagaactgctattattcatcctatgtgggtaattgaggagtatgctaagattttgcgtagctgggtttggtttaatccacctcaactgcctgctatgatggataag

SEQ ID NO: 24282 - DNA, 513 bp, Homo sapiens; identical to SEQ ID NO: 20543

SEQ ID NO: 24283 - DNA, 1748 bp, Homo sapiens
  misc_feature 1720, 1721, 1722, 1723, 1724, 1725, 1726, 1727, 1728, 1729,1730, 1731, 1732, 1733, 1734, 1735, 1736, 1737, 1738, 1739,1740, 1741, 1742, 1743, 1744, 1745, 1746, 1747, 1748: n = A,T,C or G
acgcgggggggagtcggagacacaacaaagatggcggcggcgactgtgacggtgacgaagacggcggcggcggcgacggcatttaacaaggcggtgtggtttactccatgcagttgtcaggagacctctgtatggcttttcaattttagttgaaattctctctccatggccttttggagtcccttgctgtatctccgaagtaaatttcaattactctacatttcatcaatgttggagtggcaagaaaaaggaggaacagatttggggtgaaaagttttgttttctaggtctaacaaactgtaaatgttaaaaaagcaaagatgggtgaaaaaaaaccagagcctttggacttcgtgaaagattttcaggaatacctgactcagcagacccatcacgtgaacatgatttctggatcagttagtggggacaaagaagcagaggctcttcagggagctggaacagatggtgatcaaaatggacttgatcacccatctgttgaagtttccttggatgaaaactcaggaatgttagtagacgggtttgaaaggacctttgatgggaagcttaagtgtcggtactgcaactatgccagcaaaggaacagcccggcttattgaacacatcagaatccacacaggtgaaaaacctcatcgatgtcatctttgtccatttgcatctgcttatgagcgtcatctggaagcccatatgcgttctcatactggagaaaaaccatacaaatgtgaattatgttccttccgctgcagtgatcgaagtaacttgtcccatcatcgaaggcgcaagcataaaatggtaccaattaaaggtactaggtcttccttaagcagcaagaaaatgtggggggttttacagaagaaaacaagcaatctgggctatagcagaagagcactaatcaacttaagtccaccttccatggtggttcagaaaccagactaccttaacgattttacccacgaaatcccaaatatccagactgactcctatgaaagtatggcaaaaaccacaccaactggtggccttccaagggacccccaagaactcatggttgataaccctttgaatcagctctcgactctagcagggcagttgtccagtctgccacccgaaaaccaaaaccctgcatcccctgatgtagttccctgccctgatgaaaagcctttcatgattcagcagccctctacccaagcagtagtttctgccgtatcagcaagtattcctcagagctcctctcccacaagcccagaacctcggccatcccatagtcaaaggaactatagtccagtggcaggtccaagcagtgagccaagtgcccacacgagcactcccagcataggaaacagccagccaagcaccccagccccagccctgccggtccaggaccctcagcttctgcaccactgccagcactgtgatatgtactttgcagacaacatcctttacactattcatatgggatgtcatgggtatgaaaatccttttcagtgtaatatatgtggatgcaaatgtaaaaacaagtatgattttgcctgtcattttgcaagagggcaacataaccaacattgattgaaaatagtcatattttacttagttttgctgtttttgtggtttggttttttttgttttttgttttggtcatccctaataaagtgtctgctaattcaaaaaaaaaaaaaaaaaaaaaaaaaaaaaaaaaaaaaaaaaannnnnnnnnnnnnnnnnnnnnnnnnnnnn

SEQ ID NO: 24284 - DNA, 3277 bp, Homo sapiens
  misc_feature 1, 3276, 3277: n = A,T,C or G
ngagtcgacccacgcgtccggggatttgatgtttacttgttgatctggattaatgtcatttctaaactttagacatatctaatagcctaaaatgacttacaaagaaacgtgtctgtgtgtgtatgtgtatatattgataaatgggtataattaaatatatatacaaacacatacttatatactattacccaggtataaattcttttttcaggattttttagatagcagtagaataaaaataattttaaaatgtcatactttatagtttaattttaagggggaaattggttattttcaattattaaaggttaaaataggccaaatcactttttatgcaatcatgttttatacagtggtctcattgcacattgtgttttttctgcactttttacggtatccttatcatgctggtatgtcaatatacaccctaaagaaaaactccatttaatgattgtgccttgtattctattattttttgcatcattagtaaaattaagttgtctattgtaaatgataactatatgacttaggagaatgtattgctatatgtactgctatggaaaaggaaagcagttatttatttgtttatggtacagttagttattttataccttaaaaaccaacatacttaccatttctattgtttaaaaattactgtccatttttttaaaaatttaaagaatgtagtattttctgaggactggtatggtacaaaaatgtaatcaaaattttcagatactacatttttaaaaagtgaggatggggaaaatatgtatcagcatgaccctgatgtagaaaaataaagtctgcaattgaaccttggcaaaatacattacataattatttctgataaggataaatattagctgtcatttaactgtcgtgaagaatgaaaaagtgatacatttgggctttttagatcatttgtaactaaatttgtacagaaattctcctgtgaaattaagtaaaccattttccagatcttgactgcattgctgagattttgcagttgaaaaataatttcaaatttttcaggttttttgtatatttatttttttctaacaaatatatttaactataaaattaaaattcagtagttaaactcttcataatgcagaaatggatggcttgattgtatagaaaaatgagtctttcagttacaccattcttgaaaataatagtgtatgtttgaaatttgtcattaattagttgcttttgaaggcaatctatttgaaatatgtaatttcctgatgttatctgcattgtgttaagaaaaaaataataggctataaaatcaatttttgtaaaaaaaatgtacagttttaagttgtgtacagaaaaaggaagagcgtacacagtcttagagtggaatatacctctagtacagtgtatgtgttaattccaactcaagcaaagaaatgagtatttaccatctttcctataacatgtaaatgtattattcctgttctacagacactgtatatttatgaccttatttggacattattagacactggtttcttagtaaagcacagtaacttggatcagattctttgtaaccgaaacacttaaacatgtattagtaataccaatatatttagattttatatttttataatttagcttctatgcattacagaagttgaattaagaaatttaagtcatcaccatatttttgttttctttaccacttgggaaaataatcctctttgaggcagtaacactatgtatgtactgttaataggccagaaagaaatattggcagttgtcttaggtaagcaataaaaacatctccaatttactgaaagttcagaaatataactcttacatgcatggaaagtgtaaaccaatttaggtatttctaagtacccaaccctagtattctctccctcaactccaacattctcaagtcccagatgaaaagtttcagtggagcattagtttaaatatttagtctaatcagagactcacagccctgggcaatagatacatagctttttaaaattttatcctttgtgacctgctatagtggcattggactattttctgcatgtattataactaaagattggccttatttcaattgtttttattgcacaacttcactacaaatttaaagactgctggcattattataaaactgtcttcctccaatccaagtaaataagtatgtggaatatttgtgagctggattaggtaacatctgagacttgggattgactaaatttagttatcacttggaaatgaattacataagatacagtaatcagagaaaatatctttatgcagcatgtatgttaacatctagaactgtccctcatctgcagtgcagtagaggaatcagacattttaagaaatgtattcaaatatttttatcttatatgttagcagcatttacatgttttcagatatgatttgtaatataaattaatttctccagttaacaatgtttacttcaattctgacattccattttatacatatatacctactgtatatctctctcaaatgtcagctagaagcaactttttcagttttctatctaatgaaaacggatatattctgaatgtttttgttacctgaaatttatttttgagtaggttgaaaggaccaagatacttgagtgattaaaggactgtaagtgttctgcttatatgcaggagttacatgattttaaaagtcataataggggaagtagttttatcatctgattactcctattaacctaaaaagtatttctaacataacagattgagcagtggttttgttacacttaggcaagaatttattttcccattaaaatttgaaaaatacacttttctttgcttctacccttgcagtttcccttagttcccctaatttccaagtgatctgaactaaaattaatattacatttactaagaaactatttttgttaattatactgagcaaagtttgctccaaatgaaaagtcattacgaactatgtatagtacccaagaaaaggtcaaattgagtcaaagactgtaagtaccaacttttgggggtcagagattagcctgggacacactgaagagacaagggggtggacatatgaggataagtgagatatagtaagggagaaaggctggggagaactgtgagcataaaaaaaggaaatgagtgtggccgagcaaatctgggaggggtgtaacaggcaagagtcaggagaaacgtaaggagcaacggcagagggggtagaaaaagagaaatgaagaggaagagaaaacgaaagaagagagggggtgcactaaatacnn

SEQ ID NO: 24285 - DNA, 2538 bp, Homo sapiens; identical to SEQ ID NO: 20316
  misc_feature 2538: n = A,T,C or G

SEQ ID NO: 24286 - DNA, 2410 bp, Homo sapiens; identical to SEQ ID NO: 24226

SEQ ID NO: 24287 - DNA, 313 bp, Homo sapiens
acaatgttgttatggtagagaaacacacatgccttaaaatttaaaaagcagggcccaaagcttattagtttaaattagggtatgtttcaagtttgtattaatttgtaatagctctgtttagaaaaaatcaaagaccatgatttatgaaactaatgtgacataatttccagtgacttgttgatgtgaaatcagacacggcaccttcagttttgtacaccgactacggcggactaatcttcaactcctacatacttcccccattattcctagaaccaggcgacctgcgactccttgacgttgacaatcgagtagt

SEQ ID NO: 24288 - DNA, 2182 bp, Homo sapiens
  misc_feature 1, 2, 3, 4, 5, 6, 7, 2179, 2180, 2181, 2182: n = A,T,C or G
nnnnnnncaggtacaaaaattagctgggcatagtggcacatgcctgtagtcccagctactcgggaggctgatgaacaagaatcacttgaacctgggaggaggaggttgcagtgagctgagatcgtgccactgcactccagcctgagcgacagagcaagactgtctcaaaaaaataaaaaagaaaaaaataataaaaaggaaaacaaagcctttagaaaaacaaagcctttgaaaaaggatgtaaaattgaatatatagatacaattatttttaaaaagttttatagaaaaatatcctggattgttgatgttgttttaatatattttaatcatttttgtataatgtcatgtataatatgttataatgaaagtaaaaaaaaaaaaaggtcttagcagagcaggcagaaaaatgccaaactcagtgccttttagttattttgatatgtgggaagatcatgcataaggctccttttagctcattgcttgagctaggaaggttaatccccctgaaggtcaccttggaaagggtactatcagcacagaaaaacagtgagaaccatcctaaatttcagcaaggatttgagaaagatccaaatttcacataatgatgaatcttcacacctctctgccctatgattttccgtaattttcgatcatctatgcattgttcaaatttatacctgcagactattcatttaattttactccttacaattataatagactaagacagatatagaagctacttatttacactagaaattaatttaatagatgaaaaatattgagcaatatttggaatataaaatttacaaagcatattataatacctaaataatacttaacctaatatagtgcaattttacaatatttatttagcttgctgtctaaaattctggtttctttgaactttttgatcaagaacttttatcaacccttctttgcttattgcacaatgcaagtgaaatccaaggggatatccctccatttttattcagtctttcctatacctattctttatagaggaagaattacatgccagctctatagatacgtatgtatccaagacatggatacttttaatcaattgtaaatttttcttgtgttataaaaatagttcctctcagtaaatatctgtattaagaaaagcaaagtcaaggggtcatttcactagaattcatcatggtaatatttatgtttgcctttacttccaaaaaacaacaaaaacctcattccctttttacatttcatgtgacccacttcctcagatatacctaataaagcctttatcagtggtcaccattgtgctgtttttcctttcacttaactcagcccttgagccagagaaggaagctgcaatacttctattggattttgcaagacattaggtcatgcatgttgcccataacaaggaaactctttagtgtgaaaccacaaggctagtctcaatctcagctccatggcctctgggaaaataagagtcagggacctgcactgattcttcactaacctgagataaaatggtgttctcttccagtatgtcagtcaatttctcaaagacaagcaatgtttccctcagtcacggtgtaagaaaaaaactttcctaactgtacccatcattcttctttaaacattcaaaaccatagttcagaaatccagctaaattgaactttgttttaaatattgattttccattcaatgctttttctagtgttttgagttcctttcccagccctggcggatccttgtaagggtgttgtctacacatggcatgattaggacaaacttgatcaccagcacagtgcaaggaatgataagccctaacacgtaggctgcaggaagataccatctgagatttgaagggctgaggaatctcttcccaccgtacaccagggtgtgggctgtacacaagatcagggtcaaataacccagtttggactggacaaatcggaactctctccagttgactgcattgctaacagatggcaaagaagtgattcccaagagtacaaacagaaaaaacccaagtattcccaaagccacatatgaatcactgagccaggctgaggaggtgctaaatggattctccttcttgagtattgcctgggtaacggttaagtttcccaatctccatcgtacataatatcgaataggaatcacaagtgtgtagaggacataannnn

SEQ ID NO: 24289 - DNA, 1290 bp, Homo sapiens; identical to SEQ ID NO: 20742
  misc_feature 1, 2, 1281, 1282, 1283, 1284, 1285, 1286, 1287, 1288, 1289,1290: n = A,T,C or G

SEQ ID NO: 24290 - DNA, 1946 bp, Homo sapiens; identical to SEQ ID NO: 23780
  misc_feature 1, 2, 3, 4, 5, 6, 7, 8, 9, 10, 11, 12, 13, 1132, 1133, 1134,1135, 1136, 1137, 1138, 1139, 1140, 1141, 1142, 1143, 1144,1922, 1923, 1924, 1925, 1926, 1927, 1928, 1929, 1930, 1931,1932, 1933, 1934, 1935, 1936, 1937, 1938, 1939, 1940: n = A,T,C or G
  misc_feature 1941, 1942, 1943, 1944, 1945, 1946: n = A,T,C or G

SEQ ID NO: 24291 - DNA, 963 bp, Homo sapiens
  misc_feature 962, 963: n = A,T,C or G
gggagtcgaccacgcgtccggctgctgttaagctggccccagacattaaactcagactagggccttcacctctgacacttgcccctaagtccttcagacatgttgagaagctaagcaggagtcttccggagtcaggcaggaaggagaagcacagcaatatacattcataatatacgtacaatgactagattggtttgagacaagagtggtgggatcagagccatgtggagagctcatggcctgtctaaattgttgccatgtggaaatggggcagagtgttgccaattttctgattttttgtgtggaaaaaaatctccaaattgtagtttttaaatttggggaatgcaaatatatatatatatatacacacacacacacacacatatacatatacaatccatatacatatggagtatgtaacgtggcaataacagtatacatcaaaaaatttacaaacagtgcaagacaaataaaatccaagccatccatttgtgaccacagtcataagcattcacttagccagggcttcagactaattgtctgagaagtctgagaaaagactaagatacccaagatgaacatagtgtcaagggacgaaatcatggggacatcgcgccttgtgttccaaaagacgagtgtttttaaagagaacctttccatacttgcggttcgtggtctataagaggtaaacctttaaccttcatggaccttagatctcttgcaagccatccattttcttcgacaaattccccagaaaacctttttgggtgcgggggcgggaccagccggataccccccagggggggcgcgcgggcgcgtatattgagcgcgtgtttttgacgccgcgcacacagagaccctttcaaatataatatcgcgcgcgggagccgcgactccttgggaggggaagctgcacaggttgctagcgcatgagacgccaccggtgggacccacatatatann

SEQ ID NO: 24292 - DNA, 294 bp, Homo sapiens
  misc_feature 293, 294: n = A,T,C or G
acatctctaaggtccagaaagaggacaacagcacctacatcatgagggtgttgaaaaagactgggaatgagcaagaatggaagatcaagcttgcaagtggcttgaccctgtactgtacttctcatgctggatttcaaaaaaaaaagtatcaaaaacaaaaaaaactaaagggtggtgttttattggattgtgacaggttgagtaataaggaattaagtcgtcgtcatttcattaaaactgagagatgatgtaatgcatatataagagttttctgaagggtatttttttgggcnn

SEQ ID NO: 24293 - DNA, 14456 bp, Homo sapiens
ccttagttgctggctttgaccttttatgttgctgagttttacacatctattttctcaactgccatatcctagggggcttggagtacccataatacagtgagcccaccttcctggtccccagacatttcagaaggtcgggaaatttttaaacccaggcagcttcctggcagtgccatttggagcatcaaagtgggccgtgggtctggatttccaggaaagcggagacctcgaggtgcaggactgtcggggcgaggtggccgaggcaggtcaaagctgaaaagtggaatcggagctgttgtattacctggggtgtctactgcagatatttcatcaaataaggatgatgaagaaaactctatgcacaatacagttgtgttgttttctagcagtgacaagttcactttgaatcaggatatgtgtgtagtttgtggcagttttggccaaggagcagaaggaagattacttgcctgttctcagtgtggtcagtgttaccatccatactgtgtcagtattaagatcactaaagtggttcttagcaaaggttggaggtgtcttgagtgcactgtgtgtgaggcctgtgggaaggcaactgacccaggaagactcctgctgtgtgatgactgtgacataagttatcacacctactgcctagaccctccattgcagacagttcccaaaggaggctggaagtgcaaatggtgtgtttggtgcagacactgtggagcaacatctgcaggtctaagatgtgaatggcagaacaattacacacagtgcgctccttgtgcaagcttatcttcctgtccagtctgctatcgaaactatagagaagaagatcttattctgcaatgtagacaatgtgatagatggatgcatgcagtttgtcagaacttaaatactgaggaagaagtggaaaatgtagcagacattggttttgattgtagcatgtgcagaccctatatgcctgcgtctaatgtgccttcctcagactgctgtgaatcttcacttgtagcacaaattgtcacaaaagtaaaagagctagacccacccaagacttatacccaggatggtgtgtgtttgactgaatcagggatgactcagttacagagcctcacagttacagttccaagaagaaaacggtcaaaaccaaaattgaaattgaagattataaatcagaatagcgtggccgtccttcagacccctccagacatccaatcagagcattcaagggatggtgaaatggatgatagtcgagaaggagaacttatggattgtgatggaaaatcagaatctagtcctgagcgggaagctgtggatgatgaaactaagggagtggaaggaacagatggtgtcaaaaagagaaaaaggaaaccatacagaccaggtattggtggatttatggtgcggcaaagaagtcgaactgggcaagggaaaaccaaaagatctgtgatcagaaaagattcctcaggctctatttccgagcagttaccttgcagagatgatggctggagtgagcagttaccagatactttagttgatgaatctgtttctgttactgaaagcactgaaaaaataaagaagagataccgaaaaaggaaaaataagcttgaagaaactttccctgcctatttacaagaagctttctttggaaaagatcttctagatacaagtagacaaagcaagataagtttagataatctgtcagaagatggagctcagcttttatataaaacaaacatgaacacaggtttcttggatccttccttagatccactacttagttcatcctcggctccaacaaaatctggaactcacggtcctgctgatgacccattagctgatatttctgaagttttaaacacagatgatgacattcttggaataatttcagatgatctagcaaaatcagttgatcattcagatattggtcctgtcactgatgatccttcctctttgcctcagccaaatgtcaatcagagttcacgaccattaagtgaagaacagctagatgggatcctcagtcctgaactagacaaaatggtcacagatggagcaattcttgggaaaattatataaaattccagagcttggcggaaaagatgttgaagacttatttacagctgtacttagtcctgcgaacactcagccaactccattgccacagcctcccccaccaacacagctgttgccaatacacaatcaggatgctttttcacggatgcctctcatgaatggccttattggatccagtcctcatctcccacataattctttgccacctggaagcggactgggaactttctctgcaattgcacaatcctcttatcctgatgccagggataaaaattcagcctttaatccaatggcaagtgatcctaacaactcttggacatcatcagctcccactgtggaaggagaaaatgacacaatgtcgaatgcccagagaagcacgcttaagtgggagaaagaggaggctctgggtgaaatggcaactgttgccccagttctctacaccaatattaatttccccaacttaaaggaagaattccctgattggactactagagtgaagcaaattgccaaattgtggagaaaagcaagctcacaagagcaccatatgtgcaaaagccagagataacagagctgctttacgcattaataaagtacagatgtcaaatgattccatgaaaaggcagcaacagcaagatagcattgatcccagctctcgtattgattcggagctttttaaagatcctttaaagcaaagagaatcagaacatgaacaggaatggaaatttagacagcaaatgcgttagtaaaagtaagcagcaagctaaaattgaagccacacagaaacttgaacaggtgaaaaatgagcagcagcagcagcaacaacagcaatttggttctcagcatcttctggtgcaatctggttcagatacaccaagtagtgggatacagagtcccttgacacctcagcctggcaatggaaatatgtctcctgcacagtcattccataaagaactgtttacaaaacagccacccagtacccctacgtctacatcttcagatgatgtgtttgtaaagccacaagctccacctcctcctccagccccatcccggattcccatccaggatagtctttctcaggctcagacttctcagccaccctcaccgcaagtgttttcacctgggtcctctaactcacgaccaccatctccaatggatccatatgcaaaaatggttggtacccctcgaccacctcctgtgggccatagtttttccagaagaaattctgctgcaccagtggaaaactgtacacctttatcatcggtatctaggccccttcaaatgaatgagacaacagcaaataggccatcccctgtcagagatttatgttcttcttccacgacaaataatgacccctatgcaaaacctccagacacacctaggcctgtgatgacagatcaatttcccaaatccttgggcctatcccggtctcctgtagtttcagaacaaactgcaaaaggccctatagcagctggaaccagtgatcactttactaaaccatctcctagggcagatgtgtttcaaagacaaaggatacctgactcatatgcacgacccttgttgacacctgcacctcttgatagtggtcctggaccttttaagactccaatgcaacctcctccatcctctcaggatccttatggatcagtgtcacaggcatcaaggcgattgtctgttgacccttatgaaaggcctgctttgacaccaagacctatagataatttttctcataatcagtcaaatgatccatatagtcagcctccccttaccccacatccagcagtgaatgaatcttttgcccatccttcaagggctttttcccagcctggaaccatatcaaggccaacatctcaggacccatactcccaacccccaggaactccacgacctgttgtagattcttattcccaatcttcaggaacagctaggtccaatacagacccttactctcaacctcctggaactccccggcctactactgttgacccatatagtcagcagccccaaaccccaagaccatctacacaaactgacttgtttgttacacctgtaacaaatcagaggcattctgatccatatgctcatcctcctggaacaccaagacctggaatttctgtcccttactctcagccaccagcaacaccaaggccaaggatttcagagggttttactaggtcctcaatgacaagaccagtcctcatgccaaatcaggatcctttcctgcaagcagcacaaaaccgaggaccagctttacctggcccgttggtaaggccacctgatacatgttcccagacacctaggccccctggacctggtctttcagacacatttagccgtgtttccccatctgctgcccgtgatccctatgatcagtctccaatgactccaagatctcagtctgactcttttggaacaagtcaaactgcccatgatgttgctgatcagccaaggcctggatcagaggggagcttctgtgcatcttcaaactctccaatgcactcccaaggccagcagttctctggtgtctcccaacttcctggacctgtgccaacttcaggagtaactgatacacagaatactgtaaatatggcccaagtagatacagagaaattgagacagcggcagaagttacgtgaaatcattctccagcagcaacagcagaagaagattgcaggtcgacaggagaaggggtcacaggactcacccgcagtgcctcatccagggcctcttcaacactgacaaccagagaatgttaaccaggctttcaccagacccccacctccctatcctgggaacattaggtctcctgttgcccctcctttaggacctagatatgctgttttcccaaaagatcagcgtggaccctatcctcctgatgttgctagtatggggatgagacctcatggatttagatttggatttccaggaggtagtcatggtaccatgccgagtcaagagcgcttccttgtgcctcctcagcaaatacagggatctggagtttctccacagctaagaagatcagtatctgtagatatgcctaggcctttaaataactcacaaatgaataatccagttggacttcctcagcatttttcaccacagagcttgccagttcagcagcacaacatactgggccaagcatatattgaactgagacatagggctcctgacggaaggcaacggctgcctttcagtgctccacctggcagcgttgtagaggcatcttctaatctgagacatggaaacttcattccccggccagactttccgggccctagacacacagaccccatgcgacgacctccccagggtctacctaatcagctacctgtgcacccagatttgggaacaagtgccaccatctcaacaagagcaaggtcattctgtccattcatcttctatggtcatgaggactctgaaccatccactaggtggtgaattttcagaagctcctttgtcaacatctgtaccgtctgaaacaacgtctgataatttacagataaccacccaaccttctgatggtctagaggaaaaacttgattctgatgacccttctgtgaaggaactggatgttaaagaccttgagggggttgaagtcaaagacttagatgatgaagatcttgaaaacttaaatttagatacagaggatggcaaggtagttgaattggatactttagataatttggaaactaatgatcccaacctggatgacctcttaaggtcaggagagtttgatatcattgcatatacagatccagaacttgacatgggagataagaaaagcatgtttaatgaggaactagaccttccaattgatgataagttagataatcagtgtgtatctgttgaaccaaaaaaaaaggaacaagaaaacaaaactctggttctctctgataaacattcaccacagaaaaaatccactgttaccaatgaggtaaaaacggaagtactgtctccaaattctaaggtggaatccaaatgtgaaactgaaaaaaatgatgagaataaagataatgttgacactccttgctcacaggcttctgctcactcagacctaaatgatggagaaaagacttctttgcatccttgtgatccagatctatttgagaaaagaaccaatcgagaaactgctggccccagtgcaaatgtcattcaggcatccactcaactacctgctcaagatgtaataaactcttgtggcataactggatcaactccagttctctcaagtttacttgctaatgagaaatctgataattcagacattaggccatcggggtctccaccaccaccaactctgccggcctccccatccaatcatgtgtcaagtttgcctcctttcatagcaccgcctggccgtgttttggataatgccatgaattctaatgtgacagtagtctctagggtaaaccatgttttttctcagggtgtgcaggtaaacccagggctcattccaggtcaatcaacagttaaccacagtctggggacaggaaaacctgcaactcaaactgggcctcaaacaagtcagtctggtaccagtagcatgtctggaccccaacagctaatgattcctcaaacattagcacagcagaatagagagaggccccttcttctagaagaacagcctctacttctacaggatcttttggatcaagaaaggcaagaacagcagcagcaaagacagatgcaagccatgattcgtcagcgatcagaaccgttcttccctaatattgattttgatgcaattacagatcctataatgaaagccaaaatggtggcccttaaaggtataaataaagtgatggcacaaaacaatctgggcatgccaccaatggtgatgagcaggttcccttttatgggccaggtggtaactggaacacagaacagtgaaggacagaaccttggaccacaggccattcctcaggatggcagtataacacatcagatttctaggcctaatcctccaaattttggtccaggctttgtcaatgattcacagcgtaagcagtatgaagagtggctccaggagacccaacagctgcttcaaatgcagcagaagtatcttgaagaacaaattggtgctcacagaaaatctaagaaggccctttcagctaaacaacgtactgccaagaaagctgggcgtgaatttccagaggaagatgcagaacaactcaagcatgttactgaacagcaaagcatggttcagaaacagctagaacagattcgtaaacaacagaaagaacatgctgaattgattgaagattatcggatcaaacagcagcagcaatgtgcaatggccccacctaccatgatgcccagtgtccagccccagccacccctaattccaggtgccactccacccaccatgagccaacccacctttcccatggtgccacagcagcttcagcaccagcagcacacaacagttatttctggccatactagccctgttagaatgcccagtttacctggatggcaacccaacagtgctcctgcccacctgcccctcaatcctcctagaattcagcccccaattgcccagttaccaataaaaacttgtacaccagccccagggacagtctcaaatgcaaatccacagagtggaccaccacctcgggtagaatttgatgacaacaatccctttagtgaaagttttcaagaacgggaacgtaaggaacgtttacgagaacagcaagagagacaacgggtccaactcatgcaggaggtagatagacaaagagctttgcagcagaggatggaaatggagcagcatggtatggtgggctctgagataagtagtagtaggacatctgtgtcccagattcccttctacagttccgacttaccttgtgattttatgcaacctctaggaccccttcagcagtctccacaacaccaacagcaaatggggcaggttttacagcagcagaatatacaacaaggatcaattaattcaccctccacccaaactttcatgcagactaatgagcgaaggcaggtaggccctccttcatttgttcctgattcaccatcaatccctgttggaagcccaaatttttcttctgtgaagcagggacatggaaatctttctgggaccagcttccagcagtccccagtgaggccttcttttacacctgctttaccagcagcacctccagtagctaatagcagtctcccatgtggccaagattctactataacccatggacacagttatccgggatcaacccaatcgctcattcagttgtattctgatataatcccagaggaaaaagggaaaaagaaaagaacaagaaagaagaaaagagatgatgatgcagaatccaccaaggctccatcaactccccattcagatataactgccccaccgactccaggcatctcagaaactacctctactcctgcagtgagcacacccagtgagcttcctcaacaagccgaccaagagtcggtggaaccagtcggcccatccactcccaatatggcagcaggccagctatgtacagaattagagaacaaactgcccaatagtgatttctcacaagcaactccaaatcaacagacgtatgcaaattcagaagtagacaagctctccatggaaacccctgccaaaacagaagagataaaactggaaaaggctgagacagagtcctgcccaggccaagaggagcctaaattggaggaacagaatggtagtaaggtagaaggaaacgctgtagcctgtcctgtctcctcagcacagagtcctccccattctgctggggcccctgctgccaaaggagactcagggaatgaacttctgaaacacttgttgaaaaataaaaagtcatcttctcttttgaatcaaaaacctgagggcagtatttgttcagaagatgactgtacaaaggataataaactagttgagaagcagaacccagctgaaggactgcaaactttgggggctcaaatgcaaggtggttttggatgtggcaaccagttgccaaaaacagatggaggaagtgaaaccaagaaacagcgaagcaaacggactcagaagacgggtgagaaagcagcacctcgctcaaagaaaaggaaaaaggacgaagaggagaaacaagctatgtactctagcactgacacgtttacccacttgaaacagctctctctgctccctctaatggaaccaatcattggagtgaactttgcgcactttcttccttatggcagtggccaatttaatagtgggaatcgacttctaggaacttttggcagtgctaccctggaaggggtttcggactactattctcagttgatctacaagcagaataatttaagtaatcctccaacaccccctgcctctcttcctcctacaccacctcctatggcttgtcagaagatggccaatggttttgcaacaactgaagaacttgctggaaaagccggagtgttagtgagccatgaagttaccaaaactctaggacctaaaccatttcagctgcccttcagaccccaggacgacttgttggcccgagctcttgctcagggccccaagacagttgatgtgccagcctccctcccaacaccacctcataacaatcaggaagaattaaggatacaggatcactgtggtgatcgagatactcctgacagttttgttccctcatcctctcctgagagtgtggttggggtagaagtgagcaggtatccagatctgtcattggtcaaggaggagcctccagaaccggtgccgtcccccatcattccaattcttcctagcactgctgggaaaagttcagaatcaagaaggaatgacatcaaaactgagccaggcactttatattttgcgtcaccttttggtccttccccaaatggtcccagatcaggtcttatatctgtagcaattactctgcatcctacagctgctgagaacattagcagtgttgtggctgcattttccgaccttcttcacgtccgaatccctaacagctatgaggttagcagtgctccagatgtcccatccatgggtttggtcagtagccacagaatcaacccgggtttggagtatcgacagcatttacttctccgtgggcctccgccaggatctgcaaaccctcccagattagtgagctcttaccggctgaagcagcctaatgtaccatttcctccaacaagcaatggtctttctggatataaggattctagtcatggtattgcagaaagcgcagcactcagaccacagtggtgttgtcattgtaaagtggttattcttggaagtggtgtgcggaaatctttcaaagatctgacccttttgaacaaggattcccgagaaagcaccaagagggtagagaaggacattgtcttctgtagtaataactgctttattctttattcatcaactgcacaagcgaaaaactcagaaaacaaggaatccattccttcattgccacaatcacctatgagagaaacgccttccaaagcatttcatcagtacagcaacaacatctccactttggatgtgcactgtctcccccagctcccagagaaagcttctccccctgcctcaccacccatcgccttccctcctgcttttgaagcagcccaagtcgaggccaagccagatgagctgaaggtgacagtcaagctgaagcctcggctaagagctgtccatggtgggtttgaagattgcaggccgctcaataaaaaatggagaggaatgaaatggaagaagtggagcattcatattgtaatccctaaggggacatttaaaccaccttgtgaggatgaaatagatgaatttctaaagaaattgggcacttcccttaaacctgatcctgtgcccaaagactatcggaaatgttgcttttgtcatgaagaaggtggtggattgacagatggaccagcaaggctactcaaccttgacttggatctgtgggtccacttgaactgcgctctgtggtccacggaggtctatgagactcaggctggtgccttaataaatgtggagctagctctgaggagaggcctacaaatgaaatgtgtcttctgtcacaagacgggtgccactagtggatgccacagatttcgatgcaccaacatttatcacttcacttgcgccattaaagcacaatgcatgttttttaaggacaaaactatgctttgccccatgcacaaaccaaagggaattcatgagcaagaattaagttactttgcagtcttcaggagggtctatgttcagcgtgatgaggtgcgacagattgctagcatcgtgcaacgaggagaacgggaccatacctttcgcgtgggtagcctcatcttccacacaattggtcagctgcttccacagcagatgcaagcattccattctcctaaagcactcttccctgtgggctatgaagccagccggctgtactggagcactcgctatgccaataggcgctgccgctacctgtgctccattgaggagaaggatgggcgcccagtgtttgtcatcaggattgtggaacaaggccatgaagacctggttctaagtgacatctcacctaaaggtgtctgggataagattttggagcctgtggcatgtgtgagaaaaaagtctgaaatgctccagcttttcccagcgtatttaaaaggagaggatctgtttggcctgaccgtctctgcagtggcacgcatagcggaatcacttcctggggttgaggcatgtgaaaattataccttccgatacggccgaaatcctctcatggaacttcctcttgccgttaaccccacaggttgtgcccgttctgaacctaaaatgagtgcccatgtcaagaggtttgtgttaaggcctcacaccttaaacagcaccagcacctcaaagtcatttcagagcacagtcactggagaactgaacgcaccttatagtaaacagtttgttcactccaagtcatcgcagtaccggaagatgaaaactgaatggaaatccaatgtgtatctggcacggtctcggattcaggggctgggcctgtatgctgctcgagacattgagaaacacaccatggtcattgagtacatcgggactatcattcgaaacgaagtagccaacaggaaagagaagctttatgagtctcagaaccgtggtgtgtacatgttccgcatggataacgaccatgtgattgacgcgacgctcacaggagggcccgcaaggtatatcaaccattcgtgtgcacctaattgtgtggctgaagtggtgacttttgagagaggacacaaaattatcatcagctccagtcggagaatccagaaaggagaagagctctgctatgactataagtttgactttgaagatgaccagcacaagattccgtgtcactgtggagctgtgaactgccggaagtggatgaactgaaatgcattccttgctagctcagcgggcggcttgtccctaggaagaggcgattcaacacaccattggaattttgcagacagaaagagatttttgttttctgttttatgactttttgaaaaagcttctgggagttctgatttcctcagtcctttaggttaaagcagcgccaggaggaagctgacagaagcagcgttcctgaagtggccgaggttaaacggaatcacagaatggtccagcacttttgcttttttttcttttccttttcttttttttttgtttgttttttgttttgtttttcccttgtgggtgggtttcattgttttggttttctagtctcactaaggagaaacttttactggggcaaagagccgatggctgccctgccccgggcaggggccttcctatgaatgtaagactgaaatcaccagcgagggggacagagagtgctggccacggccttattaaaaaggggcaggccctctaacttcaaaatgtttttaaataaagtagacaccactgaacaaggaatgtactgaaatgacttccttagggatagagctaagggataataacttgcactaaatacatttaaatacttgattccatgagtcagtttattgtagtttttgatttctgtaaaataagagaaacttttgtatttattattgaataagtgaatgaagctatttttaaataaagttagaagaaagccaagctgctgctgttacctgcagaactaacaaaccctgttactttgtacagatatgtaaatattttgagaaaaaatacagtataaaaatagttattgaccaaatgctaccaggctctgcagcagctcgggggcttataaaatgttcatagggatgttacaatataattttgtgttataaaatatgccattataattatgtaataaccaaaatttcaacctagagtgttgggggttttttggaaaccgcagtctattagtactcaatggttttatacaccttacttctgacagagcggggcgtatgctacgactacaacttttatagctgttttggtaatttaaactaattttttcatattatattgttgcatccctacttcttcagtcaggtttttttgtgcttacaatttgtgataactgtgaataactgcttaaaaatacacccaaatggaggctgaattttttcttcagcaaaagtagttttgattagaactttgtttcagccacagagaatcatgtaaacgtaataggatcatgtagcagaaacttaaatctaaccctttagccttctatttaacacaaaaatttgaaaaaaaaaaaaaaaaaaaggagatgtgattatgcttacagctgcaggactctggcaatagggtttttggaagatgtaattttaaaatgtgtttgtatgaactgtttgtttacatttctttaataaaaaaaacactgttttgtgtttgcttgtagaaacttaatcagcattttgaaccaggttagctttttattttgtacttaaaattctggtactgacacttcacaggctaagtataaaatgaagttttgtgtgcacaattcaagtggactgtaaactgttggtatattcagtgatgcagttctgaacttgtatatggcatgatgtatttttatcttacagaataaatcaattgtatatatttttctcttgataaatagctgtatgaaatttgtttcctgaatatttttcttctcttgtacaatatcctgacatcctaccagtatttgtcctaccgggtttttgttgttttctgttctgtataatagtatctaatgttggcaaaaattgaattttttgaagtatacagagtgttatgggttttggaatttgtggacacagatttagaagatcaccatttacaaataaaatattttacatctataaaaaaaaccactaccctaaaaaaaaaactcgagggggggccccggaccaaattcgccctttgtggagtcgattacaattaactgggccgcgtttaaaacgtcttgactgggaaa

SEQ ID NO: 24294 - DNA, 5438 bp, Homo sapiens
  misc_feature 1, 2, 3, 4, 5437, 5438: n = A,T,C or G
nnnnaaatgttatcgttccatataaaaccatcgaagggactgccagaggtggaggggaggattttgaggacacttgtggagagctcgaattccagaatgatgaaattgttaggttgtgacagttggaagtgtcatgtacaacatgcggcgattaagtctttcacccaccttttcaatgggatttcatctgttagttactgtgagtctcttattttcccatgtggaccatgtaattgctgagacagaaatggaaggagaaggaaatgaaactggtgaatgtactggatcatattactgtaagaaaggggtgattttgcccatttgggaaccccaagacccttcttttggggacaaaattgctagagctactgtgtattttgtggccatggtctacatgtttcttggagtctctatcatagctgatcggttcatgtcctctatagaagtcatcacatctcaagaaaaagaaataaccataaagaaacccaatggagagaccaccaagacaactgtgaggatctggaatgaaacagtttctaacctgaccttgatggccctgggatcttctgctcctgagattctcctttcagtaattgaagtgtgtggccataacttcactgcaggagacctcggtcctagcaccatcgtgggaagtgctgcattcaatatgttcatcattattgcactctgtgtttatgtggtgcctgacggagagacaaggaagattaagcatttgcgtgtcttctttgtgacagcagcctggagcatctttgcctacacctggctttacattattttgtctgtcatatctcctggtgttgtggaggtctgggaaggtttgcttactttcttcttctttcccatctgtgttgtgttcgcttgggtagcggataggagacttctgttttacaagtatgtctacaagaggtatcgagctggcaagcagagggggatgattattgaacatgaaggagacaggccatcttctaagactgaaattgaaatggacgggaaagtggtcaattctcatgttgaaaatttcttagatggtgctctggttctggaggtggatgagagggaccaagatgatgaagaagctaggcgagaaatggctaggattctgaaggaacttaagcagaagcatccagataaagaaatagagcaattaatagaattagctaactaccaagtcctaagtcagcagcaaaaaagtagagcattttatcgcattcaagctactcgcctcatgactggagctggcaacattttaaagaggcatgcagctgaccaagcaaggaaggctgtcagcatgcacgaggtcaacactgaagtgactgaaaatgaccctgttagtaagatcttctttgaacaagggacatatcagtgtctggagaactgtggtactgtggcccttaccattatccgcagaggtggtgatttgactaacactgtgtttgttgacttcagaacagaggatggcacagcaaatgctgggtctgattatgaatttactgaaggaactgtggtgtttaagcctggtgatacccagaaggaaatcagagtgggtatcatagatgatgatatctttgaggaggatgaaaatttccttgtgcatctcagcaatgtcaaagtatcttctgaagcttcagaagatggcatactggaagccaatcatgtttctacacttgcttgcctcggatctccctccactgccactgtaactatttttgatgatgaccacgcaggcatttttacttttgaggaacctgtgactcatgtgagtgagagcattggcatcatggaggtgaaagtattgagaacatctggagctcgaggaaatgttatcgttccatataaaaccatcgaagggactgccagaggtggaggggaggattttgaggacacttgtggagagctcgaattccagaatgatgaaattgtcaaaacaatatcagtcaaggtaattgatgatgaggagtatgagaaaaacaagaccttcttccttgagattggagagccccgcctggtggagatgagtgagaagaaagccctgttattgaatgagcttggtggcttcacaataacaggaaaatacctgtttggccaacctgtcttcaggaaggttcatgctagagaacatccgattctctctactgtaatcaccattgcagacgaatatgatgacaagcagccactgaccagcaaagaggaagaggagaggcgcattgcagaaatggggcgccccatcctgggagagcacaccaagttggaagtgatcattgaagaatcctatgaattcaagagtactgtggacaaactcattaagaagacaaacctggcccttgtggttgggactaacagctggagagaacagttcattgaagctatcactgtcagtgctggggaagatgatgacgacgatgaatgtggggaagagaagctgccctcctgtttcgattacgtgatgcactttctgactgtgttctggaaggtcctgtttgccttcgtcccccctactgaatactggaatggctgggcgtgtttcattgtctccatcctcatgattggcctactgacagctttcattggagacctggcttcccactttggctgcaccattggcctgaaagattctgtgactgcagtcgtgttcgtcgcacttggaacatcagtgccagacacatttgccagcaaagtggcagccacccaggaccagtatgcagacgcctccataggtaacgtcacgggcagcaacgcggtgaatgtcttcctgggaatcggtgtggcctggtccatcgctgccatctaccacgcagccaatggggaacagttcaaagtgtcccctggcacactagctttctctgtcactctcttcaccatttttgctttcatcaatgtgggggtgctgctgtatcggcggaggccagaaatcggaggtgagctgggtgggccccggactgccaagctcctcacatcctgcctctttgtgctcctatggctcttgtacattttcttctcctccctggaggcctactgccacataaaaggcttctaaaggaactatcagatatagtaaatttatatatatacatatatatacataaaaattatgtataatggacagaggaaactgacatttgtcatgttcacttacctgctgatggaatccagcttcaagagcatactctgtactagggccgaagtaaaaaaccatcacctcccattcccaggggcatcatcatgttcaacaaggcatggaggcagggccatctttgcagctcagtctagaagggctgcactctctccaggttgataaatccttaaggctttgatttgttttgtttttggttttgttttcagtggagctggggaggtagttaatgtttggctttatttttgttattttgttttgttttgtttttttgggagagtcagggttgttgcttttctttgtggaaagtgaaaccatccaaatgtaaatgggttttggtaaaaatttaaatcattagtattccccctcacctcccccaatcactttaaaacttattttggattaagaaaaaatctgggcatggaagaagaaagaagcatgtcttcatcgtattaccaaagttcatgcttatctccggaatgtgagtggaggtgaagctgcctccaagaagaagcataaaagtggaatggagccaggaaatccgatggttctagaaatagtctgatatttaaacatgtgatacctggcagtctcgtttaacaggtacaaggaaaacgtgcctagattcccaggaacatgcaaaatcctttctttcttatctctttagctctggactgtgattggcaaggtccttcttccagcattcagcccagctaagcccccaggtgccccatcccaaccctgttcctcctgtccacctgccatcccctatgcaaacagtaagaataaccccattcaaaaagcacatcatcgttttccatttgcattaacatgtgtctcagtcccatgttgccgttgcttgggattgtctgtcagttttattttcaaaggcatccatggcttgcacaatcctgttccagtcatgactgaacatttgctccttcttcatgtgccgttcggaaatgttgttgtgatacctgttacacagtgcatggtgaaaaacaaataaaacaaaacaaagagtatctgtatatagtagagtatagtacatactgttctcccatttggcaatgttgattggacattgaagacataagtgagttttcttttcacctgagttgttacttttgtgctgttattgagtttgattaattactagggataaaaggagaaaatggattattgttcacggttctgcacattcatttctaagaagcaataactgtcatgtggggagaagttaaagctattgagaggatagcaggcaaactacaaagatcttcatggaaaattagccatgtggaacacatcagaggcctctaaaaatcacccattaattcaggaaggccaaggagaaaggccttatagagacgttgatatgttggatgtgcctaggctttcagagccaccctttccacaacacccctccctgcaaagtatttatttcacatctgcactgtctggcacagatggtagatagtgctggtttgttcattttatttttttacttaaaaggctattttgagccctgtttctttcactgtccagtctagtcctctttgattatatcagtagttgctgagtaagaaagaagccagggtgaccaacgggcctttaaaagtgtgtctcctctacttatgctgaaagagaaggcaattaaataagactagtacctcccaggaggattggactgggatatttttaaccctttaaaaagaatagctgtttctatgttaaaataccaaagaacatggataaacccaacattccaaagtagtgagtccactaatgagaaaaataatagaatgactttggtcacctctcggagacttctgtgtctataaggaatcccaggctggagacattcctagccctctgtattgattcaaaaatacttaataaattaaagctgttgagacttatttattcttctgtcactcagtaaaccatgaatccttcctcatttaatacaccattggtgactgaatgagtacttaactgactggtaaccacttaatgtggccaggtagtatgatacttctggggaccaagacccagacacaaccagctagatcctggcctcagaaggggccagggcacgggagtcaaataccgtgagtacagggaacaagccaatgtgacgatagacactggagacaacacaccgtcggaaccctgtgaagatatacacggcaccggatcacgcacaggcccacggatatcgccagaaagcaaccagacacgcacaggatgtatggaaaacccgcaaatgaggcgaacaagcann

SEQ ID NO: 24295 - DNA, 1782 bp, Homo sapiens; identical to SEQ ID NO: 21380
  misc_feature 1766, 1767, 1768, 1769, 1770, 1771, 1772, 1773, 1774, 1775,1776, 1777, 1778, 1779, 1780, 1781, 1782: n = A,T,C or G

SEQ ID NO: 24296 - DNA, 1013 bp, Homo sapiens
  misc_feature 1, 2, 1008, 1009, 1010, 1011, 1012, 1013: n = A,T,C or G
nnagctgtttcctgtgtaggaaaagaacggccacacctcgggggcttccttcttgcctagtacacaaatgcatgagtatgtttatacagtgttagactgatgtgaatttgcatttgttacattacattgccagcgcatatcatttagcaagttggcattaacatttatgctttaattaaatgccagtatacctatgtgtgcagcagtaaaaaattagtgagaaaaagcaactttttgtcactcttaggaaatattttgtcttattagtgttcttggcacatgtatattactaaagtagataattccaatgagaaatactaccagattattgttataaaattaatttacaatgtccctgatattgagctaactcttaaaaaaaccaaacaaaactcgtatctgagtgtaactttgccaatattttaaaagccaaaatattctctggacaacaaatttgtattgctcagggacagtttaccttgcctggtaaaccttcccaaacagaaatatagctatactatctttggttttgtttttttgttttttttgtttgtttgtattagatggaatttcactcttgtcgcccaggctggagtgtagtggcgcagtctcagctcactgcaacctccacctcccgggttcaagtgattctcctgtctcagctccctgagtaactggaattacaggtgcacgccaccacgcccggctaatttttgtgtttttagcagagacaggggtttcacccacgttggccagggtgggtcttggactcctgacctcaggtcattcctcctgcctcggcctcccaaagtgctgagactacgggtgtgagcccaacgtgctcagccactacctttgggtttttaaacatggatatattcctcaaggagggttaaattccaggtccaatgtaacccgctttggaggacgctcaataacggcggaggccggggcccctatgggtggtctaaccgttttcccagtcgctctcttgcccaacaatgtcannnnnn

SEQ ID NO: 24297 - DNA, 1719 bp, Homo sapiens
agtcgacccacgcgtccgggccttcggtggtgaacgagtctccagcaccatgtctggtttgtctggcccaccagcccggcgcggcccttttccgttagcgttgctgcttttgttcctgctcggccccagattggtccttgccatctccttccatctgcccattaactctcgcaagtgcctccgtgaggagattcacaaggacctgctagtgactggcgcgtacgagatctccgaccagtctgggggcgctggcggcctgcgcagccacctcaagatcacagattctgctggccatattctctactccaaagaggatgcaaccaaggggaaatttgcctttaccactgaagattatgacatgtttgaagtgtgttttgagagcaagggaacagggcggatacctgaccaactcgtgatcctagacatgaagcatggagtggaggcgaaaaattacgaagagattgcaaaagttgagaagctcaaaccattagaggtagagctgcgacgcctagaagacctttcagaatctattgttaatgattttgcctacatgaagaagagagaagaggagatgcgtgataccaacgagtcaacaaacactcgggtcctatacttcagcatcttttcaatgttctgtctcattggactagctacctggcaggtcttctacctgcgacgcttcttcaaggccaagaaattgattgagtaatgaatgaggcatattctcctcccaccttgtacctcagccagcagaacatcgctgggacgtgcctggcctaaggcatcctaccaacagcaccatcaaggcacgttggagctttcttgccagaactgatctcttttggtgtgggaggacatggggtaccacctacacccaacaagtcaatgagggacttctttttaatttggtaggattttgactggttttgcaacaataggtctattattagagtcacctatgacaaaaaataggggttacctagataatgccaaagtcagcatttgtcctgggttcccttgtgtgatctgtttggactatgttttcttttcttctcccacttgctcagcagcttgggcttccattctagttcttttaccaagatttttgtgtgaccatgttgacttcatttggattgccctctttcaatttccttgtgaaaacacccttaactttctctttacccttagctgaaatgtttacatagcttctggtgatatcttttcatgattttatatctcttaaaatggtgatggatgtgacacctcataaaagtgagctttgaactgtagataactcttaaagaaaatgtcattttagacaattaaaatatttgtgctcaactgcttgaacttttttcgtgtatgtgtatttaattctatgcaatattatcacatgtgtagattcatgtgaccaccatcacaagagacagaacagttctgtcacatggatcccttgcactgcccttttacagccgcagccacatccctttcttataccctcaccccaacctgtggctaccactgttctgtcctccatctctgtaattttgtcatttcaagaatgttgtatgaatggaatcatacagaatgtaatcttacgaggctgatcttttttcattcagcataattcccttgaaatccatccaagttgttgcatgtatgaatagtttcttcctttttttcttttaaaaatgttttatatatttggggggtataagt

SEQ ID NO: 24298 - DNA, 2670 bp, Homo sapiens; identical to SEQ ID NO: 24256
  misc_feature 1, 2, 3, 4, 5, 6, 7, 8, 9, 10, 11, 12, 13, 14, 15, 16, 17,18, 19, 20, 21, 22, 23, 24, 2643, 2659, 2660, 2661, 2662,2663, 2664, 2665, 2666, 2667, 2668, 2669, 2670: n = A,T,C or G

SEQ ID NO: 24299 - DNA, 5065 bp, Homo sapiens
  misc_feature 1, 2, 3, 4, 4719, 5064, 5065: n = A,T,C or G
nnnnccgcgtcgacgcggaaaagaggccgtggggggcctcccagcgctggcagacaccgtgaggctggcagccgccggcacgcacacctagtccgcagtcccgaggaacatgtccgcagccagggcgcggagcagagtcccgggcaggagaaccaagggagggcgtgtgctgtggcggcggcggcagcggcagcggagccgctagtcccctccctcctgggggagcagctgccgccgctgccgccgccgccaccaccatcagcgcgcggggcccggccagagcgagccgggcgagcggcgcgctagggggagggcgggggcggggaggggggtgggcgaagggggcgggagggcgtggggggagggtctcgctctcccgactaccagagcccgagggagaccctggcggcggcggcggcgcctgacactcggcgcctcctgccgtgctccggggcggcatgtccgaggctggcggggccgggccgggcggctgcggggcaggagccggggcaggggccgggcccggggcgctgcccccgcagcctgcggcgcttccgcccgcgcccccgcagggctccccctgcgccgctgccgccgggggctcgggcgcctgcggtccggcgacggcagtggctgcagcgggcacggccgaaggaccgggaggcggtggctcggcccgaatcgccgtgaagaaagcgcaactacgctccgctccgcgggccaagaaactggagaaactcggagtgtactccgcctgcaaggccgaggagtcttgtaaatgtaatggctggaaaaaccctaacccctcacccactccccccagagccgacctgcagcaaataattgtcagtctaacagaatcctgtcggagttgtagccatgccctagctgctcatgtttcccacctggagaatgtgtcagaggaagaaatgaacagactcctgggaatagtattggatgtggaatatctctttacctgtgtccacaaggaagaagatgcagataccaaacaagtttatttctatctatttaagctcttgagaaagtctattttacaaagaggaaaacctgtggttgaaggctctttggaaaagaaacccccatttgaaaaacctagcattgaacagggtgtgaataactttgtgcagtacaaatttagtcacctgccagcaaaagaaaggcaaacaatagttgagttggcaaaaatgttcctaaaccgcatcaactattggcatctggaggcaccatctcaacgaagactgcgatctcccaatgatgatatttctggatacaaagagaactacacaaggtggctgtgttactgcaacgtgccacagttctgcgacagtctacctcggtacgaaaccacacaggtgtttgggagaacattgcttcgctcggtcttcactgttatgaggcgacaactcctggaacaagcaagacaggaaaaagataaactgcctcttgaaaaacgaactctaatcctcactcatttcccaaaatttctgtccatgctagaagaagaagtatatagtcaaaactctcccatctgggatcaggattttctctcagcctcttccagaaccagccagctaggcatccaaacagttatcaatccacctcctgtggctgggacaatttcatacaattcaacctcatcttcccttgagcagccaaacgcagggagcagcagtcctgcctgcaaagcctcttctggacttgaggcaaacccaggagaaaagaggaaaatgactgattctcatgttctggaggaggccaagaaaccccgagttatgggggatattccgatggaattaatcaacgaggttatgtctaccatcacggaccctgcagcaatgcttggaccagagaccaattttctgtcagcacactcggccagggatgaggcggcaaggttggaagagcgcaggggtgtaattgaatttcacgtggttggcaattccctcaaccagaaaccaaacaagaagatcctgatgtggctggttggcctacagaacgttttctcccaccagctgccccgaatgccaaaagaatacatcacacggctcgtctttgacccgaaacacaaaacccttgctttaattaaagatggccgtgttattggtggtatctgtttccgtatgttcccatctcaaggattcacagagattgtcttctgtgctgtaacctcaaatgagcaagtcaagggctatggaacacacctgatgaatcatttgaaagaatatcacataaagcatgacatcctgaacttcctcacatatgcagatgaatatgcaattggatactttaagaaacagggtttctccaaagaaattaaaatacctaaaaccaaatatgttggctatatcaaggattatgaaggagccactttaatgggatgtgagctaaatccacggatcccgtacacagaattttctgtcatcattaaaaagcagaaggagataattaaaaaactgattgaaagaaaacaggcacaaattcgaaaagtttaccctggactttcatgttttaaagatggagttcgacagattcctatagaaagcattcctggaattagagagacaggctggaaaccgagtggaaaagagaaaagtaaagagcccagagaccctgaccagctttacagcacgctcaagagcatcctccagcaggtgaagagccatcaaagcgcttggcccttcatggaacctgtgaagagaacagaagctccaggatattatgaagttataaggttccccatggatctgaaaaccatgagtgaacgcctcaagaataggtactacgtgtctaagaaattattcatggcagacttacagcgagtctttaccaattgcaaagagtacaacccccctgagagtgaatactacaaatgtgccaatatcctggagaaattcttcttcagtaaaattaaggaagctggattaattgacaagtgattttttttcccctctgcttcttagaaactcaccaagcagtgtgcctaaagcaaggtggtttagttttttacaaagaattggacatgatgtattgaagagacttgtaaatgtaataattagcacttttgaaaaaacaaaaaacctccttttagcttttcagatatgtatttaaattgaagtcataggacatttttattttatggaatagattttaatctatttactactattaaggtaaattttctatggcatgtccattagctatttcatgatagatgattaggggtttcctcaaaacctgtgtgtgaggaaattgcacacagtagcaaaatttggggaaatccataacattttcagaccatgaatgaatgtttccatttttttctaatggaatgtgagagtttacttttattttattctgaaggactttaaggaagggatacatgattttaaaaaagcctgtaagaggtgaaatatgtgatgtttgaagtctctttatagactttttatatatattttttaaaacactcatctagatgaggtgctttgagcagttctgaaaaatgcagttccaggaaagcaactgctttggttcctaaggaagaaattctaaataatgcaaacttttaaaataagcatctaggtttttgataattctgtctacttacaacaaacttgttagtacataaccactattttaataattattttctctacacaaatgtgtaatatcatatttgactttgcttatgcaggccataagttccaaaagataatttccctgcccacaaaggcataaacttgaaaacacatgagattgaatcaacatgctttaataggaaaagatgtatggtctatatatgtatcaatctggtgaatcctcgttctaataaaggttctttttcttttctatgatacacacagccacgctgataatatgcaaatgaacattttcctttatgtctctccagataatgtttattgtctgaggtaaattaaattcccaccagggtttgctgtcagtattttaacacccacattagtatatgcgtccagggtcataaccccctaaaatccatcatgcaaccttattaatctgtcttgggattccagtttagtgcttggatttatttcctgattacactacatagaaaagtgagacatctgccattcccaactctgggaaaaccaactaatatacaaccatataaatgaaggccatcttgatggtctcaacactaatttttatgatgcaaatttatacactgatttttgtaaaggacaaagttttaaaagcgtatttaacttgatgttttctatcagcataaataaaatggtcatgaatagtcattaaaaacagttgccagtgataatctgcatgaaggaaaaagaaccctgcaaatggctattgagttggaagtattgtttttgatatgtaagagatattcagaatgctcacactgaaaatgcctcaactttttaaagtgtaagaaaccaccatgagtggtgtctagatttctaatgaagaatcatgatacagtttggattaagtatcttggactggttttaaacagtgctttgtaccggatctgctgaagcatctgtccagctggtatcctgtgaaagtttgttattttctgagtagacattcttatagagtattgtctttaaaaatcagattgtctcttcaatattggacagcatgtaaggtgcctacattaacgagttaatactaccgtcatagactttggtgccagcaacncggacgttcaacgggcgcggcttggcaagcgttaccacacgcatagaaattacactgggtgatccccacatcaatggggccgggaccacagacattcgcaccctacttttacagcgtccgaagaaaatcagagagacaaaaaatggttgacgcgggaaacagacaaaaaaatttacacgacgttgggggcgccaccacaaaaacgtgatactcgtcctgcagcccccactgcgacgagccaccaacaaccaagcagacgtcaaactatgggggatgagtacgcacacactgctacgtgacgtaccactactgccagcgcagcactagctcacgcatcatggggann

SEQ ID NO: 24300 - DNA, 1782 bp, Homo sapiens; identical to SEQ ID NO: 21380
  misc_feature 1766, 1767, 1768, 1769, 1770, 1771, 1772, 1773, 1774, 1775,1776, 1777, 1778, 1779, 1780, 1781, 1782: n = A,T,C or G

SEQ ID NO: 24301 - DNA, 2055 bp, Homo sapiens
  misc_feature 1, 2: n = A,T,C or G
nnatcccccgggcggcaggaattcggcaccagagaaagtcagaaggtcacaaagcttgcagggtaagtgacacaacttgaaactgcttggccctctttaaaaagaaataataaaatgggagagaatgaagcaagtttacctaacacgtctttgcaaggtaaaaagatggcctatcagaaggtccatgcagatcaaagagctccaggacactcacagtacttagacaatgatgaccttcaagccactgcccttgacttagagtgggacatggagaaggaactagaggagtctggttttgaccaattccagctagacggtgctgagaatcagaacctagggcattcagagactatagacctcaatcttgattccattcaaccagcaacttcacccaaaggaaggttccagagacttcaagaagaatctgactacattacccattatacacgatctgcaccaaagagcaatcgctgcaacttttgccacgtcttaaaaatactttgcacagccaccattttatttatttttgggattttgataggttattatgtacatacaaattgcccttcagatgctccatcttcaggaacagttgatcctcagttatatcaagagattctcaagacaatccaggcagaagatattaagaagtctttcagaaatttggtacaactatataaaaatgaagatgacatggaaatttcaaagaagattaagactcagtggacctctttgggcctagaagatgtacagtttgtaaattactctgtgctgcttgatctgccaggcccttctcccagcactgtgactctgagcagcagtggtcaatgctttcatcctaatggccagccttgcagtgaagaagccagaaaagatagcagccaagacctgctctattcatatgcagcctattctgccaaaggaactctcaaggctgaagtcatcgatgtgagttatggaatggcagatgatttaaaaaggattaggaaaataaaaaacgtaacaaatcagatcgcactcctgaaattaggaaaattgccactgctttataagctttcctcattggaaaaggctggatttggaggtgttcttctgtatatcgatccttgtgatttgccaaagactgtgaatcctagccatgataccttcatggtgtcactgaatccaggaggagacccttctacgcctggttacccaagtgtcgatgaaagttttagacaaagccgatcaaacctcacctctctattagtgcagcccatctctgcatccctcgttgcaaaactgatctcttcgccaaaagctagaaccaaaaatgaagcgtgtagctctctagagcttccaaataatgaaataagagtcgtcagcatgcaagttcagacagtcacaaaattgaaaacagttactaatgttgttggatttgtaatgggcttgacatccccagaccggtatatcatagttggcagcatcatcacactgcacacagttataatggacaagaatgggccagtagtactgcaataatcacagcgtttatccgtgccttgatgtcaaaagttaagagagggtggagaccagaccgaactattgttttctgttcttggggaggaacagcttttggcaatattggctcatatgaatggggagaggatttcaagaaggttcttcaaaaaaatgttgtggcttatattagcctccacagtcccataagggggaactctagtctgtatcctgtagcatcaccatctcttcagcaactggtagtagagaaaaataatttcaactgtaccagaagagcccagtgcccagaaaccaatatcagttctatacagatacaaggtgatgctgattatttcatcaaccatcttggagttcccatcgtgcagtttgcttacgaggacatcaaaacattagagggtccaagttttctctccgaggcccgtttttctacacgagcaacaaaaattgaagaaatggatcgctctttcaaccttcatgaaactattactaagctctcaggagaagtgattttgcaaattgccaacaaaccgaattcca

SEQ ID NO: 24302 - DNA, 622 bp, Homo sapiens; identical to SEQ ID NO: 24169
  misc_feature 620, 621, 622: n = A,T,C or G

SEQ ID NO: 24303 - DNA, 786 bp, Homo sapiens; identical to SEQ ID NO: 20840
  misc_feature 783, 784, 785, 786: n = A,T,C or G

SEQ ID NO: 24304 - DNA, 1191 bp, Homo sapiens
  misc_feature 1187, 1188, 1189, 1190, 1191: n = A,T,C or G
acatggagaataggcatatagccactaggctacatgaacacgtcacgtttgtagcctgagccggcctattagctgggattactggcgcgtgccactgcgtccggctaatttttgtattcttagacaaggcgcatcacacaaaaggcaccaagacgtgaaactttttaaaccaaaaggacgaagaaaaaacaccttccgtcgacttttttttctaataaagacatgggtactttattttcaaaacactcatatgttgcaaaaaacacatagaaaaataaagtttggtgggggtgctgactaaacttcaagtcacagacttttatgtgacagattggagcagggtttgttatgcatgtagagaacccaaactaatttattaaacaggatagaaacaggctgtctgggtgaaatggttctgagaaccatccaattcacctgtcagatgctgatagactagctcttcagatgtttttctaccagttcagagatgggttaatgactagttccaatggggaaaaagcaagatggattcacaaaccaagtaattttaaacaaagacacttttttttttttgcaacacaatatacatcacagtgaaatgtgtaatccttgcaaattgcaagttgaaagaattaaattcagaggaggggagagaaagagtacaacagggaacattgcacctggtaactgattatcaacctgaagccagtacaacctggcccttaaacttctctggtgagaagactgcttaaattcaatctgaattcctgataaaaagtctcgtttaatagggctacggatagggaggcgcatttccattggatctttatcaaaattgacctcaaaattattatctagcttaatccagccatggtctcttgatatttgatgtttctgataggattgttccaataagattatctgcttttgactaaatggcttccatttctgctttggtttcacctcccaaacaacaccagaactggttatcccaatataggaaacttcctgcttgctttcattgttaaccagtgaaagcccaagactgtggagagacaaggttatttcataatcagcctgttccatttcttctgcctgcagtgctttggaaaccaaggcaacatcttcgcggaaaagcaaactctctggcgcccatccagaaatgatacccagctgtatctggatgnnnnn

SEQ ID NO: 24305 - DNA, 1214 bp, Homo sapiens; identical to SEQ ID NO: 20119

SEQ ID NO: 24306 - DNA, 561 bp, Homo sapiens
  misc_feature 1: n = A,T,C or G
ncagtttgtctcatcacgttagcagagcctattcatgcaatttagaaaggatttcaatacagcccaaaccaaaaggcttacagtcaacagagggtaagccttccataaatgagaaatccaaaaaagaataatgccacgtatttcaggaatgtcggttagaggtttggccttcttgggaagtgtcacaatgctgagtctaaaactgcaacagttaccgtgtccaagtcatgcaactctaaaggaggatggacggccacatttgtgtccttcagtatcaaagcacctttaagggcttccattttgagaaagtagtattttctcttccttctcttttagaacatatgataaaatactgcccttctatcctttaaccatgtatccattttttttttgatggggagtaaggggtacaaaaaggctggatcaggtgcaacaccaccataaggaagagtggattcggtggcatcactatgctcttcacaggatattcgtcctgtgttgtagctggagtttcagacgtctgaaaaaattgtgccgacccctgccctggaagagcacagt

SEQ ID NO: 24307 - DNA, 7652 bp, Homo sapiens
  misc_feature 1, 2, 3, 4, 5, 6, 7, 7649, 7650, 7651, 7652: n = A,T,C or G
nnnnnnngtgacacatcacacagaattggagtgctgtccttctggagagtggtggagaaccaagatacagttcagaaccaaaggaatagagaagggctttgatttctttttggctttagattggggatttgggaggcttagcaggaaagatgtccactgaaaatgtggaagggaagcccagtaaccttggggagagaggaagagcccggagctccactttcctcagggttgtccagccaatgtttaaccacagtattttcacttctgcagtctctcctgctgcagaacgcatccgattcatcttgggagaggaggatgacagcccagctccccctcagctcttcacggaactggatgagctgctggccgtggatgggcaggagatggagtggaaggaaacagccaggtggatcaagtttgaagaaaaagtggaacagggtggggaaagatggagcaagccccatgtggccacattgtcccttcatagtttatttgagctgaggacatgtatggagaaaggatccatcatgcttgatcgggaggcttcttctctcccacagttggtggagatgattgttgaccatcagattgagacaggcctattgaaacctgaacttaaggataaggtgacctatactttgctccggaagcaccggcatcaaaccaagaaatccaaccttcggtccctggctgacattgggaagacagtctccagtgcaagtaggatgtttaccaaccctgataatggtagcccagccatgacccataggaatctgacttcctccagtctgaatgacatttctgataaaccggagaaggaccagctgaagaataagttcatgaaaaaattgccacgtgatgcagaagcttccaacgtgcttgttggggaggttgactttttggatactcctttcattgcctttgttaggctacagcaggctgtcatgctgggtgccctgactgaagttcctgtgcccacaaggttcttgttcattctcttaggtcctaaggggaaagccaagtcctaccacgagattggcagagccattgccaccctgatgtctgatgaggtgttccatgacattgcttataaagcaaaagacaggcacgacctgattgctggtattgatgagttcctagatgaagtcatcgtccttccacctggggaatgggatccagcaattaggatagagcctcctaagagtcttccatcctctgacaaaagaaagaatatgtactcaggtggagagaatgttcagatgaatggggatacgccccatgatggaggtcacggaggaggaggacatggggattgtgaagaattgcagcgaactggacggttctgtggtggactaattaaagacataaagaggaaagcgccattttttgccagtgatttttatgatgctttaaatattcaagctctttcggcaattctcttcatttatctggcaactgtaactaatgctatcacttttggaggactgcttggggatgccactgacaacatgcagggcgtgttggagagtttcctgggcactgctgtctctggagccatcttttgcctttttgctggtcaaccactcactattctgagcagcaccggacctgtcctagtttttgagaggcttctatttaatttcagcaaggacaataattttgactatttggagtttcgcctttggattggcctgtggtccgccttcctatgtctcattttggtagccactgatgccagcttcttggttcaatacttcacacgtttcacggaggagggcttttcctctctgattagcttcatctttatctatgatgctttcaagaagatgatcaagcttgcagattactaccccatcaactccaacttcaaagtgggctacaacactctcttttcctgtacctgtgtgccacctgacccagctaatatctcaatatctaatgacaccacactggccccagagtatttgccaactatgtcttctactgacatgtaccataatactacctttgactgggcatttttgtcgaagaaggagtgttcaaaatacggaggaaaccttgtcgggaacaactgtaattttgttcctgatatcacactcatgtcttttatcctcttcttgggaacctacacctcttccatggctctgaaaaaattcaaaactagtccttattttccaaccacagcaagaaaactgatcagtgattttgccattatcttgtccattctcatcttttgtgtaatagatgccctagtaggcgtggacaccccaaaactaattgtgccaagtgagttcaagccaacaagtccaaaccgaggttggttcgttccaccgtttggagaaaacccctggtgggtgtgccttgctgctgctatcccggctttgttggtcactatactgattttcatggaccaacaaattacagctgtgattgtaaacaggaaagaacataaactcaagaaaggagcagggtatcacttggatctcttttgggtggccatcctcatggttatatgctccctcatggctcttccgtggtatgtagctgctacggtcatctccattgctcacatcgacagtttgaagatggagacagagacttctgcacctggagaacaaccaaagtttctaggagtgagggaacaaagagtcactggaacccttgtgtttattctgactggtctgtcagtctttatggctcccatcttgaagtttatacccatgcctgtactctatggtgtgttcctgtatatgggagtagcatcccttaatggtgtgcagttcatggatcgtctgaagctgcttctgatgcctctgaagcatcagcctgacttcatctacctgcgtcatgttcctctgcgcagagtccacctgttcactttcctgcaggtgttgtgtctggccctgctttggatcctcaagtcaacggtggctgctatcatttttccagtaatgatcttggcacttgtagctgtcagaaaaggcatggactacctcttctcccagcatgacctcagcttcctggatgatgtcattccagaaaaggacaagaaaaagaaggaggatgagaagaaaaagaaaaagaagaagggaagtctggacagtgacaatgatgattctgactgcccatactcagaaaaagttccaagtattaaaattccaatggacatcatggaacagcaacctttcctaagcgatagcaaaccttctgacagagaaagatcaccaacattccttgaacgccacacatcatgctgataaaattcctttccttcagtcactcggtatgccaagtcctcctagaactccagtaaaagttgtgcctcaaattagactagaacttgaacctgaagacaatgattatttctggaggagcaagggaacagaaactacattgtaacctgtttgtctttcttaaaactgacatttgttgttaatgtcatttgtttttgtttggctgtttgtttattttttaacttttatttcgtctcagtttttggtcacaggccaaataatacagcgctctctctgcttctctcttgcatagatacaatcaagacaatagtgcaccgttccttaaaaacagcatctgaggaatcccccttttgttcttaaactttcagatgtgtcctttgataaccaaattctgtcactcaagacacagacacccacagaccctgtcctttgcctctattaagcagaggatggaagtattaaggattttgtaacaccttttatgaaaatgttgaaggaacttaaaactttagctttggagctgtgcttactggcttgtctttgtctggtagaacaaaccttgacctccagacagagtcccttctcacttatagagctctccaggactggaaaaagtgctgctattttaacttgctcttgcttgtaaatcctaatcttagagttatcaaaagaagaaaaaactgaaggtactttactccctatagagaaaccattgccatcattgtagcaagtgctggaatgtcccttttttcctatgcaacttttttataaccctttaatgaacttatctgtggagtacattgaagaatatttttcttcctagattttgttgtttaaattatggggcctaacctgccacttattttttgtcaatttttaaaacttttttttaattactgtaaagaaaatgaattttttcctgcagcaggaaacatagttttgagtagttctacctcttatttgtagctgccaggctttctgtaaaaattgtattgtatataatgtgatttttacacatacatacacacacaaatacacaatctctagggtaagccagaaggcaagatcagattaaaaacaccatgtttctaagcatccatttttccctttctttaaaagaaacttaactgttctatgaaggagattgagggagaagagacaaactcctatgtcatgagaataaccgatgttctgataatagtagcatctaggtacagatgctggttgtattaccacgtcaatgtcctatgcagtattgttagacattttctcattttgaaatatttgtgtgtttgtgtatgtgctctgtgccatggctggtgtatatatgtgcaatgttagaaggcaaaagagtgatggtaggcagagggcaaagtcattgaatctcttatgccagttttcataaaacccaaaccacatatgaaaaaatccattaagggtccaagaagtctgtccatatgaaaatgagggtaaatatagtttatttcccaggtatcagtcattataattgatataatagctctaacatgcaatataaaattcataggagtattaatagcccatttacacatctataaaatgtaatgggattgcagagctgcagagtacagtgtaacagtactctcatgcaatttttttcaggatgcaaaggcaattattctttgtaagcgggacatttagaatatatttgtgtacatattatatgtatgtatatttcaaagtaccacactgaaaattagacatttattaaccaaatttaacgtggtatttaaaggtaatatttttaatatgatacattacatattgtgaatgtatactaaaaaaacattttaaatgttaaaattataatttcagattcatataaccacaactgtgatatatcctaactataaccagttgttgaggggtatactagaagcagaatgaaaccacattttttggtttgataatatgcacttattgactcccactcattgttatgttaattaagttattattctgtctccttgtaattttgattacaaaaattttattatcctgagttagctgttacttttacagtacctgatactcctaaaacttttaacttatacaaattagtcaataatgaccccaattttttcattaaaataatagtggtgaattatatgttattgtgttaaaacctcacttgccaaattctggcttcacatttgtatttagggctatccttaaaatgatgagtctatattatctagctttctattaccctaatataaactggtataagaagactttccttttttctttatgcatggaagcatcaataaattgtttaaaaaccatgtatagtaaattcagcttaacccgtgatcttcttaagttaaaggtacttttgttttataaaagctctagataaaactttcttttctgatcatgaatcaagtatctgtggtttcatgcccctctctatacctttcaaagaactcctgaagcaacttaactcatcatttcagcctctgagtagaggtaaaacctatgtgtacttctgtttatgatccatattgatatttatgacatgaacacagaatagtaccttacatttgctaaacagacagttaatatcaaatcctttcaatattctgggaacccagggaagtttttaaaaatgtcattactttcaaaggaacagaagtagttaaccaaactaacaagcaaaacctgaggtttacctagtgacaccaaattatcggtattttaactgaatttacccattgactaagaatgaaccggatttggtggtggttttgtttctatgcaaactggacacaaattacaacagtaaatttttttataagtgcttctcccttctccatgatgtgacttccggagataaaggattcaaaagataaagacaaagtacgctcagagttgttaaccagaaagtcctggctgtggttgcagaaacactgttggaagaaaagagatgactaagtcaagtgtctgccttatcaaaagagcaaaaatgcctctggttttgtgtttgggagaaaaatatcttggacgcactgttttccttgataaaagtcatcttctctactgtgtgaaatgaatacttggaattctaattgttttgtgtgccaggggcagtaatgtccctgcctcttctcccaatcaaggttgaggagtggggctggggagaggacttaactgacttaagaagtaggaaaacaaaaacctctctcctcagccttccacctccaagagaggaggaaaaacagttgtctgctgtctgtaattcagtttgcgtgtattttatgctcatgcaccaacccatacagagtaaatcttttatcaactatatactggtgtttaatagagaatgattgtcttccgagttttttggttccttttttaactgtgttaaagtacttgaaatgtattgactgctgactatattttaaaaacaaaatgaaataatttgagttgtattacagaggttgacattgttcagggatgggacaaagccttcttcaatccttttcatactacttaatgattttggtgcaggaacctgagattttctgatttatatttcatgatatttcacatttgctcttcacagcatgagcatgaagcccagtggcaccaaatggctgggtacaatcaagtgatattttgtagcacctcactatctgaaaggccatgagttttcagatgatttcattgagcttcattgcagcctgaaattttaaaaaagttgtgtaatacgccaaccagtcaagttgtgttttggccagagatttagatatgtccaatttcctggctcatttcattgtgctctatgggtacgtataaaaagcaagaattctgtttcctaggcaaacattgcaactcagggctaaagtcatccagtgaaacttttagagccagaagtaactttgtcccagtcctacaatgtgaaaagagtgaatagttgcctctttttagccattttcatggctggtacatattcgtacgcattacttttcagaatcaatacgcactttcagatattcttatttttattctcttaagtctttattaactttggagagagaaatgatgcatctttttattttaaatgaagtagatcaacatggtggaacaaaatgataaagaacagaaaacatttcaatatattactaataactttttccaatataaatcctaaaattcctataacatagtattttacagttttatgaagctttctattgtgacttttatggaattaagagatgaagaagatgagatattttagcatttatatttttcaaaattatatgtatacttaaaaataaagtaactttatgcaaacgaaaccaatcttggagaaaggcttgacctcggccgtgaccacgctaagggccgaannnn

SEQ ID NO: 24308 - DNA, 1715 bp, Homo sapiens; identical to SEQ ID NO: 23747

SEQ ID NO: 24309 - DNA, 4345 bp, Homo sapiens; identical to SEQ ID NO: 21910
  misc_feature 1, 2, 3, 4, 5, 6, 7, 8, 9, 10, 11, 12, 13, 14, 15, 16, 17,18, 19, 20, 21, 22, 23, 24, 25, 26, 27, 28, 29, 30: n = A,T,C or G

SEQ ID NO: 24310 - DNA, 1161 bp, Homo sapiens
  misc_feature 1, 2, 3: n = A,T,C or G
nnnaataattggaagtgtcccgtgcccatgtcttaccgccccccatgaatgcagatatcctagcatatcgtcagaaggaaggatgctgcaaattagctttttatcttctagcatttttttacccacctatatggcatgatcatatgctttggtgagctcttaggcccacccacagaagaattggtcccagttaagtgcatgcaaaaagccaccaaatgaagggattctatcccggcaagatcctgtccaagagtagcctgtggaatctgatcagttactttaaagaatgactcctttatttttgttaaatgtttccacatttttgcttgtggaaagactgttttcatatgttatactcagataaagattttaaatggtattacgtataaattaatataaaatgattacctctggtgttgacaggtttgaacttgcacttcttaaggaacagccataatcctctgaatgatgcattaattactgactgtcctagtacattggaagcttttgtttataggaacttgtagggctcattttggtttcattgaaacagtatctaattataaattagctgtagatatcaggtgcttctgatgaagtgaaaatgtatatctgactagtgggaaacttcatgggtttcctcatctgtcatgtcgatgattatatatggatacatttacaaaaataaaaagcgggaattttcccttcgcttgaatattatccctgtatattgcatgaatgaagaagattttcccatattttccatacagagtaattaaatattactttgctttaattctttaaggcataagttaaacctgatttaaaaatattttggctgaattacttgtgaagaaatgcatttaaggctattttcaaatgttgtgtttatttgtgagacacttacttattaagaaatgggttattatgcctacggttctaatctggtggtaaaggtattcttaagaatgtgctaggtcactacagaatttcacaccggctttgaaaaatgttccaaaaagaaaatgtttgtggggaagggtttcaggagctgaaattaagactcactttcagtgcattgtttgagattaaaaatagtatttcttaaacttgcttaatccatgataaagacatgttgctgtcatttttaaaaagtgacgt

SEQ ID NO: 24311 - DNA, 801 bp, Homo sapiens
  misc_feature 1, 2, 3, 4, 5, 6, 7, 8, 9, 10, 11, 12, 13, 14, 15, 16, 797,798, 799, 800, 801: n = A,T,C or G
nnnnnnnnnnnnnnnnaaatgctttaaaaaaatagcaaaatgtgcaacttcttacaaaaatgttaacgttaggtacttctatatattttatatgaccataatgtccgtgtgtgttttgtaccttcagtcccttgttattgttccgtatattacctgtaagcagatactgtattttattttagcctatttgacagaacacatcactcagaaaaagtgaagtttcagagcaaacagtgaagaaatcagtgtgattgtagacaaaaagtcggttcacagaacggagcagcggggagaggaagggaaaagcttcatagtttggtgcttatcacatcaagagattggtaaatttctgaggaaagacaggctaatggggcactgaaatggaacaactcctttaaacgtgcagccttttgaatttttcctcaaaaccaagaagttgacctctgagctgtcaggtgaccactgtgtgcaaaggggatggattctcttgtcagtagacggtcttctccatgaagcgagagtaggaagtgtactggaatggccaagtgggactgcttcagctgaccaggttcttttaaaccgtagtcatgctttcccactaactcttaaatccttatgcttagaaaattgaggataaggctgggcacagtggctcaggcctgtatcccagacttggggaaccccgcgggtgggtccccaggccccgtcggaccatcggttaatgggaaccggttctttaaatacaaaaagtggggggggggcgcgatccacatccaggggaggggcactacaggacnnnnn

SEQ ID NO: 24312 - DNA, 1342 bp, Homo sapiens
  misc_feature 1, 2, 1342: n = A,T,C or G
nnacggctagatgttgggtcctttgccccgagccccaattttcgtgtttcccacgaggggggtgccccttgaacccccggttggtcaactggggacaagggagttcatggggaccgggcaaacaaaccaggtggggtccaagactctcttttcccttaaggaccagtcctggcatcatgaaaggctgcccagcttttgtccaattcccaccagtaccaggaaatgacctgtcttacgccataaggtttgaactacctcagtgcggtcagccttgctgggcagttcacttaaggaaaaagctgacactactacatcaaactgcaccttgggtgatacaggtagaaactgtctgaaaaagacacctggaatataaggctccccagattctgaaccacctttcagtagtttttctgccaaaaccaacatggcagctgatctgtccacacacatatattcacgtaggctctggccccaaatactgtgagcagcccaggtgacagaaccagtacctgagccaaagtccatcaaagtttgtggctgaaatgctggatttcgagcccggatctcatggaatgctctggagactgctgcaaagccaccatccagtcttgctgccatatacaccaggctcagtccctcagtgtagctcagttcttgccaatggtaggtagttttacgtagtgcgtgtagcactgctccacgaagtttctcctctgtctgagataagtctgggttttccaggaattttttctcaagatgcctagcccgtctttgcaactcctctggctctacaggcaaatgtctgctccagagataactggtcagtgtttgcacctgattctccatagtgggcccagcgctcccaagtagcaataactgggcaccgttagccagtgcctgtggcagccgcacgtgcggcagctttaggatgccagggtgctggcgatgaggcctcttctgcaggaaaccggacttgttatctacctgggtcactccgggtactaaggcggcgagcgcccgggcctggggagccactccaaggccggggcaccatcttcctaatgtcagtagacacttcagtgccgccgccatggctccggaggcgaacccgaaacggaaatataggtgcctgtgaccctcagtcccaacgccgcaaggagcagccttcgcagaacttctcccgacagtttcagccaacgagaagagcgagtgtttgccagcagccaataagcaatggttatataaataatccttgaggcagaaaccgtgtttgggccgacttgaaggctgcgttgggcctggtcaccggccccagaaatcacggacgcgtgggtcgactccn

SEQ ID NO: 24313 - DNA, 263 bp, Homo sapiens
actcttatctcactgttctattttttctcctcatttatattaactctttcttacctttttttctgaacttctaggccttctctttccagaactggtggaagacaaatgaaacggccaagatggtaagatggccgcccatgccccatcattctttgggacgcatctttatcttcagcaagtaatgacacccattcttctgttaagctcacctggggaacttatcagcagttgctgaaacagaaatgctggcagaatggccgagt

SEQ ID NO: 24314 - DNA, 509 bp, Homo sapiens
  misc_feature 508, 509: n = A,T,C or G
acttcctctaaggaaatgtgtcattttttctaacatagtttatattcataaggagacaacacacaaacacatacacaatcaatcaacaaaaatgtgatacagtagattattaagcaccttgctctgattaaaaaggaaaaaaagaaagaaaaaagaacagactttttcaaccagcaattccagaataaaataaatctaattacatagtcaaaatgacaaaatttaaaaatcacttaatgggcagccaacatgtctccagttctcattttcttttatcccctgcttaagatttgcattcataattagattgttgttaatataaggctatgttatgttcatttagtatactatactaatccactaacataactttagaaatcattgtgttttcctactagtgagttgcatgcgttttcattgcggtaatgacatatggtctactcctccaagtgtgtgtgccaaaatccccacaagaaaaaaaatatgattaaaaccaacatctctgtann

SEQ ID NO: 24315 - DNA, 1092 bp, Homo sapiens
  misc_feature 1, 2, 1088, 1089, 1090, 1091, 1092: n = A,T,C or G
nnccgggcctttcaaaaagcttttccggcgccttagacccacagcgggaaaccgcgccccatgtaccaggttgttccccaagatttcgacaggagcgcgccaggctcacccaaataaacggccgcgattaacgcctgtaggaaatccgcagtgtgtacccatccacgatcatggccgccggtggtgtataagcacatcaccaatcagattccttataggcattgcaatcagatcgcgatctgatcatcatttacgaagtatcatttactgatagggaagaaatcccagacaagatccacataatagcagttacattaaatgttgaaataaaaattactttttgtttacatctggaattgagatggcccatcttcattgtttctccagagtactaagagggggaaaaaagtcacctaaaaacatgggaagttttttaaggctagctatacacaaacgtcacattggcatttttcttcagttttcatctcaactattagtactaaatagtttaaaaatcaaacataatttactaataatgaacaactgcacacttcatactatgaccgtttgataactggtcatgtaaaactatcaccaaatgctgatttgtcttctatatataaatagtaaaaataaaacaaaaaggtcttctttcctagttaaccttcttgaaggttgttttaacccaatataaaattaagcaaaataatagtataatttaaaaaaaaatttatgtgaagaagggcagcaatactaacattttctgaactatgggttttcaatatttaaaaggctcttggttaaatactaaaacccggatgctacccaagcaaatattatgctggaaaatgctttccctatgaaaatacttatctcattgaaaacaacacgataaagtacaattgaaaaactaggggagaattcttaagtaagacaatataaattacctgccagtaaaatggagggcaattttttggccattcatattgtttgtttacaaaacattgataagattcatttaaaattctgtaggattaagaatttttaaaaatttgaagtatctgcctaggatctcttgctgtcctcgnnnnn

SEQ ID NO: 24316 - DNA, 4017 bp, Homo sapiens
  misc_feature 4017: n = A,T,C or G
actatagggagtcgacccacgcgtccgggcctgggggccggacggctgtttcctgtcctggtgcatggtggtcggacgaaggaattgttggaaaattttctcggaggtagaagatgttgttagcccaaataaatcgagattctcagggaatgacagagtttcctggaggagggatggaggcgcaacatgttacgctgtgcttgacagaggcagtcaccgtggcagatggtgacaacttagaaaatatggaaggcgtaagcttgcaagcagtaacacttgcagatggttctactgcttacatacaacacaattctaaagatgcaaaactcatagatggccaggtcattcagttggaagatggttctgcggcctatgttcaacatgtacccatacctaaaagtacaggggacagtttgcgtctagaggatggtcaagcagtacagttagaagatggtaccacagcatttattcaccacacctccaaagatagttatgaccagagtgcattacaggcggttcagctggaagatggtaccacagcttatatccaccatgcagtgcaagtcccgcagtctgacaccatcttggcaattcaggctgatgggacagtgggcaggtctgcacactggggatgctacaattgaccctgacaccatcagtgctttggaacagtatgcagcaaaggtgtccattgatggaagtgaaagtgtagcaggtactggaatgattggagaaaatgagcaagagaaaaaaatgcagattgttttacaaggacatgctacaagagtaactgctaaatctcaacagagtggagagaaggcatttcgatgtgaatatgatggatgtggaaaattatatacaacagctcatcatctcaaggtccatgagaggtcacacacaggagatcggccttatcagtgtgagcatgcaggctgtgggaaggcatttgcaacaggttatggattaaaaagtcacgtcagaactcatacaggagaaaagccatatcggtgttcggaagataattgtactaaatctttcaaaacttcaggagatctacagaaacacatcagaactcatacaggagaaaggccctttaagtgtcccttcgaaggctgcggtcggtcctttacaacatcaaatatcagaaaagtgcacgttaggacacacacaggagaaagaccttattactgcacagagccaggatgtgggagggcatttgccagtgcaacaaattataaaaaccatgtgaggatacacacaggagaaaagccatatgtttgtacagttcctgggtgtgacaaaaggtttacagaatattccagtttgtacaaacatcatgttgtccacactcattccaaaccttacaactgtaaccactgtgggaagacatacaagcagatctccacgctggccatgcacaaacggacagcccacaacgacactgagcccatcgaggaggagcaggaagccttctttgagccgcccccaggtcaaggtgaagatgttcttaaagggtcccagattacgtatgttacaggtgtagaaggggacgacgttgtttctacacaagtagccacagtaacccaatctggactgagtcaacaagttacactcatatcccaggatgggactcagcatgtcaacatatctcaagctgacatgcaggccattggcaacaccatcacaatggtaacgcaggatggcacgcccatcacagtccccgcccatgatgcagtcatctcctcagcaggaacgcactctgttgctatggttactgctgagggtacagaagggcaacaggttgcaattgtagctcaagacttggcagcattccatactgcctcatcagaaatggggcaccagcagcatagccatcacttagtaaccacagaaaccagacctctgaccttagtagcaacatccaatggcacccagattgcagttcagcttggagaacagccatctctggaagaagccatcagaatagcgtctagaatccaacaaggagaaacgccagggttggatgattaatcctcagaacaatggagcaataaagcagaaggagtctttcatcttctggcagcagaaatccatgaagcccgggcccaggaaaattagaagttttccattcctgatacactgtacacatttttatgcgagagtggagaacattttattcttgacacttttgtgtatataacccttggaatagattctcagagtgattcattgtgtacaaggaagtatgaaattagggcaatacagtaaattttcatgttactcttttatcagatcacaaactcctagagtctacatgcaagactagtaaagtcttatggagtcttatgatggatttttaacttcccgtggaaaaaaaaataaaggctgtatctaaaataaaaaaaaaaaaaaaaattttttaagtaagagcaatgtttactgagcgatacaggactgagtactatgaagggtttacaaggatggaaatgcaccccgcccccgccctggccacccccgacacccagagactacagtacttaggagttacacacaacggccgtaactggtggctatctgttcataacaaacaaaccatagcatatttatactgtatcacatcgagtgattatagaaatccatatatatattgcttgtataaaatctttttttttgtaaaaaatattaaaaaaaaaaaaaaaaaggaaagtataaaaaacatgtgcagttgaaagccctgccaggacagccagtctgtaaacattcggtgagtatgtgctttggaagggcgcccgcgcctcagtgcccacagcaaactccagcagggctggcgagggtgcgcccggctgccgcctcctgggcagggccgcgctggaccgaggtgggtgggggcatcagggccccgcagcacgcccctctccagcttcgcatcagggcgaggggcagggctgggggcaggtgggttgcagtttcattctgagttccatcctcagccgcgttttggttgcaactcatggcttttcctggctgttcggaggttccttggatgggtgccctggtgaagaggccagagaagagcccagggctgcctcgttgggcgtctccctggcctcggtgcctctgtcctgcctccttcaagtggggccccaggcaggacaaccctacccgagggtcaactttggtctcagcgcttggtccctctgggtttcctcagcccgctcttcctcctgggtggctgatctgagtttcacaaaaaagctcggctgatgctggctgtgctgaacctcattgtacagtttttcatgcaccaaaggaagggccatctggggcccccctcctcctctctcttcgtcacttttccttctcctcttcctcctcctccacctcctcccagcccatggtcacttcttctcgagctgctcgagcagtgggttgccttctgactcgggggtcttgacactgtcggtccggacgatgcaggtggggcggtgtcggttcagcatcaggatgagctgctgccgctcctgcttcagctcctcaatctgggtcttcagctctgcgttcatgagttccagccgctcggattcccgctgcagaaactccgtgcgctccttcttcttgttccggcatcgggctgctgcgactttgttcttctcccggcgccttttccttcgctcctcttcctcatctagctcacttttcacgggctggggcctcttgcccagtttcacctccaggaagtgcaagggtgcaatcatggccccgaggttgcggatgtcagcgtatttcagctcctccacagtcagggccgagctggggagcccggtcagggggccaagccctggcagggagcctgtggtcaccgaagggtccgggatctgcccaggcatcatagcaggaggagtggcaggccagccttaacctcccccgccgccttgggcgccctcctcaccgcgagagcgctcgcgctcctctccccgcggggcgtcccgcgctttagagcacactggggtaccggan

SEQ ID NO: 24317 - DNA, 689 bp, Homo sapiens; identical to SEQ ID NO: 21367
  misc_feature 1, 2: n = A,T,C or G

SEQ ID NO: 24318 - DNA, 2826 bp, Homo sapiens
  misc_feature 1, 2, 3, 2817, 2818, 2819, 2820, 2821, 2822, 2823, 2824,2825, 2826: n = A,T,C or G
nnngccctgatgaaaagcctttcatgattcagcagccctctacccaagcagtagtttctgccgtatcagcaagtattcctcagagctcctctcccacaagcccagaacctcggccatcccatagtcaaaggaactatagtccagtggcaggtccaagcagtgagccaagtgcccacacgagcactcccagcataggaaacagccagccaagcaccccagccccagccctgccggtccaggaccctcagcttctgcaccactgccagcactgtgatatgtactttgcagacaacatcctttacactattcatatgggatgtcatgggtatgaaaatccttttcagtgtaatatatgtggatgcaaatgtaaaaacaagtatgattttgcctgtcattttgcaagagggcaacataaccaacattgattgaaaatagtcatattttacttagttttgctgtttttgtggtttggttttttttgttttttgttttggtcatccctaataaagtgtctgctaattcaaggcttatacattatatttatagaatataaatttgtcagtggaataaaatttcccctttttttcataaaaatctggtcagggtcatttatatattagaacagttagacacattggtgtctcttttttcctttccttttgacattggagaattggagtgcagtcataatcttacaagatgttcatttgaatttctcacatttatggtccataaaaacttcaaggcttatccatacttttgatgtttcaatatgcattgaactggatgttatttctgccatatttcaaaatggtagaataaattacagaatttattactactcatttcagtgtttagtacagaaattgccttaaaaattgctattaattgaaatatcatttagttcacattccttaagttgaatcggtagtttcatttcaactgataatagtaaagctatttcagtttagtaaaaattttcttttttccacaagaggaaatgtaaaacagttaagacttgaaattgaaaattcttttaatatttaaaataacttgtttattcaatgtctaaacacatgtcagttttccactggatttttattttcacaggtaaatacactagagtgctagatgcctttttcccctgtcagtttgactttcatttaaatccttcattctgatatcattactgttaggtgaggtggataactataatgagaatctcttattcttcctattcctttgatgaccaaagagataaagtgaagtcatccttattattaaaatgcagcctccaaacaaatttctcaagattccttttccttccttctatccattttctgcccataatttccaagaaaaggtgggtatggaaacacatgagagaatgtgatagtgaagtcatatttacaaaactgagaacatgtccaaaatggattcttgtctcctcttcagaattagccatttaaaatattttctgtgacttcaaattgtaattcttatttgcagttttaccagtcttcatgtacagtgacgaaactgtgtagaaactaaatcatcgctttagtaagaaaggataaaaaggtgtggaagtgaatataaaatgcatctaaacatgacatttaatttgtttataaaaataagacttactaaatatagagtaattcattttgaataggaggctattgtttttatattgtgtaataactcacgtactctgaagagagcttggtcaaacaataaaatacattgttactaacttggtttcttttctgtgtactttgcaaaaattctatttttaattttgttcatatgttgaatgtgcccctaattggcatcttaaagagaatagtaagcatctattaaccaaaaaagaactctaatagtaaaggaaagggaaatattggtggtatgtacccacaaaacccccaagtgccaagttaatggaatctctgctttccctttcagatgctagaaagccactgtaatgagttcttgcagtttagcatccagtctaagctactgcattgtttaaagagcagcatcaaggacactttctccaaactggaactctcttctttgtcaaatcttgtactttaaaattctacaattctgttacattgttgtttaaatcacagactgctcagatccattttactgcagtagtttccaagtgtgtaacttggctttagtatttatcagttgccagaaagaaacaggttgtcatttggaagtttttgtggttattttttcccatttttattcttcagataaaagcagtaccccaaaatagaaaatgaaaattttcatgaaacaaagagaactcccttgttaaaaccagcttattaactctgtattctgtcaaatgcatttttttctaacaactgaccatggatgttgtgaaggtgcattttaatttaaacatggaaaagatttttttcataattacatactagaatgtaaaattataattttgccatgacttaaagagcacagttgatatcccaaaggttttgatgctaagacgctacagttattctaaatgccctaaaatgtttgaggcaatctaccttaaaggcttttggatgggattttgaacatatttgagttactttaaattccggggagaatctgggtttggagaggttctgggtttccccctggttgatgtccccttgtttcacacttttaagacggcgggagagagagccaaatataatgcgagggcagagaaaattttggaatagatatggggcctctaaaaatattgatgtatttatttatgtatgttataataatatgtattgcggaaagaannnnnnnnnn

SEQ ID NO: 24319 - DNA, 3232 bp, Homo sapiens
  misc_feature 1, 3230, 3231, 3232: n = A,T,C or G
ncacacaggaaacagctatgacatgattacgaatttaatacgactcactatagggaatttggccctcgaggccaagaattcggcaccagagtggagagcggggagttgtgtccaccttgccgacgtcgctagccgtggggctgtcctgggaaggcggacggcgagcgcccggtgtccgcactcggccgcctgccgtgcccgtctgcgcccgtgtcatcctcactcgggacgcagggaccgtttttaaatcacaggggcgtgtgtcagcctgccctaggacttcatgtctatatatttccccattcactgccccgactatctgagatcggccaagatgactgaggtgatgatgaacacccagcccatggaggagatcggcctcagcccccgcaaggatggcctttcctaccagatcttcccagacccgtcagattttgaccgctgctgcaaactgaaggaccgtctgccctccatagtggtggaacccacagaaggggaggtggagagcggggagctccggtggccccctgaggagttcctggtccaggaggatgagcaagataactgcgaagagacagcgaaagaaaataaagagcagtagagtccctgtggactcccatgggtcataccagccagcatctgttcctgaactgtgtttttcccatcatgacggaagaagagagtgagccgcaattgttctgaaaatgtcaaacgaggcttctgttttgcacctgcagatcaccgagttggttttcttttcttttcttgcctttttttttttttgaaatttgccgagcagtggagccctctgacaatttgcaaggccctctgagaaaggaagctgcttagagccagggggttagtgggtgaggggagcgagtgctgtttttgagatcattatctgaactcaggcagcctagtagaggcagtggtgggattccaatgggtcttggtgggtgggaggtggggcatgtgcaaagcaagcaaggaacatttggggtaagaaaacaaacatgaggcaaaagaaaaaatacatgtttttaagaaaacattgagcagagaactgcagccaggatgcgctcagcagacattcactctggctgctgggacatcagaaaacaaagtcttcatctctctctccagtttcacccaccccaccctttgctttcatttcaggtgtgttggtctatatgacagggaggagagtaaaggagagcaggagcaattggctgcctgcaaagccagctggaggtgaagtgcaggaaaggaaaggtcaccccattctactccatggcctctctgctcccagctgtggtaggctcacatagccagtgtgatcggtttttaagaggcagtgcttttcagcttttctccctgatatatccattttgcttcccagcactttttaggagtagtgagagcacttcctgcccttgttggaagccccagggtggacactcagcacgaaggtctctcccttaactgctgcccttccaagacttgctcccgagatggagtgggcgtggtcttccaggctggcccttccttctcctcaccgccaccttccctgccccagccccagcagccatgggtacatgggtccccagctcacctatggattcccgccagtctgcccagctgcagtactcacgccccatgggggatcttggtctgtttttcttgtgggagcctagtggagagcagacgtggctttttatgtgtcttgttggggaggtgacttgcatggtggggacaaggctgtcgtggcaaccttgggatcgagtttgagactaaaggatgtcatgagatccctggcttctccccatgttgttcccggacaagggcagaagggaggcatggcaagggacctctgctgtccttactcaacagtggtcctcatccctccccacctcccactgcttcctgcaagggcaccagttgtatgagaaagttggcctttggacttaggatttcttattgtagctaagagccatctgaagcagcaggttgcaggacaaatgcttcagtccgccgagagcagtaccgtgtggccaagaggtggactcagagccttccttgagctaaactcggccaaccaaggcacgcagcatgtcccctcaggtctccagtcagtccaggttgaccctcagttctggacgtgtgtatatagctgtatttaatacctcaaggtcattgtggctctggggatgccggggcaggaggacgagggtgcgctgtggacacagcagtccgcggaattccgttctgggaagccaatggtcgccggcaccccttgcttcctccctctgttgtctgcctgtgtgacacacatcaatggcaataacttcttccaactcctcgcagaagtgggagaggccggcagcctgcaccgagaggggctttcctctctcttgctccccgcttcgttctgttttggctgcagagagtggttcatccatactctcattccctcgcctccccttgtggacgggggtcttgccttttcaattcctgtgttttggtgtcttcccttatctgctaccctgaatcacctgtcctggtcttgctgtgtgatgggaacatgcttgtaaactgcgtaacaaatctactttgtgtatgtgtctgtttatgggggtggtttattatttttgctggtccctagaccactttgtatgaccgtttgcagtctgagcaggccaggggctgacagctaatgtcaggaccctcagcggtggagcctgctggggggacccagctgctcttggacaagtggctgagctcctatctggcctcctctttttttttttttcaagtaatttgtgtgtatttctaactgattgtattgaaaaaattcctagtatttcagtaaaaatgcctgttgtgagatgaacctcctgtaacttctatctgttcttttttgaggctcagggagaaactagcatttttttttttccaaactactttttgtcactgtgacagttgtaaataaagtttgaaaatgctttccaaaaaacaggggggggggctaagaattacctgagggccagttacgcgtcccggctttgacaggggccatatgagggggttaaagagggaggggggtacacgtgcgggaccgtgctggcttggagagccccctggggcatggaccccagcattgcgcgtacagtattgacaccactccgatttgttatacatagtgacgggcgagccggctgcacgcacgacannn

SEQ ID NO: 24320 - DNA, 3604 bp, Homo sapiens
  misc_feature 3503, 3599, 3600, 3601, 3602, 3603, 3604: n = A,T,C or G
atttggccctcgaggccaagaattcggcacgttacgccttccctcatccccggtagaggcagggcgggactgttgtggttgagatgaaggctagtaaatggtgaagtacttcccggccagagggcacctgcgctcgggaggtttgggcggcttggcgtcggaggagagccccacccgcggaggaacccagccttgccaacggagctggcggagctcactcctcaggtcaggcgggcggcgtagaaaacgcagcggagccaggtgaaaccaaggcaccgccgtggctggcccccgacagttcctctagccgggaggttggaggagctgaaaacgccgcggagccctcggccgcccgagcaggggctggaccccagcccttgcagcctcccttctcctggcacccaagtgcagtcctggctgcagaaggggccgcgggcgcactgagtttccaacctccgttcagcctgtctgtctcagggtgcagccttaatgagaggtgattcctaagctgctgggaacctgaggttgtcaaaggggcggcaggaaatggacagcagtataaaacccagaagcagaacttgaaggttaaaccactagcccatttcacagaatgtttcatccatttgtggaccaaaagatggagttggtttttatttttaaaaagataatgttaatgatctgataccactacaaatatttacgtgagaagattcatggacttgtcttttggttggactgtcactcatttctgaaagtttcttcagccacaatttctatttgaaaattcaagtatcaaaggataccaggtttagaatggtataatgatgtattttgtctgaggactgcaaattttatagagaccacagttggattccagtgatattctgcaatcaaagtgatttgataaacctaattttgaagcattttatatttataagcgacatcaaaagatgggagaaaaaaatggcgatgcaaaaactttctggatggagctagaagatgatggaaaagtggacttcatttttgaacaagtacaaaatgtgctgcagtcactgaaacaaaagatcaaagatgggtctgccaccaataaagaatacatccaagcaatgattctagtgaatgaagcaactataattaacagttcaacatcaataaaggatcctatgcctgtgactcagaaggaacaggaaaacaaatccaatgcatttccctctacatcatgtgaaaactcctttccagaagactgtacatttctaacaacaggaaataaggaaattctctctcttgaagataaagttgtagactttagagaaaaagactcatcttcgaatttatcttaccaaagtcatgactgctctggtgcttgtctgatgaaaatgccactgaacttgaagggagaaaaccctctgcagctgccaatcaaatgtcacttccaaagacgacatgcaaagacaaactctcattcttcagcactccacgtgagttataaaaccccttgtggaaggagtctacgaaacgtggaggaagtttttcgttacctgcttgagacagagtgtaactttttatttacagataacttttctttcaatacctatgttcagttggctcggaattacccaaagcaaaaagaagttgtttctgatgtggatattagcaatggagtggaatcagtgcccatttctttctgtaatgaaattgacagtagaaagctcccacagtttaagtacagaaagactgtgtggcctcgagcatataatctaaccaacttttccagcatgtttactgattcctgtgactgctctgagggctgcatagacataacaaaatgtgcatgtcttcaactgacagcaaggaatgccaaaacttcccccttgtcaagtgacaaaataaccactggatataaatataaaagactacagagacagattcctactggcatttatgaatgcagccttttgtgcaaatgtaatcgacaattgtgtcaaaaccgagttgtccaacatggtcctcaagtgaggttacaggtgttcaaaactgagcagaagggatggggtgtacgctgtctagatgacattgacagagggacatttgtttgcatttattcaggaagattactaagcagagctaacactgaaaaatcttatggtattgatgaaaacgggagagatgagaatactatgaaaaatatattttcaaaaaagaggaaattagaagttgcatgttcagattgtgaagttgaagttctcccattaggattggaaacacatcctagaactgctaaaactgagaaatgtccaccaaagttcagtaataatcccaaggagcttactatggaaacgaaatatgataatatttcaagaattcaatatcattcagttattagagatcctgaatccaagacagccatttttcaacacaatgggaaaaaaatggaatttgtttcctcggagtctgtcactccagaagataatgatggatttaaaccaccccgagagcatctgaactctaaaaccaagggagcacaaaaggactcaagttcaaaccatgttgatgagtttgaagataatctgctgattgaatcagatgtgatagatataactaaatatagagaagaaactccaccaaggagcagatgtaaccaggcgaccacattggataatcagaatattaaaaaggcaattgaggttcaaattcagaaaccccaagagggacgatctacagcatgtcaaagacagcaggtattttgtgatgaagagttgctaagtgaaaccaagaatacttcatctgattctctaacaaagttcaataaagggaatgtgtttttattggatgccacaaaagaaggaaatgtcggccgcttccttaatcatagttgttgcccaaatctcttggtacagaatgtttttgtagaaacacacaacaggaattttccattggtggcattcttcaccaacaggtatgtgaaagcaagaacagagctaacatgggattatggctatgaagctgggactgtgcctgagaaggaaatcttctgccaatgtggggttaataaatgtagaaaaaaaatattataaatatgtaactaacgcctgtttgtgaaattagcttatcaggctgaaattaaagccatgcaaaagaaggtctaggtccatcaaggaaattcccctccgttttcctttgtcatggggtttatgttttatttcagattttatttgtgtgacttagaaattccaggaacacaattaggatattttcatacacatagggtatcttgttcactgctgtgctactttacatgagtaggatggaagtgtatattttatatgaaataccactgtacaatttataatttatttacaaattatatattaagagaaacaaatgtcataacagaactcagctgtttctaattgcttttgtgactgttaccttttagttcatgcccccccaaagagctaaatttcacatttttacctacaaaattgatttttaattcctggcanataatttaccattatgagctacaaggtgggcaacagcgcctgaggatctaattttatgcatattactcccaagtattttaacacttgttggagaannnnnn

SEQ ID NO: 24321 - DNA, 2105 bp, Homo sapiens; identical to SEQ ID NO: 24173
  misc_feature 1, 2, 3, 2104, 2105: n = A,T,C or G

SEQ ID NO: 24322 - DNA, 1278 bp, Homo sapiens
  misc_feature 1, 2, 3, 4, 1270, 1271, 1272, 1273, 1274, 1275, 1276, 1277,1278: n = A,T,C or G
nnnnctcaaattccaatgcattctgtgtgcctaggttgttcccgtgataatgctatgccacattgctgttctcttctattcaccagtttgccttcctaataacctcttctcatatacattctttaggaaaagaccagtgccctcagtctgagcaacgttgctggagtattctacatccttgtcgggggccttggtttggcaatgctggtggctttgattgagttctgttacaagtcaagggccgaggcgaaacgaatgaaggtggcaaagaatgcacagaatattaacccatcttcctcgcagaattcacagaattttgcaacttataaggaaggttacaacgtatatggcatcgaaagtgttaaaatttagggggtaggaacgaggctctaatacaaactttttagtgcacgtttagctttcttgttgcgtccttaagctcttttaaataaggaaggtggccaatggatcatcctgtatgtattgttgacgttcttccatgttcccagttggtgactaacctgcagctcaactgtctattttcctctttaatggcacagtagcttgggtgaatgtggacagattcctgccataattgtgctttattatttgtagttcagctttgcactgtttgctttcatttgctagaagctttcagatagaagtaaacttttcaaaaacaaccctgcctttcctctggatgcatttgaaaaccataacgtatgatttctttttctttctttccctcctctctcatttaagatgaccttgaatgatgccatgaggaacaaggcaaggctgtcaattacaggaagtacctgggcaaatggacgtgttatgactccagaatttcccaaagcagtgcatgctgtcccttacgtgagtcctggcatgggaatgaatgtcagtgtgactgatctctcgtgattgataagaaccttttgagtgccttacacaatggttttcttgtgtgtttattgtcaaagtggtgagaggcatccagtatcttgaagacttttctttcagccaagaattcttaaatatgtggagttcatcttgaattgtaaggaatgattaattaaaacacaacatctttttctactcgagttacagacaaagcgtggtggacatgcacagctaacatggaagtactataatttacctgaagtctttgtacagacaacaaacctgtttctgcagccactattgttagtctcttgattcataatgacttaagcacacttgacatcagctgcatcaagatgtaccnnnnnnnnn

SEQ ID NO: 24323 - DNA, 3677 bp, Homo sapiens; identical to SEQ ID NO: 24153

SEQ ID NO: 24324 - DNA, 913 bp, Homo sapiens
  misc_feature 1, 2, 3, 814, 819, 873, 894, 909, 910, 911, 912, 913: n = A,T,C or G
nnnccgaagaatttctacctgttgtgaacatttaactttctttttaaaagttttaaacaaaaataaacaagggatattatgatgaatgtttggcttatgtgagtactagagataaaatttttaaacccagttattcacaatataaaatgttttcaagttagaaaaaatttttagaaatcctgggtattgtatttaactgtagctaaccaattttaaaacttgtattcttttgagaactattattaatagaaaaactttttataagcagtaaaataagaatgttccagtgactacctgtccttatacctagtcttgttaaaactttcttttgcagggtatttagtgtttggtttacagtcagtgcagagtgggcaagttaacagaaagtttgagctagagatactggaaaaaaaaaagatcaaagaatgagaaaaatggtgatccattttggggcaaactgagaccccccaaataactctttcctcatgtgtatggtgctcctcatgactcgtcttgtattttgcctttctgatacccatcagaactgctgctgctctaacttatactctttaccttgcccagatctccgcgtaaggaatgctttatgatcaacttgccataggactgatggattaaccagtgttcggctttatttgaagtctatgccctgcacagctcttgtatgtattttagatgctagaagtttttttagcatgtgatgtgtgattcttgtttgaattctaggtaccttgtccaacttggttctttttcaaggttgttttgggtattctgggtcccttgcttttccatatgnatttnaggatcagcttgtcaatatctgcaaaaaaaaaatcagctatattttgatagagntttgtattgcatctttaggantggtttgttgagtannnnn

SEQ ID NO: 24325 - DNA, 2538 bp, Homo sapiens; identical to SEQ ID NO: 20316
  misc_feature 2538: n = A,T,C or G

SEQ ID NO: 24326 - DNA, 2305 bp, Homo sapiens; identical to SEQ ID NO: 24214
  misc_feature 1, 2305: n = A,T,C or G

SEQ ID NO: 24327 - DNA, 2615 bp, Homo sapiens
  misc_feature 1, 2, 2612, 2613, 2614, 2615: n = A,T,C or G
nncacggtcccgggatactggggacggcggggtgggagggcgccgtctggggccgcgcgcgggcgggggagatggcggcgcgatggagcagcgaaaacgtggttgtagagttccgtgactcccaggcaactgcgatgtctgtggactgtcttgggcagcatcagtgctttctggataaggtcttgccaggttgcccaggctggtcttaactccgggcctcaagcgatgcttctgcctcggcctgcagcactaagagttccagtggaggaagcagaaggaagggtccaaggactatcaactggtgacgtggtcccgggatcagaccttgagaatgtggcgggtggattcccagatgcagaggctttgtgcaaatgacatattatatggtgttgatgagttcattgagagtatttcccttctgccggaacctgagaagaccctgcacactgaagatacagatcaccagcacactgcaagccatggggaggaagaagccctaaaagaagatccccctagaaatctcctggaagagaggaaatcagatcaactggggctgcctcagaccttgcagcaggaattctccctgatcaatgtgcaaatccggaatgtcaatgtggagatggatgcggcagacaggagctgcacagtgtctgtgcactgcagcaaccatcgtgtcaagatgctggtgaagttccctgcacagtacccaaacaacgccgccccttccttccagtttattaaccccacaaccatcacatccaccatgaaagctaagctgctgaagatcctgaaggacacagccctgcagaaagtgaagcgtggccagagctgcctggagccctgcctgcgccagctcgtctcctgccttgagtcctttgtgaaccaggaagacagcgcttccagcaacccgtttgcactccccaactctgtcactccccccttaccgacgtttgcgcgggtgaccacggcttacgggtcgtaccaggacgccaacattccctttcctaggacttctggggccaggttctgcggagcaggttacctggtatatttcacaaggcccatgacaatgcatcgggcggtgtctcccacagagcctactccgagatctctctcagccttgtctgcttatcacactggcttgatcgcgcccatgaagatccgcacagaggcccctgggaaccttcgtttatacagtgggagccccactcgcagcgagaaagagcaggtctccatcagctccttctactacaaggagcggaaatcaagacgatggaaaagtaagcgtgagggatcagactctggcaatcgacagatcaaggctgctgggaaagtcatcatccaggatattgcttgcctcctgcctgttcacaaatcgctgggagagctgtacatattgaatgtgaatgatattcaggaaacatgtcagaagaatgccgcctctgccttgctcgttggaagaaaggatcttgtccaggtttggtcgctggctacggtagctacagatctttgccttggtccgaaatctgacccagatttggaaacaccctgggctcgacatccatttgggcggcagctgctggagtccctgttggctcactattgccggctccgggatgttcagacactggcgatgctctgtagcgtgtttgaagcccagtctcggcctcaggggctaccaaacccctttgggccttttcctaaccgttcttctaatcttgtggtgtcccatagtcgatatcctagctttacctcttctggttcctgctccagtatgtcagacccagggctcaacactggcggctggaacatagcgggaagagaggcagagcacttgtcctccccttggggagaatcctcaccagaagagctccgctttgggagtctgacctacagtgatccccgtgagcgagaacgcgaccagcatgataaaaataaaaggctcctggaccccgccaatacccagcaatttgatgactttaagaaatgctatggggaaatcctctaccgttggggtctgagagagaagcgagctgaagtgttgaagtttgtctcctgtcctcctgaccctcacaaagggatcgagttcggcgtgtactgcagccactgccggagtgaggtccgtggcacgcagtgtgccatctgcaaaggcttcacgttccagtgtgccatctgtcacgtggctgtgcggggatcgtccaatttctgcctgacctgtgggcacggtggccacaccagccacatgatggagtggtttcggacccaggaggtgtgtcccaccgggtgtgggtgccactgcctgcttgaaagcactttctgaacctacagaagttgggtattgtctgaaatcccagaggacccataagtgccggtgacaagctgtctgtcaggggagaggctccagaacctgggttcgtccccagtgagaccggaggatgatcccccaaggactgcgcagaatcagctgctgggccgcgtcctctggggccgggggtgcccgggagcaaggcaatgcaacgtggggggaagcgcgcacagggatcgggaaacccgcaggagggccggggcacgacgttcgagcaccgcccggggccccgcgggcggggcacaannnn

SEQ ID NO: 24328 - DNA, 440 bp, Homo sapiens
  misc_feature 424, 425, 426, 427, 428, 429, 430, 431, 432, 433, 434, 435,436, 437, 438, 439, 440: n = A,T,C or G
accaaagaagaaataagtccaaaccattagatcagaaggctaaattttcctatggttgaatgttaaatattgagttggaaatacccagaaatctttgttctagcttgtttgcagaaaggtaaagatttactagttggtttatttaacagtagaataaaatataataaacagtgtttaactttttttatgtattttttttctgtgaaactagaaagtttatgatgatgagaagcttgaggtttctgaattagcaactgtgaaacgtcctcaggagagaagctacatgctgcagaggtggcaagaagatggtggtgctatgatcataggctatgagatgtatagaaatcttgctcaaggaaggaatgtgaagagtcggaaacttaaagatattattaacaaagctttggttgatccaggccctgannnnnnnnnnnnnnnnn

SEQ ID NO: 24329 - DNA, 1407 bp, Homo sapiens; identical to SEQ ID NO: 23856
  misc_feature 1380, 1381, 1382, 1383, 1384, 1385, 1386, 1387, 1388, 1389,1390, 1391, 1392, 1393, 1394, 1395, 1396, 1397, 1398, 1399,1400, 1401, 1402, 1403, 1404, 1405, 1406, 1407: n = A,T,C or G

SEQ ID NO: 24330 - DNA, 3318 bp, Homo sapiens
  misc_feature 3145: n = A,T,C or G
gcatgcgctgcggcgtgtgtgccgggtgtgtgctcgccctattggctcgtttactgtggatggttcccctcgtggtctggattgttgtctgcgggtgtgtgtcccaccgaggtccggctgctctgcttatatggtggcttcttctccggagtttgttgttgtcggtcgtttgtcgtgcttgttacacgtggggggtgattctgtgcgctttttcgttcggctctgttattggggcccccccttttggagcaccctgtgtcactgctatctgggtttgcgctctattgggtgctctcctctatgagggtgattccttgttcgtgctctcccctcctcttttgtttttttttgtgttttttttttttttttttttttttttttttttaaacatctccaaatgtacaattttattttaacagatttcaagagtccattttttaaaaaatgagcaataaagaacctctatcagtgagacttctcattttatagcaaatacatttttgcagcttaaattttcttgaattcatatacgcttctgtcatttaaacaaacttccagagaaaactggtctctatatatttaagtaacaaatttgacaaaatacatatttatacatatatagatctctaatataaatattaaatttgaaaaaatcaaatgtgaagcagaaactgctatacaagtatattgtataatatttattttatacattaaagtatttggttgaatatacttcaattaggtttctaaaaaacaccattatctgcttcttagtaattgcgacattcttgaaaagcatgtgaaacgggtataaacttcaactctgtgcttaattcagaattcctgtttgttctcctcaaacttttatcttcctaaagcatcttgccagagactacaaaggaaaggaacatttacagagcactataaacatgtctttggacagtaaaacagtatttattcttctacactcttgattttccaatcatatcttcctcaaggcaatgtttctttggcccaatttgtgcaactaaacataaaatttcaaaacacaacttttaacagtgtgatatgaaatgcagtggcagtccctgctttttgcctgctggcttctttgaaagaaactgcttggctaagggactcagtagagggctgagatctgcctgagtataaagtgctacctgagctatatttacttcttccatcccttggtacaatcaacagcaaatagacaaaatgaagttaccttcctgagatacatggcttactttgtactctgccttttaggagatgaggtaagacatatacatagatggcttttactagccaaggcaatgtaaatggactaagattctcatgtgacttgaggttatctgatgaatttattctcttcaaaaccacctacttttagagggcatgtttaacccctctctttatttaaggagggagagaaaaacacatgtaaccagaattcagagtgggttactcaacctaagagaacatacggagttctctttgggaaaacaacaagactacagtgttcacttcgcaccatgaagtggcactcctgttatggctgtcagagtcctctcacttcttatgaaaggatgcatctgattctgaaattactgatatattcgatcagttagggatgttttaaaaagtgaaaacaaatgccacacatacactttctagctttctgaaatcaccgaacacattacaaaaaatagagaatttaccctattaacttttagagaattttccaataatattcttggttaaagaagccaagtttgtgcatattcccaattttcagtgttcttgtttttatgcacaagagccaaagtagtatacacatatttttaagggctttttacaatgaacgatatataaaatacattctatagttggtgaaagaataatcttaagagttggcattaatctttgaacaaaaaagatttcaagccactttctttacaaagaaaatataatttcattgtgaactatatttctctaattttgccaattttataaaatacagcatatccctgctttaatacaaccaggcatgctgtgctgactggtccaataaatctaagtgttatttaagggaaagcaggcaatctgttcatacccaaattcatacaagtttcaaagaagcatcaaaggatgctacctacattcaagccacattgcaatattagctaagccacagttgcactcatgagagtgaaactacagaataacaactattgaagattttaatagagtcaaaagatgaactggcaaaccaggttgtggaatctattcagcctctctgctctgctggagtggttgatttagtctggtaagtggcatattcagctccaccatctgctttccttttaatgataaaagcaaacctttctctcatctctccttctcagagagaagtaaattttacttctctgtgggtctcatcagttaggtatgtgcctttcttcttcctcctttgaagatatctgtacgggacaacacaaattactgcaactccaacaactatggcaataacaatcacagcaatgacccaaacatccaaactgtcaagtattccttcctcaggtttaggatatcctggataatttgagactggaggcttgtaagtaggcctaggacctgaggcactggacgctggagattttgtagtggaagaagtcgacactttaagacactttggaactgggggatcccaagtactgttactgtcacagacaattgtgtcgctgccatcgaggtaaaaacccttatcgcattcaaacataactgttgctttgtagtaaaatttttttccaaatcctgatatctgttttccattttcgactactggaaatcgacatttgaccactttacactctggagcagcacgactccacactgaattgtcaccacaataaatcgtgctctctccaataagtgaaaatggatctggtccaggtgcaggatcacaactataagttactgcatcaagatactcaaatacttctacttcactaaaggtgtgttttccattttttatttttggaggtggtgtacacaaaaccttttcacatattgggggcttaccgctccaaattgctactgatcctttaagttcacaatatagaatttnttcaccaattaagtaataaccctcattacaaataaagtgcatctgataaccaaactcgtaagtcccatttgcagggactgcttggccatttaaaggatcccgtatatatggacatgtttctctgctttcctccggagaaataacagcgtcttccgcgccgcgcatggagcctc

SEQ ID NO: 24331 - DNA, 1782 bp, Homo sapiens; identical to SEQ ID NO: 21380
  misc_feature 1766, 1767, 1768, 1769, 1770, 1771, 1772, 1773, 1774, 1775,1776, 1777, 1778, 1779, 1780, 1781, 1782: n = A,T,C or G

SEQ ID NO: 24332 - DNA, 1651 bp, Homo sapiens; identical to SEQ ID NO: 21898
  misc_feature 1, 2: n = A,T,C or G

SEQ ID NO: 24333 - DNA, 2538 bp, Homo sapiens; identical to SEQ ID NO: 20316
  misc_feature 2538: n = A,T,C or G

SEQ ID NO: 24334 - DNA, 3524 bp, Homo sapiens
  misc_feature 1, 2, 3, 4, 3521, 3522, 3523, 3524: n = A,T,C or G
nnnnggatcgaccaccgtcggctttggcgtccgcggggagctgcccctgtgcccgtggctctctgcgcatgcccggaccccggcggctccggagtccgggaggctctggctgctccagtcgcgggtccgggccccgcctctccactcggcggtggcgtccgtgttgttattgtggtggtagcggcgtctggctgctgcggaccccgccgagtcctagcgcctggcctgcgcgccgctgcccgcgccacaggattaatttatttttggaaatcaagtgcaatattggaagccatttctactaattttatttcacttttaaatttatgatttgatttgaatactatcatgggaggagctgtgagtgctggggaagataatgatgacttaattgataatttaaaagaagctcagtatattcgtactgaaagagtggagcaagccttcagagcgattgatcgtggagattactatttggaaggctacagagacaatgcttacaaagacttagcctggaagcatggaaacatccacttgtcagcaccttgcatttattctgaagttatggaagcattgaaacttcaaccaggattgtcttttcttaacctgggaagtggaaccggatatttaagtacaatggtgggcttaattttaggtccttttggaataaatcatgggattgagcttcattcagatgtggtggaatatgccaaggaaaaactggagagcttcatcaaaaatagtgatagctttgataaatttgagttctgtgaacctgcatttgttgttggtaattgcctccagatagcttctgacagtcatcagtatgatcgaatttattgtggagctggagtgcagaaagaccatgaaaactacatgaaaatattactaaaagttggaggcatattagtcatgcctatagaggatcagttaacacagattatgcgaactggacagaacacttgggaaagtaaaaatatccttgctgtttcatttgctccacttgtgcaaccaagtaagaatgataatggcaaaccagattctgtgggactccctccctgtgctgtcaggaatctacaggacttggctcgtatttacattcgacgcacacttagaaatttcataaatgatgagatgcaggccaaggggattcctcaaagggctccacccaaaaggaaaagaaagagagttaaacagagaattaacacttacgtatttgtgggtaatcagcttattcctcagcctctagacagtgaagaggatgaaaaaatggaagaggataacaaagaagaggaggaaaaagatcacaatgaagcaatgaagccagaggagccacctcaaaatttactgagagaaaaaatcatgaagctgcccctccctgaatctttaaaagcttacttgacatattttagagacaaataacttagatcaagaagaaaaatgcctactgataattcctttagtcttgaaaatgtagcatttgttaggagttaaaagagagaattatttctttcatcagagcaaattatagtggaaaaaaaaatcacttgtttctgtcagtaacacaaatgatgtattcagtgaataaaagaatcccttttataaaatctatttttctttaaatcttggaaaaatgttgttttagctcagagtgatttcaaagtggaatgcaacagtagtcaagacttgtgtactataaatccttttctgattccttacagatttgtagtgatgaggtttagatttaattttatatatggtttaaataattgttaagcttatataacctgatctgaattgcagttgtttgcatttcctctatgaaaacttcatttatctaataaggaagtcaaatgctttgtagactatttaccttacttttgttgcaatcactgttgttgggttgctgtatatatattccgggcaatatatgagtgcaataacaatacaagatattgaataatttagctttaaaaaatcccacaaattttatgaaattttacagccctgctacttttgcttttgaatctcttgccaaaagacatgggtaaaatatctgcctctctcatagagattttaagagcacagcaagtgaattattaaaacaaagtctatacttaatacaactctttatatggaccctttacattttcagtatttaaaaaaatgaggttatcttaactctatagaattttaaaagtatatttagaattgttttttctgtagttcactgtataaagtatttggttttttaaaaaaagcaaaaccattgttatgtgtgactcttgataggacacagaacgagtgaatgagcatgagtgaggccactttcttggatggctgtaagtagcagggccagggtagacctggtcagcggatgcactttagcagatggaacttctagtttatctgaatatttatctttgacaaggtagggctgagcctacatttgcttttgatctatctagtataagaaatattcacagaaattgtatgtagataccctttgttttgaaaatgctgttcagaatcatagtgtaatctttgggacctatgccatgttcatttcactccttcccatattttttgtgtttcttttggtaaaactataatggttttcattttttacttaatatcacacagttaaactgtccatatttgagctttattttagcttatcagtgataaaaaacaggtagtaactgccattgtttgtttgttttcctaataaggcctgaaaacagccattccttgttaagaaagtgtacaatgtaacatatttgctagagttacatggattatatatttcttaaagggaaaaatttgagagtatcatggactaccaccagcattattattacagtagttactcagatttggttaaggaagcccaagcaatgtatagtgaaaggattattatctctctgctaagattcagatattgtttcagaaatctcagctccagtaattccacaacatctaaaaacaaatgtttgtgatcatgtgtaagcatgaaattgttccaagtaagtgaggatattttagttatgtgaaagacagtttcatggaaggtatttgttttataccagtggctgggatggtggaattggggttatttctacaattattcttagacgattactaaactgttaagaaatgccccatatcatttttgtatctaggaaagaaaaaaatcagtttcatactgttgtcatctgtcagaaatgctcattttattttgaattaaatgtggcttttgaagtacctagttaccttgaattcctggtgaccacatgtttttatctggaaaacctggagaaagttatctgtcccatcttcccctgcttggtagagctttttgttgaaccaactggggtgggaactgggtgttcagaagagagggtaacatatccagggaaaaaagtttggacaaggattttttggcaagtgggtttcccttatggccttaattttggccggggaacttttcggcaattccggacccgggatattcggctaaaggnnnn

SEQ ID NO: 24335 - DNA, 655 bp, Homo sapiens
  misc_feature 642, 643, 644, 645, 646, 647, 648, 649, 650, 651, 652, 653,654, 655: n = A,T,C or G
cccttagcgtggtcgcggccgaggtacgcgggggagcggagacccgggagcaggagctgggcctaggtctgcgccctgaattagagcccattgggaacgatgccaccaccgtcagacattgtcaaagtggccattgagtggccaggtgctaacgcccagctccttgaaatcgaccagaaacggcccctggcatccattatcaaggaagtttgtgatgggtggtcgttgccaaacccagagtattataccctccgttatgcagatggtcctcagctgtacatcaccgaacagactcgcagtgacattaagaatgggacaatcttacaactggctatctccccgtcccgggctgcacgccagctgatggagaggacccagtcatccaacatggagacccggctggatgccatgaaggagctggccaagctctctgccgacgtgactttcgctactgagttcatcaacatggatggcatcattgtgctgacaaggctcgtggaaagtggaaccaagctcttgtcccaatacctgggctgaatctgctctacactggctaggtgtgcacacaggcacttacagttacagttgcatcgactgatttcccatggggtgttcacattaaaattcatcttttttgtggcnnnnnnnnnnnnnn

SEQ ID NO: 24336 - DNA, 1782 bp, Homo sapiens; identical to SEQ ID NO: 21380
  misc_feature 1766, 1767, 1768, 1769, 1770, 1771, 1772, 1773, 1774, 1775,1776, 1777, 1778, 1779, 1780, 1781, 1782: n = A,T,C or G

SEQ ID NO: 24337 - DNA, 2000 bp, Homo sapiens
  misc_feature 1983, 1984, 1985, 1986, 1987, 1988, 1989, 1990, 1991, 1992,1993, 1994, 1995, 1996, 1997, 1998, 1999, 2000: n = A,T,C or G
ccacgcgtccggcaccttgcctggtctgtataaaacaccacaatcacaaacctttacattgcagtcagtttcaatacagttggtcacacacctcgtgattttctattactcaagataataaggggcttagggtctagaagttctgtttcctagagggttaaaatgctaaacataaaaaaagctgtgctttttttgtgaaactaggagacaagctgcacatctcagacacattgtaagcctaccactgcagcgcattgatttttaagctgcctgaatcttcaggacccctatctattccatcctatccattttgctgattgagtcgatatgtattgcagcctcttacataggagcataagatgacttttggattgttaatactgatttaaatagctgaagttctcctaataaagcattcccaaggagagagaaagtttgtctactgggggtaaaaatatcagatggtgcacattaaaagggagatgagatttgtcggagacagatttcagaatccttttagatgatccaattcaagaaaaccctctataaaatttaataaactgtataagttaactataatattttatactttctttttggtgtcttaaaaatttaaagaagcgaggaacatgccatttggtgagtaccgttggaagctattttaatttctaggaaaagccccaaatatcactccaaatagattttgtttgcagatctcagttcagaatgcacacacacacacacacacacacacacacacacacacacacacacagagatgtatttatctttccaaattggattctggtttcagagatagagagttggtataaataattgaaaggataaatctaaaaccccctgacagtccgccaaattcaagaacagaagtggttgccaactctctaacaacaatgtttgggaagctgattccaaagtagctgaggatgaggtcataagcatactgtgaaacccaagattcttcttccctggtagaattacaatagttactcttgataaatataagtattccatgtcttgccctctttcctcactctctgcttatccttttagacctaagtttcattggaaatagcctgaattagaagaaagcccatccgaatctttattagccccctctaatgattagtttccaggctgcgttcatacctttgacctctcagtgtcaaagtcctacctaggcctccccacaacagagagggccgtaacagcaatccctgcccctcctttacctcccagcctcttgcagaggagcccagtgataacacatgtgaagttctttgctgtcctcttgtagaaggtgctgcagtgcaaagtattaatacggtcttagacaaaataactgtcatgatttgggaccagtttggttgagcttgtcagaagacatttcatttgtttcatttctgcacttctctatgaattttgggatactatatttctgtgaaggacttattgtatagacaactcaaaaaggaaagaaactttccagtattaccacttcttcctggaatatagctgtagtatttctcactagtattattagatacctgtgtacagaaagtatgcagttattcaggttaatgtttcatattaaagaatgtatttgtaaaatgtaacatgatcagtagttaccttttttcaagctctgaagaagttcagattacgtgttagacttaagttacagtgaaaactgttttaatactacttttgtggctagcaaaggttgtgcatctatttaaaattatttacaggatgctctaaataaggggcattaaagataggtttagctcttaattttagaaattgtgacactactgatgtctgtcatacagttattcttcagaagttctctgagatgtcaaatataatttttgtttaattcagagataagtaacacctgctctattgattcactattacaacaaaccctaattttgtcattaaatattttaactctgtgannnnnnnnnnnnnnnnnn

SEQ ID NO: 24338 - DNA, 2611 bp, Homo sapiens
  misc_feature 1, 2, 2594, 2595, 2596, 2597, 2598, 2599, 2600, 2601, 2602,2603, 2604, 2605, 2606, 2607, 2608, 2609, 2610, 2611: n = A,T,C or G
nnccgcccgggagcaggagctgggcctaggtctgcgccctggagggaggtgtagaaagaggtacatggagaacaagtttgtcaatccatctgaacttcagttgccttacctggaaggcagccgtgtctgtgtttttgtctcgcagaattagagcccattgggaacgatgccaccaccgtcagacattgtcaaagtggccattgagtggccaggtgctaacgcccagctccttgaaatcgaccagaaacggcccctggcatccattatcaaggaagtttgtgatgggtggtcgttgccaaacccagagtattataccctccgttatgcagatggtcctcagctgtacatcaccgaacagactcgcagtgacattaagaatgggacaatcttacaactggctatctccccgtcccgggctgcacgccagctgatggagaggacccagtcatccaacatggagacccggctggatgccatgaaggagctggccaagctctctgccgacgtgactttcgctactgagttcatcaacatggatggcatcattgtgctgacaaggctcgtggaaagtggaaccaagctcttgtcccaattgcagggtatgtgagccagcccatggtggacgtgtcaatccttcagaggtccctggccatcctggagagcatggtcttgaacagccagagtctgtaccagaagatagccgaggaaatcaccgtgggacagctcatctcacacctccaggtctccaaccaggagattcagacctacgccattgcactgattaatgcactttttctgaaggctcctgaggacaaacgacaggatatggcaaatgcatttgcacagaagcatctccggtctataatcctgaatcatgtgatccgagggaaccgccccatcaaaactgagatggcccatcagctatatgtccttcaagtcctaacctttaaccttctggaagaaaggatgatgaccaagatggaccccaatgaccaggctcaaagggacatcatatttgaactgaggaggattgcatttgacgcagagtctgatcctagcaatgcccctgggagtgggaccgaaaaacgcaaagccatgtacacaaaggactacaaaatgctgggatttaccaaccacatcaatccagccatggactttacccagactcctcctggaatgctggccttggacaacatgctgtacttggctaaagtccaccaggacacctacatccggattgtcttggagaacagtagccgggaagacaaacatgaatgcccctttggccgcagtgccattgagctcaccaaaatgctctgtgaaatcctgcaggttggggaactaccaaatgaaggacgcaatgactaccacccgatgttctttacccatgaccgagcctttgaagagctctttggaatctgcatccagctgttgaacaagacctggaaggagatgagggcaacagcagaggacttcaacaaggttatgcaagtcgtccgagagcaaatcactcgagctttgccctccaaacccaactctttggatcagttcaagagcaaattgcgtagcctgagttactctgagattctacgactgcgccagtctgagaggatgagtcaggatgacttccagtccccgccaattgtggagctgagggagaagatccagcccgagatccttgagctgatcaagcagcagcgcctgaaccggctctgtgagggcagcagcttccgaaagattgggaaccgccgaaggcaagaacggttctggtactgccggttggcactgaaccacaaggtccttcactatggtgacttggatgacaacccacaaggggaggtgacatttgaatccctgcaggagaaaattcctgttgcagacattaaggccattgtcactgggaaagattgtccccacatgaaagagaaaagtgctctgaaacagaacaaggaggtgttggaattggccttctccatcctgtatgaccctgatgagaccttaaacttcatcgcacctaataaatatgagtactgcatctggattgacggcctcagtgcccttctggggaaggacatgtccagtgagctgaccaagagtgacctggacaccctgctgagcatggagatgaagctgcggctcctggacctggagaacatccagattcccgaagccccaccccccatccccaaggagcccagcagctatgactttgtctatcactatggctgagcctggagccagaaacgacggtacccaggagaagggattttgggcccaggagaaacacttacattctggtgccttgtcttttgcttgtacagaatctgtagtgattttggtggccagtaaatgccagccatttctcaaacccacctcggaccacccagagtttcctcttggtccctgtctactaagagtcatgaaggcagggtgctctgcccactccatcaccatgaagcctgggattgggccacgaggaacaaacagcagatgcccttgccttccagtccaagaaactgcttcttgaaatggatttaacaacagccaggagcttcctgtcagtaaccatgttttcaataaatactctttcacgnnnnnnnnnnnnnnnnnn

SEQ ID NO: 24339 - DNA, 516 bp, Homo sapiens
  misc_feature 1, 2: n = A,T,C or G
nnatgagtgtaaattaaagacaaaaagaaaactctggttttatatttgagaacacgtgaaaaatcatgggtcaacataaaatcttgagaaccttctactttctccgggaaagcattatatagtggtgcattagtttagaaagtcagctatgattttgcctatagttctagttagctttggggttttcttgtacaatagtggtcctgaggtgacgtatatcctcagcttacaaagataacaggattaagagattaaagtaagacaggtgtaagaaattataaaagtattaattttggaaactgataaatgtccaagaaatcttcacaatttatgtttcctgatgcagcaccagctggtccctccattcggggtccctgacttcccacaacagccaggctttcttgggcagaggttcctgtggctttccacagtgcattgagcccctggttatcgagaatggagaatggcgatgacttttaccaaacatactgcctgcaaacatattgttaacaaggt

SEQ ID NO: 24340 - DNA, 707 bp, Homo sapiens
  misc_feature 679, 693, 704, 705, 706, 707: n = A,T,C or G
accaaggtctggcaatagtcatgttcattctctctctctctgtccttcctttctttcttccttccagggatcactacttgtgtgatgtgacatgggcaacacaagaaagaatttctttgcagtggctcaggaggattcagaactattcggtcatggatatttgtgactatgatgaatccagtggaagatggaactgcttagtggcacggcaacacattgaaatgagtacctttctgtcacatgactggtggcagaccctactttaacccagcccaacaaggtcatgctacagagctgctcatggcattttcctggactctcctcccttggtcctgaccggattcttctaccctgatccacttagtaagtccaagctccatctcctacttacacaatgccccttctcttgctcctttgctcatggtgtttacactggctttctccagtctctggttctcagtccccttacaaagatcctggattagatttgcctgcctagctctgcctgattgggattacacattgtgtagtgccaacatcacacgttcggcatctacggtgtgtgcacggcactgcactaagggttttacacccattctccatttaatcctttcaacagccttgtgaagtagatagtattacttcatttacatatgaagtaactgaggctcatgaggtnccgggagtcttctncccgaagtcannnn

SEQ ID NO: 24341 - DNA, 5290 bp, Homo sapiens
  misc_feature 5028, 5029, 5030, 5031, 5032, 5033, 5034, 5035, 5036, 5037,5038, 5039, 5040, 5041, 5042, 5043, 5044, 5045, 5046, 5047,5048, 5049, 5050, 5051, 5052, 5053, 5054, 5055, 5056, 5057,5058, 5059, 5060, 5061, 5062, 5063, 5064, 5065, 5066: n = A,T,C or G
  misc_feature 5067, 5068, 5069, 5070, 5071, 5072, 5073, 5074, 5075, 5076,5077, 5078, 5079, 5080, 5081, 5082, 5083, 5084, 5085, 5086,5087, 5088, 5089, 5090, 5091, 5092, 5093, 5094, 5095, 5096,5097, 5098, 5099, 5100, 5101, 5102, 5103, 5104, 5105: n = A,T,C or G
  misc_feature 5106, 5107, 5108, 5109, 5110, 5111, 5112, 5113, 5114, 5115,5116, 5117, 5118, 5119, 5120, 5121, 5122, 5123, 5124, 5125,5126, 5127, 5128, 5129, 5130, 5131, 5132, 5133, 5134, 5135,5136, 5137, 5138, 5139, 5140, 5141, 5142, 5143, 5144: n = A,T,C or G
  misc_feature 5145, 5146, 5147, 5148, 5149, 5150, 5151, 5152, 5153, 5154,5155, 5156, 5157, 5158, 5159, 5160, 5161, 5162, 5163, 5164,5165, 5277, 5278, 5279, 5280, 5281, 5282, 5283, 5284, 5285,5286, 5287, 5288, 5289, 5290: n = A,T,C or G
ccacgcgtccgaggtaatctaaaaaggacggaggaacagcattattttccagtgtgctttcatttagaaatctaactgctgatttatcactcaataatgctacactggaaaataatgcaggtaatctaaaaaggacggaggaacagcaaggtttggatgaagggtttgactctcttacagatcagagcactggagagactgatcctgatgatgtatctggagtgcagcctaaaggtcatattaatacgaagaaaaatcttacagctctcaatacttccaaagtagatcacaatgtcccaaggcatcgttgtatgttatgtaacaaggaatttttaggtggtcacattgtaaggcatgcccaggctcatcagaaaaaaggcagttttgcatgtgtaatatgtggtaggaaatttagaaacagaggacttatgcagaagcatttgaagaatcatgttaagaagatacagaggcagcaaattgctgcagctcaacaggatgatcaggaagtcactgctttggaagaaataaattgttctagttcttccatttcatttgaaaatgggaattctgatagtaaggatttggaagtggagacacttactgcttctagtgaaggaaacaaagaagtcatccctgagcatgtggctgaattcattgaaattcccataagtgtaccagaagatgttattgaaaatgttattgaaaatggcagtcctaataattctttaaataatgttttcaagcctttaactgaatgtggggatgattatgaggaggaagaggatgaagaaggtgattatgaagaagatgattatgacctgaatcaagaaacttcagtaattcataaaatcaatggaactgtgtgccatccaaaagacatatatgccacagatcaagaaggaaactttaagtgtcctgctcttggttgtgtccggatatttaaaagaattgggtttctaaataaacatgcaatgaccgtacatccaaccgatttaaatgtgcgacaaacagtaatgaagtggagcaaaggaaaatgcaaattttgtcaaaggcaatttgaagattctcaacattttatagaccaacttaatagacatagctatccaaatgtgtatttttgtttgcattttaattgcaacgagtcgtttaagctgccgttccagcttgcccagcacacaaaaagtcacaggacatttcaggctcagtgtagttttccagaatgccatgagctttttgaagatcttcctctgctgtatgaacatgaagctcaacactatttaagtaaaacaccagagtcatctgcacaaccaagtgaaacaattctttgggatgttcagacagactcaaatcctaatcaggaaaaagactcatctagtaatgagaaacaaactattagtctgccagtttctactagcaaatcaaggaaagagtctacagaaccaaagacatgtatagaaagtatggaaaagaaaacagacagtttagttcagaatggaaacgaacgttctgatgacactgtttcaaatataagcttgatagaccaaaagatgcctgacatagagccaaattctgaaaataattgtagtagtagtgatatagtcaatggacacagtgaaatagagcaaacacctttagtttcatcagatcctgctttgaaaattgatacaaacagaatcaggacagaaaatggttccattttgcccagtgttgtaccacaagaacacaacaccttgccagtatctcaggcaccttccaaaccaaatctgacaagtgaacatacttcatatggcttaattttaacaaaaccatacgtcagaccattgcctcccagttaccttgatgaacggtatcttagtatgccaaaacgcagaaaatttctgactgatagagtagatgcctgttctgatcaagataacgtgtataaaaaatcagtgaaaagattaagatgtggcaaatgcctgaccacctactgtaatgcagaagcacttgaggctcatcttgcacaaaagaaatgtcagacactctttggatttgattcagatgatgaaagtgcctgatgaaaatggttcagaaagatctgtcaatcaagcagtagtgtgaaaaaagcactataagaaaatgcatcatcagtttgctatttccctgatggccttaattttagagtggtcttggattactaaagataaagacaaagcacattttctagaatgaactcacagagatgtgctggcttagactccaaaaggattataaaactcccaaagtaccagttttccagaaaaccacattttacagtttatgatgattaatagcagcagcatgttcagtttcgcttatatgagaaacatgtttaggcaactagtcagaaaaccagctatggccttacagaaagggaaaagtttaacccattattaaaaagtgtgtgtgggaggggggctggtttacaatattaaaccatttaaagtattttattctacaaatggggtttgttttcttgtcatgcataatcagattatgtcccctcccttctggttaaacatggtttaaggaaccgctgctgtttggtttgtgattgatttagaaacttatacattaacttaccacagtgctatcaattaaagattgtaacaggtttccagatgattaattaggtcaaagttcaatgaatggcacgccagcattgaaaattaaaaaacaaaacaaaaaaaaaaccacagtgctttgctaataagctcttgatagaacctcccactaaccacttttgtggtacaaattagttaacatttaaagggcagcagtgtcaataaaatagaaaaaaaccgatcagtactctggggagagatgaaaggaatctaagactttacaggctttgtagttgaaggaaaacactgaattgcaaattattcaatgtgaataatggtaaaagcacactgggatacttctgtttgtgtatatgttgggacattgcttgatgattcatagtaaggtcctttagacattaatgtgagttatctaagtacagtcctattaaaataactggctcaaaaaatcagctaagaatcaggttgagaaatcattcattttattctattaggagaggtaattccaaaataagccatactattcctgtttttttaattcattagtgatgactctggtctgaacagtaatttttatatgtaaaaggaagtatttacacaaaacatttgcacaagaacacagtaagagatacattcaagcattgttttccttagtgatgttattttcctaagaagattttaacttaataaagtgttaaaacaataaatatttttaaaaataccctctcagatgttttccatttgtccattattgaaaggaagatgcttaaagacttccttttactaatagtgtgtaaatctaaaacagggattaaaataacaaaaaggcagtgtttcaaaacagatctcctaatgtcccaatgtcaaatattccagttattctaaataataaaatctttgttcaaggcagataatctcatcagaccctattagagcttcttgaatgaggctattacggaagtggggaatttcttccaggtagcatccatattttattaaattaggatttccagatcatgatagatcagatgatttttttttaatttcccggttttattggtttatcatcagcattcactgctatgcaatgatggtcataagtccattccaaatttaaatttgtttctgttatgtagcctacattaggctgtggaatttacatttaggtaactaaacacagctcataattaaaatcttttctttaaggtcagctaaaaaaaatgtttcctgtatttcttgatactaaaaatgtaatgatttttattttagttcattctaaaagtatgtcttgtaatacttttgaaatatttctgctttgtacattttccagaagtttaatattttatcacattttccacaagttgtaacaattgatataaatccatgcccacaaagtattccattttcattacttttactgttcatgccaagatgtttcaaatatattccatttgtaatctgtctttaacttgaggtttatttctacttctgtgttgctaaaattatttctgcaagactgagatcaaactggtttatatataactaaatcaaggaatgttttataaaattctatttgaccacactgtcttaacctcggtttatatacttctcaaatagctattgaaagaatgtgttcattttattacatctgtcttttaaaacataaacctacatcattttgcttttatagggtgcataaacttccaacagttctaatttgagcgcttcagaagaaaaggaagcttgcttcttattcctcagattcttcttttcttctgttttgaggatgtattcatcctacatggaccaagtttcaaatctttgtttttaaataaaaatttccttcaaaaaattaaatgttaaatttctgctgtgtgtcagtaaggtgaagaaaatagcaaatctgaatttttgctgctcagatattatggaggaggtaaaaaggggaatctccgtggacaaggacactggtactttgggctttagccatattcatttttttgaaaccaccaattatataatacttaaataatttatatcattgaacttgtgattcttttcaaatcacactgaaggttcagccgtactcctttcatgtttggtttaatactgttgtatggatgaaaaacctaaaagggatgatagtgtttattttttaatttatttggtactgtaaaacaccttttcagaatgagtaaatgctgcatatgcattttggagttgttaatatgtgaaagatattacagattcagcaagaaaggaaatttgtgcttccttgttgaatgttaaattattttactttgcattttataagagtacaaattaaaactgagccattgaactgcaataaatcaacaatagtgtctcatttcaagaaattttttgtactgtacatagatttgttcaataaaacgtccttgttggtaannnnnnnnnnnnnnnnnnnnnnnnnnnnnnnnnnnnnnnnnnnnnnnnnnnnnnnnnnnnnnnnnnnnnnnnnnnnnnnnnnnnnnnnnnnnnnnnnnnnnnnnnnnnnnnnnnnnnnnnnnnnnnnnnnnnnnnnnngggggggggctgtttgtttttttcataaaaaaaccccccaaacctgcccccgaatccggaaaaaaaaaagagaggctggggtgggtgaacattttttttgggggatttaaannnnnnnnnnnnnn

SEQ ID NO: 24342 - DNA, 1013 bp, Homo sapiens
  misc_feature 469, 486, 1011, 1012, 1013: n = A,T,C or G
acattctacatgcacggcataagaacagagagaaatacaataaatgtgacagtattttcaaatattttgtttctgagacattttgataagcaaatatcatactagaagggttcttctgagaattattacatcctatcctaacctgtgaatatggaacttgattattttcccatgatgacttgatggaaaccactcgccaaccaacaacaacaaaaaggagagctcatttacaacaatgcagtcatttatttattgagtatgtgcacattatggtattattactatactgattatatttatcatgtgccttctagttagaaaatgtatccaaaagcaagacaccagatatacaaaattaaagagccagaagatagacattaacagataaggcaacttatacattgagaatccaattccaatacatttaaacatttgggaaatgaggggacaaatggaagcaagtcaagtntgtgtaaactatcagtnatgttcccctgcttcatgtctgagaaggctctccttcaattgggatgacaaagctccaaatgccacacaaactataaaagggctcctaatgtagtactgcttgaaaatggtacatttttgttgtagattattttaaacataatgctatagtaatattttgaagatgtgagctgttatttccatttgtttttacactgtgactaaatgattaggttttagttttagactctaagcggaacctgaattaataggaaataaacacggtactatagttgtcctatggtgcccctatgggtgatgggttccaagaaccccctaggatactaaagtccatgatgttcaagtcccttatagaaaatggtgtagtatttgcatataacctgtgcacatcctaccatacactttaaatcatctctagattacctataatagctaatacaatgtaaatgctttgtaaatagttgttatactatattgtttaatgacaaaaacaagtttgtacatgttcagcaaaggcgcaaccannn

SEQ ID NO: 24343 - DNA, 655 bp, Homo sapiens
  misc_feature 650, 651, 652, 653, 654, 655: n = A,T,C or G
actttgcaagttttcttcttttaaaacaataatttgagtttttttttcttccttgccactaaattcaaactcattcatgtaagtaataagaatttccaccaaatgaacatctgctaagtattgagggacacaaaaaagagaaatcttaaaaaaaaaaaaaaaaaagtacctttggagaagttcttatggtgcaggtcaagaaagatcttaagactggtcattcaaaggggtttggctttgttcgttttacggaatatgaaacacaagtgaaagtaatgtcacagcgacatatgatagatggacgatggtgtgactgcaaacttcctaattctaagcaaagccaagatgagcctttgagaagcagaaaagtgtttgtggggcgctgtacagaggacatgactgaggatgagctgcgggagttcttctctcagtacggggatgtgatggatgtcttcatccccaagccattcagggcctttgcctttgttacatttgcagatgatcaggtatttttctccttaacgatatgtcccggccgggcgtggtggctcatgcttacagtcccagcactttgggaggccgaggcgggtggatcacgaggtcaggagatcaagaccatcctggccaacatggtgaaaccccgtctctannnnnn

SEQ ID NO: 24344 - DNA, 816 bp, Homo sapiens; identical to SEQ ID NO: 21390

SEQ ID NO: 24345 - DNA, 689 bp, Homo sapiens; identical to SEQ ID NO: 21367
  misc_feature 1, 2: n = A,T,C or G

SEQ ID NO: 24346 - DNA, 816 bp, Homo sapiens; identical to SEQ ID NO: 21390

SEQ ID NO: 24347 - DNA, 1046 bp, Homo sapiens
  misc_feature 1044, 1045, 1046: n = A,T,C or G
actactctcagtgttggagatcatcaaaatacaattggaccagaccctttggaaataattctgtgtctcaaatgccctgtggagcacacacttaatcagttgatggctatggaattttccaacatcagctaaagagaaggagtggtgacttccaagcttcatgcagaaccggacaacagaaattgagagggaaatttctatgacagaagagagaaagaagaaaattgctggaataatgaccttgaatagaggaaatgggatatcatctggtaagcaaatagagaagctggctttagataagagcctggacaattcattcatagaatagcagaaaaggcagaatttatgtccatagatgcaagtggtatagtagatatagtgatgggagtttgtaaaagttaccttctaattgctattttttttaatgaaataagaaacaaagtcatcaactcaaagtgagtaatatgtaggaggtgattattgtttgaggagagaggagaatgtgtgatatcttttgttaattatggtaaaatataacacaaaatttgccattttaaccattttaagtggacaattaagtgtcattaattacattcacactgttgtacatctgccaccactatcttcttctaaaactttttatcacctcttatagtttaaattgtgcccccacagaagatatgttggagtcctatcccttaatattaatgtgaccttatttggagataggatctttataaaggtattcaaattaacatgagatcattagggtggaatcctaatccaatatgattagtgtccttataaaaaggggaaattggacacagaggcaagcacacagggagagtgccaagtgaagatgaagaaaaagatcagagtgatacaaagaagtcaaagaacaccaaagattgcaacaaaacaccagaagctaggagaaaggctgaaacatatccttcccgatgccttcagaggggagcgtgcgcctgcagacaacttgatctcagacttctaccctatggactgtgcaaactactgtcctgtggnnn

SEQ ID NO: 24348 - DNA, 646 bp, Homo sapiens
  misc_feature 527, 585, 622, 638, 644, 645, 646: n = A,T,C or G
acatagggatacttgagcttttagaattacttttttatatttcccatcccagagttttactttttgcctgggctgagaagcacttcatttagtcagtcagtaatcatttactgaatgctataagcatcaatgggtatggggcacaggagagagatgaaatagagtctttacccttagggagctaacaacataagacaaattagtgtgtttggggaacattgagtaaagagcaatcatttgaagaggaatgtgcaaaataaatttattagaccaattgtaaatgatttgagattctttattaagaattattcatatcactgttcccattattaatctaatgtctgtagatagtatgaagtaacaggcttcctttgccccttctaaaccagtcttaatgagaacactaatttaagcatggaagcttcagtgtttgaggcttttcattttaggttttcctttcaaattatagcttatgtaacaatatcaataatttgaaacagtatgcaacatgttagccttactaatangcttttcctttcttccatagggctttctacaagtataagagacttacagaattttaangtcttattacaacacagtagggtaataaagggctttnatgtgtctaactaggnggacannn

SEQ ID NO: 24349 - DNA, 380 bp, Homo sapiens
  misc_feature 1, 2: n = A,T,C or G
nngcaacttgctttctgattcataattttattaaagaacttagtagaaagaaaagtaagtataaaaatagatattggattctgtcagaaggcctagatttgaaatagtgttttgtacaattatgaacaaaagtggtaataagttttttccttgtgccattcctgatttcaaagagaatgcttccaatgtttgctcatttaagataatgttaacttttggattattttatagatgcttttagtcaggttaagaactatcctttctcatttctaattgaagaagagtttttaaaatcataagtgggttttaagtttgatgaaagacttatctattgaaatgatcttttggttatctgtattattctgtaaatgtggtaaggt

SEQ ID NO: 24350 - DNA, 816 bp, Homo sapiens; identical to SEQ ID NO: 21390

SEQ ID NO: 24351 - DNA, 2538 bp, Homo sapiens; identical to SEQ ID NO: 20316
  misc_feature 2538: n = A,T,C or G

SEQ ID NO: 24352 - DNA, 3266 bp, Homo sapiens; identical to SEQ ID NO: 23004
  misc_feature 1, 2, 3266: n = A,T,C or G

SEQ ID NO: 24353 - DNA, 4361 bp, Homo sapiens
  misc_feature 4358, 4359, 4360, 4361: n = A,T,C or G
cggacgcgggggcggctgcgccgggctgtgagtctctcgccgccggaggaagatgaggctgaagattggattcatcttacgcagtttgctggtggtgggaagcttcctggggctagtggtcctctggtcttccctgaccccgcggccggacgacccaagcccgctgagcaggatgagggaagacagagatgtcaatgaccccatgcccaaccgaggcggcaatggactagctcctggggaggacagattcaaacctgtggtaccatggcctcatgttgaaggagtagaagtggacttagagtctattagaagaataaacaaggccaaaaatgaacaagagcaccatgctggaggagattcccagaaagatatcatgcagaggcagtatctcacatttaagcctcagacattcacctaccatgatcctgtgcttcgcccagggatcctcggtaactttgaacccaaagaacctgagcctcctggagtggttggtggccctggagagaaagccaagccattggttttgggaccagaattcaaacaagcaattcaagccagcattaaagagtttggatttaacatggtggcaagtgacatgatctcactggaccgcagcgtcaatgacttacgccaagaagaatgcaagtattggcattatgatgaaaacttgctcacttcgagcgttgtcattgtcttccataatgaaggatggtcaaccctcatgagaacagtccacagtgtaattaaaaggactccaaggaaatatttagcagaaattgtgttaattgacgatttcagtaataaagaacacttaaaagaaaaactggatgaatatattaagctgtggaatggcctagtgaaggtatttcgaaatgaaagaagggaaggtttaattcaagcacgaagtattggtgctcagaaggctaaacttggacaggttttgatataccttgatgcccactgtgaggtggcagttaactggtatgcaccacttgtagctcccatatctaaggacagaaccatttgcactgtgccgcttatagatgtcataaatggcaacacatatgaaattataccccaagggggtggtgatgaagatgggtatgcccgaggagcatgggattggagtatgctctggaaacgggtgcctctgacccctcaagagaagagactgagaaaaacaaaaactgaaccgtatcggtccccagccatggctgggggattatgtgccattgaacgagagttcttctttgaattgggtctctatgatccaggtctccagatttggggtggtgaaaactttgagatctcatacaagatatggcagtgtggtggcaaattattatttgttccttgttctcgtgttggacatatctaccgtcttgagggctggcaaggaaatcctccgcccatttatgttgggtcttctccaactctgaagaattatgttagagttgtggaggtttggtgggatgaatataaagactacttctatgctagtcgtcctgaatcgcaggcattaccatatggggatatatcggagctgaaaaaatttcgagaagatcacaactgcaaaagttttaagtggttcatggaagaaatagcttatgatatcacctcacactaccctttgccacccaaaaatgttgactggggagaaatcagaggcttcgaaactgcttactgcattgatagcatgggaaaaacaaatggaggctttgttgaactaggaccctgccacaggatgggagggaatcagcttttcagaatcaatgaagcaaatcaactcatgcagtatgaccagtgtttgacaaagggagctgatggatcaaaagttatgattacacactgtaatctaaatgaatttaaggaatggcagtacttcaagaacctgcacagatttactcatattccttcaggaaagtgtttagatcgctcagaggtcctgcatcaagtattcatctccaattgtgactccagtaaaacgactcaaaaatgggaaatgaataacatccatagtgtttagagagaaaaaaataaaccaataacctacctactgacaagtaaatttatacaggactgaaaaccgcctgaaacctgctgcaactattgttattaactctgtatagctccaaacctggaacctcctgatcagtttgaaggacattgataaactgtgattttacaataacattatcatctgcagttactgtttacaagactgcttttaccttaaactttgtagatgtttacatctttttgttgtgttttaagatgatgttggtaatttgtgcctttagctctgttttattagacagagttaaagcatgttgtcttctttgggattacactcaggggtctgaaaggcagtttgatttttatttttaacacacttgaaaaaaggttggagtagccagactttcatatataacttggtgattatcaacctgttgtgtctttatttaattttacatctttttgaagcactgccacaggttattagccaaggtggccttccttcacagtcatgctgcttttttgaaaggtgaatttcaacacatttagtgcctctttcatttctcagtatatatttcaagagcttgtgatgaaatctataggatggtaatgatggacttgtcacctgtatggggaatacttttactactcagaaatgaatttatgtgctgccatttgctataaagttgaactttgtatggcttgaaaaagaaatgacaatatggaacatcccaaggctgtcccatagggttggaagttgtgtagcattcactcccttacctactggcattcccagtgccctctgtccatacctacttctaggattgcaaaggagtcttccaactagagaaaaattgtccactgacatttgggatttacttttctccaatacctgccaatacagaaaactattatcagttgttattgttatcccttgaaagcgagggtgacaaaaacaacaaaacaccgttataaacacatcaaaggttcattctgactgaggtaagactttccaagcccttgttagattaggccttataaaacttgtgtgcattataacctaagctgtgcaacctgtgaagccaagagtgaactgatgtttcatttatattttcatccaaatgacattatctgcacgtttttaaaatttaaaaacaaaggactatttaaaaatacagtttattaacaaacgtgaactactttctgttacattaggtgttccctagtgtttcttaatttctttttagaaagtgtatttttattagtatttttccggtgaacagaagatttgtttggatttaaacatttactaagacagtacctattaggaaaaccaaatattgcaaatggtcaattcgattttaatttctcaaaagatactctgttatccagaagattaaaatgcctacattgagtgcttaaaaaaaaaaaaacaactgtgatgatgtgagcagaatggcaagtaagttaagcatttttgatcctgtaatcatggtatcattacaatgaaaggaattcacaaactactgccagaggaagtttgttttttaatttaagagggaaatataacctataaatttgtttcttccaagcttagctcttaaatttggagactcaaagttaaacatcctcaacagagttttatttataattttgaattgtcaatttgtattttgctactgatctgtgatcaaccattttaactttcatctctagggatgtttaacatttataattgcaaaataaaccaactataaaaaaagaaactaagagagaattggtactttaattacttgtgtgtttgcaaataggctccattttccatgttgagtagattataaccttattaactatgcataggcctaagaaaggtggcaatgaactgtgcatgtaaattttaaatgggtactttgtgcaattcgttaaaagaagatactctatgaatatgattctatatattgaaatcagaaaacctaccaaacaaaaacatcagaagctgctgccataatgactattttctactgtaggctgctttggaaataattcccatatccttgctttgtaagttggtaatatcactatgcatttctacacattttataaatttgatttatgcagattttgatacactgtatgtttctgtagaaattgtataaatattcaaaattttattaggataaatttgagaaacttacgtatatcttaattctgggttgcttgttttttaggtgacaaaaataaaatattgtaaaaaaaaaaaaaaaaatttgtggcggggccaaaattaaaaattgggggcccagaaaaggaagaaagggaaggggtccaaagggggtgacaannnn

SEQ ID NO: 24354 - DNA, 2305 bp, Homo sapiens; identical to SEQ ID NO: 24214
  misc_feature 1, 2305: n = A,T,C or G

SEQ ID NO: 24355 - DNA, 1859 bp, Homo sapiens; identical to SEQ ID NO: 21466
  misc_feature 1859: n = A,T,C or G

SEQ ID NO: 24356 - DNA, 1431 bp, Homo sapiens; identical to SEQ ID NO: 23843
  misc_feature 1, 2, 3, 4, 5, 6, 7, 8, 9, 10, 11, 12, 13, 1431: n = A,T,C or G

SEQ ID NO: 24357 - DNA, 1137 bp, Homo sapiens; identical to SEQ ID NO: 23096

SEQ ID NO: 24358 - DNA, 1380 bp, Homo sapiens; identical to SEQ ID NO: 20118
  misc_feature 1380: n = A,T,C or G

SEQ ID NO: 24359 - DNA, 2007 bp, Homo sapiens
  misc_feature 1, 1998, 1999, 2000, 2001, 2002, 2003, 2004, 2005, 2006,2007: n = A,T,C or G
ncgtccgcattttgcgactagttcgttggtgaatctcaattgggtttttatattagtaggtttgattacaattttagagatcaaaagtaattttagaaactaaaaattaggagaccaaggcgggtggatcactttaaggtcaggagttccagaccagcctgaccaacatggtgaaaccgcatctctactaaaaatacaaaaattagcgaggtgtggtggcaaacatttgtaatcccagctactcgggaggcctaggcaggagaatcgtttgaacctgagaagtggaggttgcagtgagccgagattgcaccactgcactccagcctgggtgaccaagcaaggctctatctcaacaacaacaacaacaacaaatggatcaggaaggcgaggatttggaggcccttgttggatgtgagggtcaggaaaggcatccttcagtgcttctcttgctagttccagagtcatccttccccgtcagaatgattggcaagaatttgtctcactctgagctgcacctgccctatactgtcattcatgtcatcaactgacatgacctctggctggtggagtatcagtgtcccaggcttttgggtttggggagggttggaaagtaagtgggaacccaacatcaatgactgacatgattttgccatggtaggaacagtggaaataaaaggccactcttggtaacttgttccccgagactgtacatcccacattgacatatctgagggctcttgtcaaaagccagccctgccccagtatgtggcagccagaagtgccaggaagttaagacctgggaagcagctttcaatcagtgacacacagagtctgtaaatatggtccccgctcctgcctggggtgtgccaactcttacatgtatacttacactttgcctagagcttcttcaccagatcaagcatctgtccgtcacagtggtagctggctttgtaacccttaattttttggctacattttcttactggggttccctttgcctaccagataaactacttgtactcacatcatcatcataaggtcagcttccatgaaaacctgaactgaggactatcagtgtagctttataaaacaagtggtattttatctgttaacaataacatagctcagaatttttaaaaaatgaataaatttaactggaagaactcttagtgttctgtcattttgtcacagatatgcaccagccagtgaataatgttttcagcataatttcagttagtcttggatgtaaattaacactggtgagtgtgtgttcacttccacatggccataagcctgttatcatctattttcttccctatcctttatgttctggctgatggttctcagctgttgaatcctgttcgcttccttcatgcctctgtcccagatcctttttagtaagatctccttattttttaaaaacactactttttcctcttcatagtcctgaagtctctggtggtgtaatcactcctaaccacacagcattgcctctgcgccgcggctaccaatatctggaagaactggagtgtccagtttgcagcattttctgaaaatctcaaaaaaatccaataggcagcctttctaacaacatgataaattcagaatactatgcaagttctttttaaaataattgctattcttatacaaattgctggttgggggtgggggatatattttttcatatattttcatagggttcaaatggaagtggtaaggaaatctgaatagctaatgaaatagctgtgttttgtaaaaagaaatgtaaaagctattaaaatgttacattaaaatccacttgagatgcctaaaatgtactcagcagctctttgcatgtgtgaaatttcatatcaaaatgctttatttacatgggaagagaaatttccattacaaaacataaactgacatgaacgattatttcaaaatagtattgtgtagctaatttttaacaatttggagcactattataaacacaaagatgactcacaagttatctcnnnnnnnnnn

SEQ ID NO: 24360 - DNA, 1913 bp, Homo sapiens; identical to SEQ ID NO: 21117
  misc_feature 1, 2, 3: n = A,T,C or G

SEQ ID NO: 24361 - DNA, 1906 bp, Homo sapiens
agcgacaacgtcgatgctgctgagctcgtggagaccattgcggccacagcccgggagatagaggagaactcgaggcttctggaaaacatgacagaagtggttcggaaaggcattcaggaagctcaagtggagctgcagaaggcaagtgaagaacggcttctggaagagggggtgttgcggcagatccctgtagtgggctccgtgctgaattggttttctccggtccaggccagaagccttttaaaaggtccctgcgaggttcagatgctttgagtgagaccagctcagtcagtcacattgaagacttagaaaaggtggagcgcctgtccagtgggccggagcagatcaccctcgaggccagcagcactgagggacacccaggggctcccagccctcagcacaccgaccagaccgaggccttccagaaaggggtcccacacccagaagatgaccactcacaggtagaaggaccggagagcttaagatgagactcattgtgtggtttgagactgtactgagtattgtttcagggaagatgaagttctattggaaatgtgaactgtgccacatactaatataaattactgttgtttgtgcttcactgggattttggcacaaatatgtgcctgaaaggtaggctttctaggaggggagtcagcttgtctaacttcatgtacatgtagaaccacatgtttgctgtcctactacgacttttccctaagttaccataaacacattttattcacaaaaaacacttcgaatttcaagtgtctaccagtagcacccttgctctttctaaacataagcctaagtatatgaggttgcccgtggcaactttttggtaaaacagcttttcattagcactctccaggttctctgcaacacttcacagaggcgagactggctgtatcctttgctgtcggtctttagtacgatcaagttgcaatatacagtgggactgctagacttgaaggagagcagtgattgtgggattgtaaataagagcatcagaagccctccccagctactgctcttcgtggagacttagtaaggactgtgtctacttgagctgtggcaaggctgctgtctgggactgtcctctgccacaaggccatttctcccattatataccgtttgtaaagagaaactgtaaagtctcctcctgaccatatatttttaaatactggcaaagcttttaaaattggcacacaagtacagactgtgctcatttctgtttagtatctgaaaacctgatagatgctacccttaagagcttgctcttccgtgtgctacgtagcacccacctggttaaaatctgaaaacaagtacccctttgacctgtctcccactgaagcttctactgccctggcagctcgcctgggcccaactcagaaacaggagccagcagagcactctctcacgctgatccagccgggcaccctgcttaagtcagtagaagctcgctggcactgcccgttcctacttttccgaagtactgcgtcactttgtcgtaagtaatggcccctgtgccttcttaatccagcagtcaagcttttgggagacctgaaaatgggaaaattcacactgggtttctggactgtagtattggaagccttagttatagtatattaagcctataattatactctgatttgatgggatttttgacatttacacttgtcaaaatgcagggggttttttttggtgcagatgattaaacagtcttccctatttggtgcaatgaagtatagcagataaaatgggggaggggtaaattatcaccttcaagaaaattacatgtttttatatatatttggaattgttaaattggttttgctgaaacatttcacccttgagatattatttgaatgttggtttcaataaaggttcttgaaattgttaccag

SEQ ID NO: 24362 - DNA, 1784 bp, Homo sapiens
cttatttttcccacttgcgttatgatggtatcaataagagtgcagtttagatttttttagttttttaaaatcaactttcacataaaaatatgcatgtgcctatatttatacacatctgtatttacgtacaattgtcaaagtcttaaaggctggggtttatatctctgcccatcccctcccaaccccaaaatccctaatagaaaggttttcatcttgcttaaaaagacaaaacaactaaaaagactatagctcttagcagtcaggctggtggatcagtgaatgagagaggacaaattggcgaatcagggctgccgatcagccgcacggggcgcggaggatggggttggggggattagctgccttgggctgagtttgctggtcctgaagattacagttttggttagagagagaagcctgtctagcatgctgactcggtctacctcaagctttgaaagtaatgtctaaccctgctgccagtttatcacaagtgcattaaaaatatagagaaccatcaagttccacatttatatgcaatcaaactgaaaaggaccagacaaacagtgcaaaggtcaaataattactgttttatattgggacagtacatttcagatttcaaccaaaagacaaaaatgcagtttaactcaaaggcacaacaattgaaacacagaaaataatggcatctcttggatgccttatttctaaattaaacaaagaagtacacaaattttgttcccttccctcccccagtgcaagcccacaagctttttccaaagtcttgagcttttgatgctgtcccgcattgtggacttgtgaggcgcttggatgtagcaatgaaacaaaatgcttgagaggtctagtgaatggcattcaaaagggacctcaaagtgcagacatatctttttcaaatatgttacaggctgaactggctctttgaacactatcactctgcttaaatccaggaagcaggctttaaaaatgcaaaaggcatacaagttgtatttcagtgcaaatctttagctggttattggaaaagattccaaaaattaaaaaaaaaaaaaaaaaatcctttgtgtcacctgcccctccccccacccaaagccaaaatgaagaaaagacagaacaaaacaaaaacagaagaattacagatgactttggaatcatttaggaatccactacttccaatcagaatgtttagaaaaatacattaaagaatcattttttaaaaaacacaaaagtaatcttgctttctgagactgctcttcgggtatagaatgagcttccgtgtggagtgcgtttgaactttgaccttagctgtgtgcgaggtgcaggcgctgggggagcttcaggctgtggtgtgcgagtgaccgcaggggagcgtggggtggctgcccgctgccgagtcagccgttgagcccttaggtcgcagtgcgtccgtggattttagtaatgttctcatcactttgtgacacactctgcttcagcatcacagattttacaaatggttcaaattcaatgaaaaagattcgccagaggctgaaaacatcaagacctcaaaaatatgaatgcaaaaatattcaggggaatgaactaattttgtagatacctacatacaaagtttctagaacatctataaaaccacaaagtcataagaatttgttttccattacattagtttatataaaatgaataaatagtatttatagatttaatgtgtcttatgtacatatacatgtgctctgttttagcttaaataaaaatgctacaaagtcggagcggacgcgtgg

SEQ ID NO: 24363 - DNA, 1411 bp, Homo sapiens
  misc_feature 1, 2, 3, 4, 5, 6, 7, 8, 9, 10, 11, 12, 13, 14, 15, 16, 17,18, 19, 20, 1411: n = A,T,C or G
nnnnnnnnnnnnnnnnnnnnacaacgaaaactaaagcaacatatctttaattcaaaactaaaaaactggtcagttaatatggaaataattatatatctattgaaaccaagaacaatttcatgtagaacattcaggtaattggcagaaaaaaaaatcctgttttaatgaccaagaatgactcccaatacccgacatcagcactctcagtatgtaatggtaaaaggggggcaaaaaatcaccttttcccatagggaaacgagtggtgggagtgcaggtgagctaaagatgcccatctatgctcacacagacacaaaaaaatataaacacactcttgtgacgagtgtggcaaatctaaggactgtcaactacataaaagacagaaccatcagaagttccaggaaattagtaaagtcatggtcagtatacaaattaggaaaaccaaggatgagcagctttgaagtaatgtgcatcttggctgaaatatttcaactgtgataatcacagaaacatcagtcatgtactgtgtacctgcaacagtggctcaacctgttaggtctacgtattacctgcaacacttaagcagaagtgccggctccaaccatatttttgtctaaattagcaccctcgggcttgggaccaggaatgtatagtttgggaaggctgcgtgtgagtttaatgtgcaaaatgtgaacttctaatcactggtcaaccaaaacaaatcctccttctaaaggaagaaaataaaacccccaaagtcagcaggactctttaaaccaaatttatgtagttaacgaggattaggaaacaaggaatcctcagaaatgcttttcagggtaattaagcaatgtggtattggccaattcaactgaccttagaaactctgagactagttttacgaactcttctaggtgcattttgagtccaattagcatgttaagtgatctctttttaaaaatactaaacagaatttaagatttatcagcaataagagaaaatgaagcataaatcatttttcaaggacatttagactatacagtgacatacagggacagacatgtacaattcgtgcatgagggcatgaggccactctacaatactaaccaggctttaattaaaggaaatgacaaaggatttttttaaaaagtggatgctcttaaaaaggcgttgaaactacattagaaaaaatatattaaaacatggtacaaataaatgacaatgctgaatacatcaccattaaaaaagaccattttgaattttatgcagatcttcatgtcatgcttatgattttagcatctttccagaaatgcttaactcataaaaatcttgaatttgataaaactgttaagttcatacattactataaaaagtcttatcacaggaatttttatggtgacaagatatagttgtgaan

SEQ ID NO: 24364 - DNA, 666 bp, Homo sapiens; identical to SEQ ID NO: 21473

SEQ ID NO: 24365 - DNA, 2538 bp, Homo sapiens; identical to SEQ ID NO: 20316
  misc_feature 2538: n = A,T,C or G

SEQ ID NO: 24366 - DNA, 777 bp, Homo sapiens; identical to SEQ ID NO: 24253
  misc_feature 1, 777: n = A,T,C or G

SEQ ID NO: 24367 - DNA, 1214 bp, Homo sapiens; identical to SEQ ID NO: 20119

SEQ ID NO: 24368 - DNA, 1782 bp, Homo sapiens; identical to SEQ ID NO: 21380
  misc_feature 1766, 1767, 1768, 1769, 1770, 1771, 1772, 1773, 1774, 1775,1776, 1777, 1778, 1779, 1780, 1781, 1782: n = A,T,C or G

SEQ ID NO: 24369 - DNA, 825 bp, Homo sapiens
  misc_feature 1, 2, 3, 4, 825: n = A,T,C or G
nnnncccctgctgttgcttgctggggtacgtgtggccgttgagtgccggcgtgcgtgtgcgtgtatgcgagcgtgcggccccctagcttttttattctcccctttgcggacctggttgacactgctgacacctgttctcattcgttatgtgtggacactgaactccaccaagtttggaatcttcatggtgcagttaaaaagccacctgaggctcctgaaggccatgtctcaccactggcagctgggcagaagcccagcctctgtgtctgtagcccaggcctctaccccagtagcaggtggagggccaggattggtgggtgagctttagggagcagctgctcgtttggagtcctggacgttggagggattacccactactgatacctgcagaatggactgcagaaaagtctcaaaaataatgcctttattccttccctccctaaggaggcaaagagttgatttacctttgtgaagagaaaacccttatctaggacatccacagggtagaggttgggtgtgtgtacgggagtgtctgaggcccagtgtgttttttagggttaccccatgtaaagcacttaccgctgtgcttggaattcagcagctgtcaaaggtgcaatttcaggggcagggaacctttgaggatctgggcccgaccctcactacccctgagatattagttcccaggcctgttttcccacaggattgtgggctctctgcttccttagtcggaagtgttttcaactaatcaaataaatgaatgaatgatgaataagaaaaagaaaagaagaaaaaagtcgacgcggccgcaagtttagtagtagtagn

SEQ ID NO: 24370 - DNA, 365 bp, Homo sapiens
acaaaatcgcttcttgacctgcacaactttctgatttgatgagttcaacagaaaccaactcaagggagaagaataaagacattgttgaacttagactttgacaagataagcaaaaagaaaagcaagagatatggaactgaacttccctttggcaaaaaatttagaaaatgataatgaggaacatcgatttcagcataccttaagccttttgaacagacttgtcgatactctcttggaaaagtatttttaaaaatagaattgaatatttttaaactttcatcccaatagaaagctaaagttaatgaggaaacttggattcatttcacaaaacgttgcttgttggagtgcaatggtgcgatcttggc

SEQ ID NO: 24371 - DNA, 2133 bp, Homo sapiens; identical to SEQ ID NO: 21530
  misc_feature 1, 2, 3, 4, 5, 6, 7, 8, 2133: n = A,T,C or G

SEQ ID NO: 24372 - DNA, 1782 bp, Homo sapiens; identical to SEQ ID NO: 21380
  misc_feature 1766, 1767, 1768, 1769, 1770, 1771, 1772, 1773, 1774, 1775,1776, 1777, 1778, 1779, 1780, 1781, 1782: n = A,T,C or G

SEQ ID NO: 24373 - DNA, 1659 bp, Homo sapiens; identical to SEQ ID NO: 24195
  misc_feature 1, 2, 1659: n = A,T,C or G

SEQ ID NO: 24374 - DNA, 945 bp, Homo sapiens
cccacgcgtccgctaacatgaagctaccggccagggttttctttactctggggtcccggctgccctgtggcctcgctcctcggagggtgatgaacagcctccttctaaatcattgaccacatttcttattctttcctgaggataaatttcaagatatcctgaaccaactgatgacagcctatttagctacaggaatactctggaaggaaatgtttttcagttatgggacaaaaatattatatcaaaacactgaagctttgcaatctaaattcttttcacctcttcaaaaagcgatgctaccacctaatagttttcaaggaaaagtggcattcattactgggggaggtactggccttggtaaaggaatgacaactcttctgtccagcctaggtgctcagtgcgtgatagccagccggaagatggatgttttgaaagctaccgcagaacaaatttcttctcaaactggaaataaggttcatgcaattcagtgtgatgtgagggatcctgatatggttcaaaacactgtgtcagaactgatcaaagttgcaggacatcctaatattgtgataaacaatgcggcagggaattttatttctcctactgaaagactttctcctaatgcttggaaaaccataactgacatagttctaaatggcacagccttcgtgacactagaaattggaaaacaactaattaaagcacagaaaggagcggcatttctttctattactactatctatgctgagactggttcaggttttgtagtacaggggcacatgcagattcttcatgtccccatcacaacctgtcatgacatcacactgaactgagtttgtgtggtctaagtctgtccgccccaacctttactcaaaacgttccttaaggaactaggattggattgtttttatttctttgtttttgtttttaatccctgaaatttcgtcc

SEQ ID NO: 24375 - DNA, 1001 bp, Homo sapiens; identical to SEQ ID NO: 21314
  misc_feature 681, 682, 683, 684, 685, 686, 687, 688, 689, 690, 691, 692,693, 694, 695, 696, 697, 698, 699, 700, 701, 702, 703, 704,705, 706, 707, 708, 709, 710, 711, 712, 713, 714, 715, 716,717, 718: n = A,T,C or G

SEQ ID NO: 24376 - DNA, 816 bp, Homo sapiens; identical to SEQ ID NO: 21390

SEQ ID NO: 24377 - DNA, 1952 bp, Homo sapiens
  misc_feature 1952: n = A,T,C or G
tcttttctttttctctttctcttttattttttttttttaaagattacaggcataagcgaccgtgcccatccccgataaagttgagttctgaatttcctctttcactgtattctcggcagctactggttggtttattctttttttttaatcttttttggtttattcttcttttgatctttgaagagaaggagaaaaaagatctgagtttggctctcccatcttaagtgcagcttttagttgttttatagtcatagacgctattgcactggacagcatgcatcctggatgtaaacaatgcggaaaaatcaatggagtgaccatcttggggtcagtggtgttgcataaagcaccagtggtgtgctgttctgtgtcagtttcctctgcgccacgtgctttcacagtttgaattaccagcatctctgtggtggcttcagtacattctccattgtgcttcaacctggaagcacattctgccgttcagaaagactgattccaatcatgtaatgggaccacacgagatccatgctccaattatatgaatagcagaaggtccatttgactcttgtagttcaagagctgtttctaagtaaacagactttccagagctcgatgaagtgaagaagcccttctttcaattcctgggcagaattcagtggttttcatatcatctgaacctgctgtgctgctgtttattctatcactgtcagccttgaaaggaaaaaaggaataatcttaccctcctgcccttcttattttatatcttccatcttatccatctatatccatgtagtcattccttccgagttccctggttttaatccaaaagactctgtttaacagcaatgtcttggcagaccaggtgccgcttccgtgccatttgagggctctgagtctttgcttcgtcttaggaagataaagataatttggcagaaagtcagagatggaaatagcagtttgggatgataaaagatgggtcctgttttgctgacattcttttactttggttcttggtgcgtgtcctttgggattcatttcttgctagcatgaataggacatgcttttcgttaggtgcttttcttttttggagaacatgaagtgtttctaacaaaactgaatgagctagaaagaattctattttgagacatctgtagttgatgcaaagtatttctgtaatcctcaatgacagtacttacatatttgcatagaatttttttttaatttttgaggaaacctctctggagtctgtatttataggagcatcctgaaagtccctattatgtagctggtgggagcgagagagggacagccacactcgtgctgtgagcagagcacaacttcaggcagagtgaatgccttctgagttctcattggaagctttctgttgctcagcctctggcagatttcagaaccttctacttaagccaggtgtggtggtgcgtgctcctaggcacagcgactcggggggctgaggcggaaggatcacttgagcccaaagttggaggccagcctgggcaacatagcgaggcctgtctccttaaaaaataaataaataaatattaaataaataaataaataaaaaccttgtccttgactattgtgctgtctgctgcccctttgtagggatggggttggggtcagaataagcatgtgcatgaatggcggaaagctttggtggtgtttgtatgttggtagttttttgagaggtgggggagtcagcagtgaactttctggttaaagaacaacgtacataatttctattatgagatttagaacgttcaaatacctttctttttctcaggcctacccagtttgatagacccaaagtatttggttgaacagaccggctcgaaacatttacaggtgaattccttatggtccacacgctggtcgccacgtcctaccttctaattttgccgggaatgggctcttgactgggggccgatttcactaan

SEQ ID NO: 24378 - DNA, 311 bp, Homo sapiens
  misc_feature 1, 2, 3, 4, 5, 6, 7, 8, 9, 10, 11, 12, 13, 14, 15, 16, 17,18, 19, 20, 21, 22, 23, 24, 25, 26, 27, 28, 310, 311: n = A,T,C or G
nnnnnnnnnnnnnnnnnnnnnnnnnnnnattctttcatggacatctgttgcccatggtcaagtaaatttttaatgacacatagtcactacacacctgagcggctggagagcctgttggagaaacacaaagagctgcattaatactacattgtcaaagacaaagacgaacatgagacatgcgatatgagttttaaaaggagagaagagcaaaaaaaacaatacagctatccaaggagcaagtgctgagcttgtgaaaaaacagcttctattttattaaataatagtgttcctgcagggatgtctgaagtann

SEQ ID NO: 24379 - DNA, 681 bp, Homo sapiens
  misc_feature 1, 2, 3, 4, 5, 6, 7, 8, 9, 10, 11, 12, 13: n = A,T,C or G
nnnnnnnnnnnnncggggtacttctagaattaattaacgcgggggggcgcggcgcgggtcctccatatgctgagcgccggtcccctgggcccacttttctttctctatactttgtctctgttgtctttcttttctcaagtctctcgttccacctgaggagaaatgcccacagctgtggaggcgcaggccactccatctggtgcccaacgtggatgcttttctctagggtgaagggactctcgagtgtggtcattgaggacaagtcaacgagagattcccgagtacgtctacagtgagccttgtgggtgaaggtactctacagtgtggtcattgaggacaagttgacgagagagtcccaggtacgtccacggtcagccttgcgacatttaaagttctacaatgaactcactggagatgcaaagaaaagtgtggagatggagacaccccaatcgactcgccagtctacaggtgtatccagcagctccaaagagacagcaaccagcaagaatgggccatagtgacgatggtggttttgtcaaaaagaaaagggggggatatgtaaggaaaagagagatcagactttcactgtgtctatgtagaaaaggaagacataagaaactccattttgatctgtacccagaaagagtcatacctggagcagcagaaaaaattgaaagaact

SEQ ID NO: 24380 - DNA, 1698 bp, Homo sapiens
  misc_feature 1, 2, 1698: n = A,T,C or G
nnaagacctgtagactcaagcactttctctgcttttttgtatcttatcttggacacttatgctgaattatgttcttattattttcactggttataagctattccttgtacataatatttaaactatccaaatatccagcatacatttccatgtggctgccatcggctgttgatgccatgaatgaaatggctggttagaaagccaaaggtcttcttttttcaattcctaatgaataagtaaaatgccagatctctttggtctcaaagcaaattgctctgatcagatcaaatatctatgtaatgaaaagagacttacttaaatttgggattctgcttaaactttaagttgaatttgactgtagtcattcattctttttatatatctctgtcaggtatgacattaattaccaggtggtattatactctactttgagtttggacatcactttcagttaaatttctgttgttattgtggctttttttttttttttttaaccccactgaagatggaagtagagcagtctgccatctcctgctgttctttctctgtgccccctaattgcttggtaatctaaaattattctgactttccacatactgtctttaaaaaccaattgtagcaatctgcccgcctccaccctttaagctaaatctttcactgtgctggatacatagacactcgataaatgtgtgatgatagttctaaaataattatgctatatatcagggttctgtatttttgagcaatatcattattcctatgctgtgatgttaaatggaatttattttacactagtaatagactgcttaagtggctgatttgaaacctttctctaaaaaaacaaaaacatctggcagatgagtgacacaaattcattctcttaaaggatagaatttcaagttaaggataaggcacaataaataggcacatagaggacatctgtttttgtttttggttttggttttgtttttttttgtctctctgactagctaaactgccaactagaagaatggttgttatgtagtaactcagaagaatcttttaataagtttcttcttttgtttcaaaacaaacttgagcttcatttcttgccacctctattctttcttcccacgttgggtgactgaactgatgcttattctagttttagaagaggatccacatttaatgtaaggcataaatatgccttttgcaaattattgcttgttctccagtgaacatttgatcatattcaacagaaatccaccatataaaccataatccttgaattgccccttttaaaatagattggttaaaaccaaaaacctataagagagaaatgatatttcattgtattgtaggtttgggaatcctggttagatttataatttctggccgggtgcggtggctcatgcctgtattcccagtactttgggagcccaaggtgggtggatcacctgaggtaaggagtttgagaccagcctggccaacatggtgaaaccccatctctactaaaaatacaaaaagttagctgggcatggtggtgcgcgcctgtggtcccagctactcgggaggctgaggtgggagaatcccttgaacccaggaggcacaagttgcagtgagctgagatcatgccattgcactccagcctgggcaacagagcgagacttcatctccaaaaaaaaaaaaaaaaaaaaagtgcggccgctagactagtcn

SEQ ID NO: 24381 - DNA, 816 bp, Homo sapiens; identical to SEQ ID NO: 21390

SEQ ID NO: 24382 - DNA, 2538 bp, Homo sapiens; identical to SEQ ID NO: 20316
  misc_feature 2538: n = A,T,C or G

SEQ ID NO: 24383 - DNA, 859 bp, Homo sapiens
  misc_feature 1: n = A,T,C or G
nactttttgtttagaataagagaatttaaaaaatatccagtaatgagatacttagcaagaagtcaaatataaagccctttgctgttctttactgggacatactttttatgaaactatcctcatctattagggtagatgctgcagtgagctgcccagatccccttcagcaccaaggccctaactctcccagctgctgggagtacaatagtggtcctgaggtgacgtatatcctcagcttacaaagataacaggattaagagattaaagtaagacaggtgtaagaaattataaaagtattaattttggaaactgataaatgtccaagaaatcttcacaatttatgtttcctgatgcagcaccagctggtccctccattcggggtccctgacttcccacaacagccaggctttcttgggcagaggttcctgtggctttccacagtgcattgagcccctggttaatcgagaatggagaatggcgatgacttttaccaaacatactgcctgcaaacatattgttaacaaggtacctgccgccttccattttttttcagtatgttttcactggcttatgttttcagatatgattttcctttttcgcatatatggtttaataaatgggggataattttttttgtaaatccgtgcttgtgccaagtctcatatttctttgccatctcagaattatctttttaccaccactgtttataaaatttccttagagactttttgaagggaaaatagagcaacagggaaaaatgaaagaaatgtcttggttactgagctctaaatagacaggtttgatggcgcttctcatgatacattttagttattcttataaaagcaaacaggcaaacatg

SEQ ID NO: 24384 - DNA, 1782 bp, Homo sapiens; identical to SEQ ID NO: 21380
  misc_feature 1766, 1767, 1768, 1769, 1770, 1771, 1772, 1773, 1774, 1775,1776, 1777, 1778, 1779, 1780, 1781, 1782: n = A,T,C or G

SEQ ID NO: 24385 - DNA, 478 bp, Homo sapiens
acgttcaattctgcttaatcatcagatgatgcatactggagagaaaccttataaatgtaatgaatgtggtaaagcttttatcgaaaggtcaaacttggtttaccatcagagaaaccatactggagagaagccatacaaatgtatggaatgtggcaaggcgtttgggcggcggtcttgcctcactaaacaccaacgaattcattctagtgaaaaaccttataaatgtaatgagtgtggcaaatcttacattagtcgctcaggcctcactaaacatcagataaaacatgctggagagaaccttacaactaaactcaatgtggaaaggccgttagatgttgtcctaacctctgggatccccaaataatttatactgactcatatagcttgtatattcgtccttgccctttgaagtctcatgtggaattgtagtaatctccagtattggaggtggagcctagtgggaggtgattggatgatg

SEQ ID NO: 24386 - DNA, 337 bp, Homo sapiens; identical to SEQ ID NO: 24200
  misc_feature 337: n = A,T,C or G

SEQ ID NO: 24387 - DNA, 1214 bp, Homo sapiens
  misc_feature 1, 2, 3, 4, 1214: n = A,T,C or G
nnnnccaagttcactgagactcgaaagatgtttgagagaagtgtgcatgaatcaggacagaacaaccgctattccccaaagaaagagaaagctggagggagtgaacctcaggatgaatggggaggttccaagtccaacagaggcagtactgattccttggacagccttagctcccgaactgaggctgtctccccaactgtgagtcaactgagtgcagtatttgagaacactgattctcccagtgccatcatttctgagaaggctgaaaacaatgaatactcagtgactgggcattatcccttgaatttaccatctgttactgttacaaatcttgacacatttggtcacctgaaggattctaattcctggcctccttcaaacaagcgaggtgttgatacagaggatgctcacaagagtaatgcaactccagtacacctcataaaagaagcatactgacacttttatgttcatcttaaaaaccagaaacttctaggaaatagcaacaatttgttttttaaaaagagtttggcaaaaaccatttctcttggacacccaaagaaagggaaaaaaatttattaggtccaggaatcaaagatgacttgatagaattatgaatacatgcagaattggatggttagaaatgaaatcaatctatttaggtccagcctaaggttctgatagccaatcagtagacacaatcagagtagtagtattcctaagaaaccaggataaatctccaatgtgcatgagtttagtgaaccagatagattattgtatcgccaatatccacccttatcccattctcagtcagatgaattttcttgctcatgaggtccacattgaaaacagcatgctcagaaatgggggtcttctcggtgtactcctttcccaggacaggaactcgtcgaggccccaacagtggatcatcaaatctcatcagtttcactttggaaaggtctttaattcctcgattcattttcattaaacgcctgattatggaatcactggtcacacagagccacaacacattcatctgacgacctggacatcacttgtttctctggttccatgtaaataagtgcatctccagcgtcaatcatctttttctgaatagtctttcttaaatcttgaaccttctgtccttttaatccatccaccaacatgataccctcataaaatccttttagaaaaatcctctcctttgcttccggcan

SEQ ID NO: 24388 - DNA, 636 bp, Homo sapiens; identical to SEQ ID NO: 24178
  misc_feature 1: n = A,T,C or G

SEQ ID NO: 24389 - DNA, 602 bp, Homo sapiens
acaagcgcaagccactgtgcccagctgtcagacgctgagttttaattatgcaccaaactccagcccgcagatcctcttcaccaaagcccctggctggtctagcccatcatgacttctctaggaacagtccttctttaggactataaagtattaacaaaagtctgtagattaaggagcctgcataaagaattctggatacaggcccctgtctttccaaagttcctctccaatatcccttggggtcctcatgtttttgaagcagcttcactctgcacaggcagcaggaggttgggggagccatagctctgggccacggaggcagatttatttggatgataggactaatatttgtgtaacctgctgagacctgtgtgggagagtttagggtggtttttcttttggtgaggggatttgctctggtttcacatccattaacacaaaacatgagctagtcagggcccttgtggtctgcggtaaggggatgcctgtggagaaatgggcctgagtgagtcaggccaagagaatgtcttccttcagaatggagtcaactggataactgatgagccccatggtgggattaaggagggggaaatgggagggga

SEQ ID NO: 24390 - DNA, 2928 bp, Homo sapiens; identical to SEQ ID NO: 21437
  misc_feature 1, 2, 3, 2928: n = A,T,C or G

SEQ ID NO: 24391 - DNA, 1412 bp, Homo sapiens
  misc_feature 1317: n = A,T,C or G
cacctgtaatcccagctcttcaggaggctgagaacaagaatcgcttgaacctgggggcggaggttgcagtgagctgagattgcgccactccactctagcctgagcaacagagcaagactccatctcaaaaaaaagtgcaagataatgaatttggggtaaataattcacagtcaagagctctgagcacttggattcaaaaagagagcatgagggacattaaatatggttctccctggaaatgttggtccactgtactgatgtgggctgagagagccaaccaaatccaagtggggttttgtcaggaacggtattggaaactctgaactagataaataattcaaaggatattagctaaagtgatcagggaccaggacaggaaggtactgttacaaacggagagaataaaagggcaaactgaaataatagatcctggaatagcacagacactgacctctgaccacagaccaaaagttagggcctagttgtatttcttagaaatacaaagaaaacaagtttagaatcatagaaaacactgttaacacattagcctgggaggtggtactattggaatgagacgcagcacgagccgtatcccctcatgctacctggctgcagccccagctgtcctctggagaggtttgctgagctggttggccctgtgatccctcaagactggtccacggagtgtatgaccacaaacagccatcaaggtactgaggacagtacagattagtgtgcacagagaatctctgtacaaagagtagctgccccttctcagggcagatgatgctttgagaacatactttggccattacccccagctttgaggaaaatgggctttggatgattattttatgttttagggacccccaacctcaggcaattcctacctcttcacctgaccctgcccccacttgccataaaacttagctaagttttgttttgtttttcagcgttaatgtaaaggggcagcagtgccaaaatataatcagagataaagcttaggtcaaagttcatagagttcccatgaactatatgactggccacacaggatcttttgtatttaaggattctgagattttgcttgagcaggattagataaggctgttctttaaatgtctgaaatggaacagatttcaaaaaaaaaccccacaatctagggtgggaacaaggaaggaaagatgtgaataggctgatgggcaaaaaaccaatttacccatcagttccagccttctctcaaggagaggcaaagaaaggagatacagtggagacatctggaaagttttctcccactggaaaactgctactatctgttgncatattcctggtcacaattattgcgggttccgcaactaaaaataaacctcctgggccctggtccggaacatgagttctttaagaacaatatctaa

SEQ ID NO: 24392 - DNA, 4100 bp, Homo sapiens
  misc_feature 4100: n = A,T,C or G
gcgtccgaggaaaaggagtcgtatagggctatcaataggtgcctcccactaaattttcggaaagatgaattaaaaggcatttataaagatcgaatgaaaattggagcaagccttgccgatgttgatccaatgcaactagattcttcagtacgatttgatagtgttggtggcctgtctaatcatatagcagctctaaaagagatggtggtgtttccattactttatccagaagtctttgaaaaatttaaaattcaacccccaagaggttgtttgttttatgggccacctggaactggaaagactctggttgccagagcacttgccaatgagtgcagtcaaggggataaaagagtagcatttttcatgaggaaaggtgctgattgtctaagtaaatgggtaggagaatctgaaagacagctacgattgctgtttgatcaggcctatcagatgcgcccatcaattattttttttgacgaaattgatggtctggctccagtacggtcaagcaggcaagatcagattcacagttctattgtttccaccctgctagctcttatggatggattggacagcagaggggaaattgtggtcattggtgctacgaacaggctagattctatagatcctgctttacgaaggcctggtcgctttgatagagaattcctctttagcctgcctgataaagaggctcgaaaagagattctaaagattcacaccagggattggaatcccaaaccactggacacatttttagaagagctagcagaaaactgtgttggatactgtggagcagatattaaatcaatatgtgctgaagctgctttatgtgctttacgacgacgctacccacagatctataccactagtgagaaactgcagttggatctctcttcaattaatatctcagctaaggatttcgaggtagctatgcaaaagatgataccagcctcccaaagagctgtgacatcacctgggcaggcactgtccaccgttgtgaaaccactcctgcaaaacactgttgacaagattttagaagccctgcagagagtatttccacatgcagaattcagaacaaataaaacattagactcagatatttcttgtcctctgctagaaagtgacttggcttacagtgatgatgatgttccatcagtttatgaaaatggactttctcagaaatcttctcataaggcaaaagacaattttaattttcttcatttgaatagaaatgcttgttaccaacctatgtcttttcgaccaagaatattgatagtaggagaaccaggatttgggcaaggttctcacttggcaccagctgtcattcatgctttggaaaagtttactgtatatacattagacattcctgttctttttggagttagtactacatcccctgaagaaacatgtgcccaggtgattcgtgaagctaagagaacagcaccaagtatagtgtatgttcctcatatccacgtgtggtgggaaatagttggaccgacacttaaagccacatttaccacattattacagaatattccttcatttgctccagttttactacttgcaacttctgacaaaccccattccgctttgccagaagaggtgcaagaattgtttatccgtgattatggagagatttttaatgtccagttaccggataaagaagaacggacaaaattttttgaagatttaattctaaaacaagctgctaagcctcctatatcaaaaaagaaagcagttttgcaggctttggaggtactcccagtagcaccaccacctgagccaagatcactgacagcagaagaagtgaaacgactagaagaacaagaagaagatacatttagagaactgaggattttcttaagaaatgttacacataggcttgctattgacaagcgattccgagtgtttactaagcctgttgaccctgatgaggttcctgattatgtcactgtaataaagcaaccaatggacctttcatctgtaatcagtaaaattgatctacacaagtatctgactgtgaaagactatttgagagatattgatctaatctgtagtaatgccttagaatacaatccagatagagatcctggagatcgtcttattaggcatagagcctgtgctttaagagatactgcctatgccataattaaagaagaacttgatgaagactttgagcagctctgtgaagaaattcaggaatctagaaagaaaagaggttgtagctcctccaaatatgccccgtcttactaccatgtgatgccaaagcaaaattccactcttgttggtgataaaagatcagacccagagcagaatgaaaagctaaagacaccgagtactcctgtggcttgcagcactcctgctcagttgaagaggaaaattcgcaaaaagtcaaactggtacttaggcaccataaaaaagcgaaggaagatttcacaggcaaaggatgatagccagaatgccatagatcacaaaattgagagtgatacagaggaaactcaagacacaagtgtagatcataatgagaccggaaacacaggagagtcttcggtggaagaaaatgaaaaacagcaaaatgcctctgaaagcaaactggaattgagaaataattcaaatacttgtaatatagagaatgagcttgaagactctaggaagactacagcatgtacagaattgagagacaagattgcttgtaatggagatgcttctagctctcagataatacatatttctgatgaaaatgaaggaaaagaaatgtgtgttctgcgaatgactcgagctagacgttcccaggtagaacagcagcagctcatcactgttgaaaaggctttggcaattctttctcagcctacaccctcacttgttgtggatcatgagcgattaaaaaatcttttgaagactgttgttaaaaaaagtcaaaactacaacatatttcagttggaaaatttgtatgcagtaatcagccaatgtatttatcggcatcgcaaggaccatgataaaacatcacttattcagaaaatggagcaagaggtagaaaacttcagttgttccagatgatgatgtcatggtatcgagtattctttatattcagttcctatttaagtcatttttgtcatgtccgcctaattgatgtagtatgaaaccctgcatctttaaggaaaagattaaaatagtaaaataaaagtatttaaactttcctgatatttatgtacatattaagataaatgtcatgtgtaagataactgataaatattggaactttgctagaacaagaccctgtagtaatagtaataatagttgaagtttggccaactcttaataaagttattttggtaactaatgttttatggcacttaagaataattagcagcgttaaattttgtttgtattaagcacttttaattttatccttcctaaaaatagtttattgtatctgacaagaaacttacttaaccattgtgtccttcccatcttttttgtcatctttgttttcttcaaatgccctcctcccatctgccttgagattcccttgtcttcacttaaaagccagagtgcaagtcatgatttgcgggagggctcttgaaccacttctggctgcaccacaattctgtacttgagtatcacagtcattgtttttgagacaaacatttttataattctaatttgggttaataaagattttaaatatttcttggtttacttttgtaattatatacacaacaaatgtattaataactaccttgttaaacaccttttaatagcacaaggtttttatatttgcaagctgttgatatctttctaaaactgtttaggttatagtctattgatacttttatatacaattttataatataaatattataatttcttttaggtaccaaaaatacatttcttaagggttaaaagcatgcacttcagtgatacggcttgggggagggggagacattctacaaaagggggagaagtcgtgggagacttggggagaggagggggtagaagaagggggtttggacgaaggttgtggggagtatgtttggaccaaaaattaaaatattgtgggagggaaaatttaagggatacaaggtagtaagaacgagaaacgn

SEQ ID NO: 24393 - DNA, 690 bp, Homo sapiens
accctggaagggacatctaaggctgccataagaaaaatgactggcagctaaaaatgttgtagaagttggaatcctgatggaatcataatgagtcagctaaaggaataatgattcttgccgctgtaagaataccacaatgactagtcaggatttaaatgggtagcaagttgcagtagggagaagggcagaagagtggcttcacacaaaattacaaagtcctatggaatcccattgttgcctctcagctgttcagttaagtcaaaattacaaatatttacttatttatctgatcactgaaaaatattgagtgttaaggcttgctgtgccagacacttggctaggtgtaggataaaagaaatagggagcttttgattacagtctagaaggtgagacacattatacatttatttgtgtgggtatctgttaagtgcgaagtgttaagtgctataaagaaaaagcatagggtagtagaagggagtttaaaaggaacacttccctgaacagaaatgggctataaactgagaccttagggatgggtaagtaacccaggccgaataagaagagtctcccaggaggaggacatgtgtgcgtgaaaattctgaggcaaggaactgcaagaaagcatatgggttgcagcacggtgagctaagggaaagtggaacacagtgaaatggaaggttgctttgttgt

SEQ ID NO: 24394 - DNA, 770 bp, Homo sapiens; identical to SEQ ID NO: 20288
  misc_feature 765, 766, 767, 768, 769, 770: n = A,T,C or G

SEQ ID NO: 24395 - DNA, 3205 bp, Homo sapiens
  misc_feature 1, 3204, 3205: n = A,T,C or G
naccccgcgtccgacaaattgctatctgtctagattgtttacgaaataatgggcaatcaggggacaatgtagtaaagggtttaatgaagaaattcattcgatgttctacacgtgtaactgtgggaactattaaaaaatttctaagtttaaaactaaaacttccaagttcttatgagttggatgtgctgtgcaatggtgaaattatggggaaggatcatactatggaattcatctacatgacaagatggcgactaagaggcgaaaactttcggtgtctgaactgctcagcttcgcaagtctgctctcaggatggccctttgtatcagtcataccctatggtactgcagtatcgaccaagaattgatttcggttagaccaaggggcccagacctcactgagatgaatcctgcactatttgtttactcgtcaacagattgcacagttaacggtgtgtggactagaggaacacaaccagattttcagcatgcaaataaggccattgtctatctctaaattgtcagttgcattcatgttgtttctattaggagcaaaccaagtgccattctgctactgaaccatctgcataaggtatttgtgttgtctcaaagtgtgcaagtcatggtaaaaatcagttagctgtgccgccatgattcacccttctgaatattttgcttgcctgttccaagattgttctaatgtttaattacactagtaaaatggctcaatttttgtggtgttgcagttttcacatacttactcttttattcttgtttaaatagcgtactctacaagaaactaataattatatcttgaaattattttgtatggaaatatatttagaaaagtggtttttgagccactgtcttgttcttgataagctttttgtgtgaaaaaaagttcattcttgagtgtgcaagtccttttgccaagaattccaattattctgtaacattagagcacaatataattgtagacattctaagcatctgtccgtgtagtctaccaattgcacaaggaaggcatgttagccctccagattgaaaatgtatgtgacctcttgaactgaagttagattcccaaccattcaaaatgttggcagctgatcacatttacttctgataaagtaatgtgtaagtaaggttaatcttctttcataatgccttatgacaagcaggtgctgcttcatgaaacgtcattgtatagcccatttcatgtatcattacattgttgctgttatttaatgagtgcattatttctctttttaagttggccttaggtatatgtcattgtggcatgcagagggttatgacgattttaaatattaggatttttagagcacataacattagctattttatggatttcaaaagtctcaaaacagttgtagattaaaactgttagttacctttcacatttccaaactatgtgcataaaatagaataaatgcagtatagaactatgctaaccaaaattaataggttaagggtattttattttaaatcctgtagtaattggggaaatgagaagattattattttatacatgagttcattaagatcagaaatacaaaatgtcctgtattttgcagttttgttaagtcttccattcgttttaggattagtctgcaagtcaaagaaagtcttgttaccttaaattatatgaaaactgtcattttaaatcttttaatatttacagttttcaaaaaccttacttggaaattgctttgaaacaaacaagctaacctttgaaacttaggaaaaaatcttgaaagttaggaaaaatatttgagaaatatgacgagcacaatctgtgtgttacacacatttagtttttatactgcatatgtggtaaatgtgtcacattttccagtaaaatgtatcagaaatcaatgccttctgaatttcaaaatgattcttagaaataagatattgtacaactctagcaaacatacaaagtacagctaaatcttaatatatttcactatgtaaaaggctgaaacttcataattatctgttccttctatctttttttgagtcaaaaagtctattaaatttttctgttgttgttccaactttggtgaaaaaggttatggcaatactttaactttgttttgttacattgtttttgttcttggaatggctcacaagcagaatttaaaaggcagattttcattaactataaatggctgaaaaaactgaatttactatctagctacagaaattatttttctatggtgtgaaactgttcccagacatccctaagaacttttacaaattattataaatttgtcacacctaggtcagcgattaaaatagtgttttgcaaatggaattttaattaactcaaaatgaattaagagtgcattttaaaaatcacaagtgagactttgatgttttggccccccagccaaaacttaatggtcataaatgaattttatctacaaaatctctttaaatttggctggttgccttgtcatatgtaatttcactattttccaaggaaatatataggaagcaattatgaaactgagaatagttttatatagaattcttttatttactgataatgcattaacatttttattgaaatgcaatggaatatgtgccaaaacacgtgaaaagcttacataaagaaaggcatcagttgtcgtttggagaaaggtacacatttttttgatggtcctaagtgatatggtattactactagaatcacagatttcttcaactgacttattttggtatattcaactacagctttctaaggataggactactttcatgtctagtaatacactgtattccccgttaattatcccttaagtcagattgtagaatttgcaagaaactaggtatagaaaaaatgtacaggcaacttttgtggttagctttataaatttagggtgcttataaaatgataaaatgaattctttaaataacctataggaatcatctgaatctgtaacatcagagactaaaactaaaagttttctttaatctgttgtttcttaagcaataaactgaaagacctttacttccataaaagattttggtatctcttttatctggcttacaaattataagtataaaagggtaaagggaacttagatataaagaatgactgtggcttataaacattactttaattgaagaaatcacatcacttaatagagaaatcaaaagatgtctggccttttctctagattann

SEQ ID NO: 24396 - DNA, 513 bp, Homo sapiens; identical to SEQ ID NO: 20543

SEQ ID NO: 24397 - DNA, 369 bp, Homo sapiens
  misc_feature 369: n = A,T,C or G
accaaaggtgatggggaagataaccgtccaggaatgagaggaggccatcagatggttattgatgttcaaacagagactgtttatttgtttggtggctgggatggaacacaagatcttgctgacttctgggcgtaccgtattagagatagcagttttggaggccaaatgttactgaatcctcttcctgatcagtatattaatatgaaaatgaaactgctctgtaacacaataaagaataaaatctttcatgaggtatgtattatcagtatgtatttcatgtctcaaatatattttaaatataatttcaggtttaatttgtctttttaatttgtgtctcttcatataatcacattgcttcatacaattaan

SEQ ID NO: 24398 - DNA, 915 bp, Homo sapiens
  misc_feature 1, 2, 3: n = A,T,C or G
nnncaagttttgctgggctgacccgtgctacacgatctccctatgcatcatgattaacttccggttagaacttgatagtgttgccaacacaggtgcagcctgtgacacacatatgcagcggtacaggttcgcaagtctctgacttgtgtcaatatactccctgatgaccggctatctgcacaaggtcatgatgaggctccaatgccatgacccagtgtggtaacggagtgtcggatgaaggcagagattaaggggtaaggtagggatgtcctggggcttgtggaaggcccagtagaaggaggcaaaggctccagcgaggacgcattggcccagggccagtacccagttaagggtccagaagagccccaggaccccatagatttgcagattgaagacagaacgttggattaggcctttggatgagtagccctggaagacgcacatcagccctgggcacgaggagttcacaaggtggccgtggggttgcatgatgtatttattggcactttctcacagccgggggagctgatgttggatgcccagagcacatactggggttgccccgatgtagccaggtacagagcagtcatggcccagtaggcaatgcagatgaggaggaggacaaaggtgaccagtgggtagaacatggtagacatcatctgtcccacagccacaagaatccataccaggactgggccaaatcttcaagatcttaacactgatgtctcgggcattgaggctgtcaataagaccgctgatcccctgctgtatggtggtgtcattggtgatcctgggagcgccggtcgaccgcgtgggcgacatggaaagcagcgccccagagctggagcagaggggaggaggaaactggggcagagttcctgttgcaggcttgtgatcaccgtcatattccagggt

SEQ ID NO: 24399 - DNA, 1214 bp, Homo sapiens; identical to SEQ ID NO: 20119

SEQ ID NO: 24400 - DNA, 561 bp, Homo sapiens
  misc_feature 559, 560, 561: n = A,T,C or G
ccaccgcgggggcgggcgaggtacacaagcgtgctgaagtggttggagaagagttcagtgaggacatcatgggtgagaaacttccgtaggttcaagccattctccagaaagaggcggacaaacttgggtctgtcctttatgagagccgtaaacatgacttcttgaaggtcagcagactcccatcggcggtcattggtgaaaatctcatcattggctaagtccagctggttccactccagcagaagcttcagctgcccattccagttatccttgtcttgctcactggtgctgaaggctttgtatagagcgtaggagatggcattgctcacaatttcatccccagcttcttccattttaataactgttaataggtgagaacattcgagaatttctttgagctggcgaaattaaagaacaaagtgtcagccaacagattttaggcatgaggagcataaacttctttctttttgtgagagatctttttaaaaagaccacctgtagtggagttccggatcagcttctcatttctgaattgcaatcagtccttgactacagtgannn

SEQ ID NO: 24401 - DNA, 2016 bp, Homo sapiens; identical to SEQ ID NO: 22771
  misc_feature 1, 2, 3, 4, 5, 6, 7, 8, 2016: n = A,T,C or G

SEQ ID NO: 24402 - DNA, 1418 bp, Homo sapiens
attggattgctggccagggtggctctgatatagcagccctggtgtattttcgatatttcaggaagactggcagattggaccagaccctgaattcttctagctcctccaatcccattttatcccatggaaccactaaaaacaaggtctgctctgctcctgaagccctatatgctggagatggacaactcaatgaaaatttaaagggaaaaccctcaggcctgaggtgtgtgccactcagagacttcacctaactagagacaggcaaactgcaaaccatggtgagaaattgacgacttcacactatggacagcttttcccaagatgtcaaaacaagactcctcatcatgataaggctcttacccccttttaatttgtccttgcttatgcctgcctctttcgcttggcaggatgatgctgtcattagtatttcacaagaagtagcttcagagggtaacttaacagagtatcagatctatcttgtcaatcccaacgttttacataaaataagagatcctttagtgcacccagtgactgacattagcagcatctttaacacagccgtgtgttcaaatgtacagtggtccttttcagagttggacttctagactcacctgttctcactccctgttttaattcaacccagccatgcaatgccaaataatagaattgctccctaccagctgaacagggaggagtctgtgcagtttctgacacttgttgttgaacatggctaaatacaatgggtatcgctgagactaagttgtagaaattaacaaatgtgctgcttggttaaaatggctacactcatctgactcattctttattctattttagttggtttgtatcttgcctaaggtgcgtagtccaactcttggtattaccctcctaatagtcatactagtagtcatactccctggtgtagtgtattctctaaaagctttaaatgtctgcatgcagccagccatcaaatagtgaatggtctctctttggctggaattacaaaactcagagaaatgtgtcatcaggagaacgtcataacccatgaaggataaaagccccaaatggtggtaactgataatagcactaatgctttaagatttggtcacactctcacctaggtgagcgcattgagccagtggtgctaaatgctacatactccaactgaaatgttaaggaagaagatagatccaattaaaaaaaattaaaaccaatttaaaaaaaaaaaagaacacaggagattccagtctacttgggttagcataatacagaagtcccctttactttaacttttacaaaaaagtaacctgaactaatctgatgttaaccaatgtatttatttctgtggttctgtttccttgttccaatttgacaaaacccactgttcttgtattgtattgcccagggggagctatcactgt

SEQ ID NO: 24403 - DNA, 9220 bp, Homo sapiens
  misc_feature 1, 2, 9213, 9214, 9215, 9216, 9217, 9218, 9219, 9220: n = A,T,C or G
nncgaccgggcaccgcgtgaggatgtgccgggcggtcctttcctcctcctcttcctcctcctcccggctccctgcctagtctccatataaaagcggcgccgcctccccgccctctctcactccccgctcctctccgccgcgcactctccgcggcgctgggagagggcggagggggaggcggcgcgcggcgccagaggaggggggacgcagggggcggagcggagacagtaccttcggagataatcctttctcctgccgcagaggagaggagcggccggagcgagacacttcgccgaggcacagcagccggcaggatggcgaccgtggtggtggaagccaccgagccggagccgtccggcagcatcgccaacccggcggcgtccacctcgcctagcctgtcgcaccgcttccttgacagcaagttctacttgctggtggtcgtcggcgagatcgtgaccgaggagcacctgcggcgtgccatcggcaacatcgagctcggaatccgatcatgggacacaaacctgattgaatgcaacttggaccaagaactcaaactttttgtatctcgacactctgcaagattctctcctgaagtcccaggacaaaagatccttcatcaccgaagtgacgttttagaaacagtggtcctgatcaacccttctgatgaagcagtcagcaccgaggtgcgcttaatgatcactgatgctgcccgacacaagctgctcgtgctgaccgggcagtgctttgaaaataccggagagctcattctccagtccggctctttctccttccagaacttcatagagattttcaccgatcaagagatcggggagttactaagcaccacccatcctgccaacaaagccagcttaaccctgttctgtcctgaagaaggggactggaagaactccaatcttgacagacacaatctccaagacttcatcaatattaaactcaattcagcttctatcttgccagaaatggaaggactttctgagtttaccgagtatctctcagaatcagtggaagtcccatctccctttgacatcttggaacctcccacatcgggtggatttctgaagctctccaagccctgctgttatatttttccaggagggaggggcgattctgccttgtttgcagtgaatggtttcaatatgctcatcaatggcggatcagagagaaaatcctgcttctggaagctcatccgacacttagaccgagtggactccatcctgctcacccacattggggatgacaatttgcctggaataaacagcatgttacagcggaaaattgcagagctcgaggaagaacagtcccagggctccaccacaaatagtgactggatgaaaaacctcatctcccctgacttaggagttgtatttctcaatgtacctgaaaatctcaaaaatccagagccaaacatcaagatgaagagaagcatagaagaagcctgcttcactctccagtacctaaacaaattgtccatgaaaccagaacctctgtttagaagtgtaggcaatactattgatcctgtcattcttttccaaaaaatgggagtaggtaaacttgagatgtatgtgcttaatccagtcaagagcagcaaggaaatgcagtattttatgcagcagtggactggtaccaacaaagacaaggctgaattcattctgcctaatggtcaagaagtagatctcccgatttcctacttaacttcagtctcatctttgattgtgtggcatccagcaaaccctgcggagaaaatcatccgagtcctgtttcctgggaacagcacccagtacaacatcctggaagggttggaaaagctcaaacatctagactttctgaagcagccactggccacccaaaaggatctcactggccaggtgcccactcctgtggtgaaacaaacaaaactgaaacagagggctgatagccgagaaagtctgaagccagccgcaaaaccacttcctagcaaatccgtgcgcaaggagtcaaaagaagaaacccctgaggtcacaaaagtgaatcacgtggaaaagccacccaaagttgaaagcaaagaaaaggtaatggtgaaaaaagacaagccagtaaaaacagagaccaaaccttcagtgactgaaaaggaggttcccagcaaagaagagccatctccagtgaaagccgaggtggctgagaagcaagccacagatgtcaaacccaaagctgccaaggagaagacggtgaaaaaggaaacaaaggtaaagcctgaagacaagaaagaggagaaagaaaagccaaagaaagaagtggctaaaaaggaggacaaaacacctatcaagaaggaggaaaaaccaaaaaaggaagaggtgaaaaaagaagtcaaaaaagagatcaagaaagaagagaaaaaagaacccaagaaagaggttaagaaagaaacaccgccaaaggaagtcaagaaggaagttaagaaggaagagaagaaggaagtgaaaaaggaagaaaaggaacccaaaaaagaaattaagaagctccctaaagacgcaaagaaatcatctactcctctgtctgaagcaaaaaaaccagctgctttaaaaccaaaagtacccaagaaggaagagtctgtcaagaaagattctgttgctgccggaaagccaaaggagaaggggaaaataaaagtcattaagaaggaaggcaaggccgcagaggctgtcgctgcagctgtcggcactggagccaccacagcagctgtcatggcggcagctggaatagcagccattggccctgccaaagaactcgaagctgagaggtcccttatgtcatctcctgaggatctaaccaaggactttgaagagttaaaggctgaagaggtcgatgtaacaaaggacatcaagcctcagctggagctaatcgaagacgaagagaaactgaaggaaactgagccagtcgaagcctacgtcatccagaaggagagagaagtcaccaaaggtcctgccgagtcccctgatgagggaatcactaccactgaaggggagggcgaatgtgaacagacacctgaggagctggagcccgtcgagaagcagggagtagacgacattgaaaaatttgaagatgaaggagccggttttgaagaatcttcagagactggagactatgaagagaaggcagaaactgaggaggctgaggagccagaagaggatggggaggaacacgtatgtgtgagcgcctccaagcacagccccactgaggatgaggaaagtgccaaggcggaggctgatgcatacatcagggagaagagggagtctgtggccagtggggatgaccgagccgaagaagacatggatgaggccattgagaaaggagaggctgaacaatctgaagaggaggctgatgaggaggacaaagctgaagatgccagagaggaggaatatgagccggaaaaaatggaagctgaagactatgtgatggctgtggtcgacaaggctgcagaggctggtggtgccgaggagcagtatggattcctcaccacaccaaccaagcaactaggagcccagtctcctggccgagaacctgcatcttcaattcatgatgagactttacctggaggctcagagagcgaggccaccgcttctgatgaggagaatcgagaagaccagcctgaggaattcactgccacctctggctacactcagtctactattgagatatccagtgagcccacccccatggatgagatgtctacccctcgagacgtgatgagtgatgagaccaacaatgaagagacggagtccccttctcaggaattcgtaaatatcaccaaatatgaatcttcattgtattctcaggaatactctaaacctgctgatgttacaccgctcaacggattttctgaaggatcaaaaacagatgccactgatggcaaggattacaatgcttcagcctctaccatatcaccaccctcttccatggaggaagacaaattcagcagatctgctttacgtgatgcttactgctctgaagtgaaagccagcaccactttggacatcaaagatagcatctcagctgtttcaagtgaaaaggtcagcccatcgaagagcccgtccctgagtccatctccaccatcacccttagaaaagacccccctgggtgaacgtagtgtgaacttctctctgacgcccaatgagattaaagtctctgcagaggcagaagtagccccggtgtctcctgaggtgacccaagaagtagttgaagaacattgtgctagtcctgaggacaagactctggaagtggtgtcaccatctcagtccgtgactggcagtgctggtcacacaccttactatcaatctcctactgacgagaaatccagtcatctccctacagaagtcattgaaaaaccaccagcagttccagtgagttttgaattcagtgatgccaaagatgagaatgaaagggcttcagtaagccccatggatgagcccgtgcctgactcagagtctcctattgaaaaagttttgtctcctttacgcagcccgcccctcattggatccgagtctgcttatgaaagttttctaagtgctgatgacaaggcttctggcagaggtgccgaaagtccttttgaagaaaagagtggaaaacaaggctctccagaccaagtaagtccagtttctgaaatgacttctactagtctttaccaagacaaacaggaagggaaaagcacagactttgcaccaataaaagaagactttggccaagaaaagaaaactgatgatgttgaagccatgagttctcaaccagcactggctctggatgaaaggaaattaggagatgtttctcccacacaaatagatgtcagtcagtttggatcttttaaagaagacactaagatgtccatttctgaaggtactgtctcagacaagtcagctactcctgttgatgagggcgtagcagaagacacgtactctcatatggagggtgtggcctcagtgtccacagcctcagtggctacgagctcatttccagagccaacaacagatgatgtgtctccatctctgcatgctgaggttggctccccacattccacagaagtagatgactccctttcagtgtctgttgtgcaaacacctaccacattccaggaaacagaaatgtctccatctaaagaagaatgcccaagaccgatgtcaatttctccaccagatttctcccctaaaactgcaaagtccaggacacccgttcaagatcacagatctgaacagtcctcaatgtctattgaatttggccaagaatctcctgagcaatcccttgctatggacttcagtcgacagtctccagatcaccctacagtgggtgcaggcgtgcttcacatcactgaaaatgggccaactgaagtggactacagtccttctgacatgcaggactccagtttatcacataagataccacctatggaggagccgtcctacacccaagataatgatctttctgagctcatctcagtatctcaggtagaggcctccccgtccacctcttctgctcataccccttctcagatcgcttctcctctccaagaagatactctatccgatgttgctcctcccagagatatgtccttatatgcctcactcacctctgaaaaagtgcaaagtctggaaggagagaagctctctccaaaatctgatatctctccactcaccccacgagagtcctctcctttatattcacctactttttcagattctacctctgcagtcaaagagaaaacagcaacttgccacagttcctcttctccaccaatagatgcagcatccgcagagccctatggcttccgtgcctcagtgttattcgatacaatgcaacaccatctagccttgaatagagatttgtccacacctggcctggagaaggacagtggagggaagacacctggtgactttagctatgcctatcaaaagcctgaggaaacaaccaggtccccagatgaagaagattatgactatgagtcttatgagaagaccacccggacctcagatgtgggtggctattactatgagaagatagagagaaccacaaaatctccaagtgacagtggctactcctatgagaccattgggaaaactaccaagacccctgaagatggtgactattcctatgaaattattgagaagaccacacggacccctgaagagggtgggtactcatatgacataagtgaaaagaccaccagcccccccgaagtgagtggttacagctatgaaaagactgagaggtctagaaggcttctggatgacatcagcaatggctatgatgactctgaggatggtggccacacacttggggaccccagctactcttatgaaaccactgagaaaattaccagtttccctgagtctgaaggttattcctatgagacatctacaaagacaacacgaacccctgatacttccacatactgttacgagactgcagagaaaatcactagaacccctcaggcatccacatattcctacgagacttcagacctatgctacactgcagaaaagaagtccccctcagaagcccgtcaggatgtcgatttatgcctcgtgtcctcttgtgaatacaagcaccccaagacagagctttcaccctctttcattaatcccaatcctcttgagtggtttgccagtgaagaacccactgaagaatctgaaaagcccctcactcaatcagggggagccccaccgcctccaggaggaaagcaacagggccgacagtgtgatgaaacccctcccacctcagtcagcgagtcagccccatcccagaccgactctgatgttcccccggagactgaagagtgcccctccatcacggccgatgccaatatcgactctgaagacgagtcggaaaccatccccacagacaaaactgtcacgtacaaacacatggacccacctccagctcccgtgcaagaccgcagcccttcgccacgccaccctgatgtgtccatggtggacccagaggccttggccattgagcagaacctgggcaaagctctaaagaaagatctgaaagagaagaccaaaaccaaaaagccaggtacaaagaccaagtcatcttcacctgtcaaaaagagtgatgggaagtctaagcccttggcagcttcaccaaaaccagcgggcttgaaagaatcctcggataaagtgtccagggtggcttctcctaagaagaaagaatctgtggaaaaggcagcaaaacccaccaccactcctgaggtcaaagctgcacgtggggaagagaaagacaaggagaccaagaatgctgccaatgcctctgcatccaagtcggccaagaccgccactgcaggaccaggaactaccaagacgaccaagtcatctgctgtgcccccaggcctccctgtgtatttggacctgtgctacattcctaaccacagcaatagtaagaatgttgatgtggaatttttcaagagagtgcggtcttcctactacgtggtgagtgggaatgaccctgctgctgaggagcccagccgggctgtcctggacgctttgttggaaggaaaggctcagtggggcagcaacatgcaggtgacactgatcccaactcatgactcagaagtgatgagggaatggtaccaggagacccatgagaaacagcaagatctcaacatcatggttttagcaagcagcagcacagtggttatgcaagatgaatccttccctgcatgcaagattgaactgtaaaaaccaaggccagccacaccacaggatctgaactttgtttccagaaattcttcaatttgaaatcaccttttctaaaaagtcaattcatctagttaagtcgctgaacaattacctgccaaatgctatactgtgtcatggtgatgcaagtcactaaatttctcagtttttgctgattgctaagggaaataacagtatttccacaatagggttcaaattcctgcaaaattacctaccccagttcatctctgctgaacatttggaaaccatgcactagccaacccaactgacttctgctaggtagaggcatttgtcttagagagagagagagcgcgggagagagtgagagagagtgagagcacaaagataacgcaggagagagagagagaaagaatgagaaagaaaaggaatgcaagagaaggagatgtaatgacagagagttctggtgagatacccagagagaaaaagagagagcagggtggggtaaggaggagaaaataaaccaacaattaggtctgcattttctcaggcagtaggcattctttagtctacataggcaaagttttccatttttgtcagtctgagtcatcaaaaagagtcttaattttctaaaacaagttggctagaagaaagtaaaaagaacaacacttgttatgagggcatgtgatattttcacatcttaattaagctccttcagtttgaaggctgcacactgacataatgtagtgagtgtagactggccatgcaagtggtttgggccccattcagaactctcagactctaaacacacaagtagattgatctaaggcatgctcccagcatttgtccacccacttagtccactctgagtcgattaacctgcatgcagcaacacccaagtccaccccaattaactgaagcaaataccaaagcagttgggagtacatatggtagacaatttgccttaggaagtgacttgaatgtacaaagatacttgatgcacttattttttaatgtgagacagcaagtttataaaacatccatataggattatagatacttaaaggaacacgtgggtgagcgtgtgtgggggtactagaagctgatctgattggtccaacagtttgatgctgagtcatgcgtgttgaatcccacttcagtgcacctgtggcctctcagtcaaacaagttgtgcctttcacagcttctttactactgcaagttcaagactgaaatggcttctatgatcagaactgggaaaacagtgaatcttatggtggaagaggttctcagcaagtgtacagtatttaccttcctttgtcttacattggctttttaaattttccattaatttcaacataattatgggaacaagtgtacagaagaattttttttttaagatatgtgagaacttttcatagatgaactttttaacaaatgttttcatttacaggaaattgcaaagaaaattctcaggtgatagtcattttttcttaagtgtttcgttagacaaaaannnnnnnn

SEQ ID NO: 24404 - DNA, 1758 bp, Homo sapiens
  misc_feature 1752, 1753, 1754, 1755, 1756, 1757, 1758: n = A,T,C or G
gcgtccgaaaatagcccacatccaggcaaaggggcctttcccttggcccagaagaaaaaggaacaagtggagtgcagaagaaaatctgtactgagagacttgggcctagcttgtcttccagtgagccaaccaaggctggtgctgtcccatccagtccctcgacgccagcaccacccagcgccaaacttgccgaggactcagctctgcagggtgtgccctctctggtggcaggtggaagtccacagactcttcagccggtatccagcagtcacgtggctaaagctcccagtctgaccttcgcttcccccgccagtcctgtctgcgcatcagacagcactctccatgggttagagagcaactctcccctttcaccactgtccgctaattatagctcacctttatgggctgcagagcacctctgccgcagcccagatatcttttcagagcagcggcagagcaaacataggcgctttcagaataccctagtagtcctacataaatctggtttgctggagatcactttgaaaaccaaggagttgattcgtcagaatcaggcaactcaggtagaactagaccagctaaaggagcaaacccagctgtttatagaagccaccaagagcagggcccctcaggcttgggccaagctgcaggcatctttaacacctgggtccagtaatacaggcagtgacctagaagcattctctgatcacccagccatatagcacagaggcatattttcctgttacttgagtggttcttttagctcatttgctgttacctactcctgtttcccaaagcttatgtaagagcttttccttctaaacttaaactgtgttgtggttcacttaggaagccacgtgccaatacctggctgctgtcttaactcgtagtctgggcacaggatacatatgtccccgtcccactgaggacctcagtttgggagtgcccttgagccccttttccttagcctgcaggtgcttcaatggatcatggggcaaagcaggagatgattgtgtggggctcttcctgctgtcacctcccatcatcccactctctcaccaggatcaagggtacagtaacacgaatgagcatacagagcaacgcctgtcgagccagggagtaggtgacacaaggaaaccttcatggatcttcccttgcctgtcttagtcacagagagcaaataacgaggaggtctgcctgcatcccacaaggcatcgtactagtcgggcgagacctaaaattccctgggcacaggttgcacctgggtgtgagcacttaatcactcaacgctctgtttaccttacacttgaaaatcaagggaaccgagtagtaccatctgactcctacactttcattacaagtcagattctccttaaactagcaggcaaaaacagtacttccaaacttccccggtctggcatgactgcagtacatctggaatcgtagtcgactgacattgctctccggacttaagacagctgacgcaccctcgacactagccggcatatctcatggccccgcgccggccgccccctgcgcaacctacgcccacccacatccccccccgcacaccagcaaccgcgccccgcccccacaccccccgccgccccccgcgcccccgggcagccccaccacccacaccgccgcccacaccgcacaccacccaccccacacgcccacgccccaaccccacacacacgcacccaccacacgcccaccccctcccccaccacacacgcacccacacacaannnnnnn

SEQ ID NO: 24405 - DNA, 2538 bp, Homo sapiens; identical to SEQ ID NO: 20316
  misc_feature 2538: n = A,T,C or G

SEQ ID NO: 24406 - DNA, 618 bp, Homo sapiens
  misc_feature 616, 617, 618: n = A,T,C or G
actccggcagggtgggcctcggagcgtaaaggcggcaaagtgctggggttacaggcgtgagcaccatgcccagcctagacttttttttttttgactaaccattatgcaaacaaggaagtatggactttaatgataaaaacaatttagtatcacttgataaatagtttaattgaagctattacacctcatgtatttcttttcaaatgtagacattgacatagaactcttactgaaatgcttttaatgtgtttacatttgtttttcacttagctgaatgcaatatccatacatctccttctccgggaattcaagtaaggcatgtctacaccccctctacaacaaagcatttctcacccataaaacagtcaaccactttaaccaacaaacacagaggaaatgaggtctctaccacacctctgttagcaaattgtaagtatttgccactgatgtattactatattcttaatgtaatactttcaagagtttgactttaaaacattatttcattaaatgcatattttctggataaagaaaatgtgttatactacacaatggaatactattcaaccttaaaaaagaaagaaattctgtcacttggtgacacatggatgaaccnnn

SEQ ID NO: 24407 - DNA, 810 bp, Homo sapiens
  misc_feature 810: n = A,T,C or G
acaaggtaagtatagagaaaaaagtaatcgcttttttgagggggctagaactagctgggtattgtaatgttattgcgattaaaatagatggtgaatgctaattcttaagccaaaataattatttcggtgcccatttattccccccttttcttgctctgtagcggttcctctttgagagcagtgtgaccactatccccagttgtcttgcatgattaattacagcatctgtcctgtcagaagctataatgaagaggtcttgataaaaattgcaaattgccactggcaacagtcttaaactgcttatgataaaatgaaaattaaaaacagcaagtgtcaaccctgaccagaatcctaatctggaaagaatgagggtgtgcgtggtgcgctccacagctactatgtgcaagacattcaaaaataatgggatatggatccctcaaagttgttgtatttcagagattatttactgtatgttgtgggttatgaataatgaattcagctttcaatatttcataatcctctcctactctgtattatgtacaaatattgaacagcaagagattctaattataaatttatggatttcttgctgtagaaaaatttatgtctaaattgaagcttttcataagatgtattagttgacaggtatcagtgttcaaacagccttagaatgatgcctaattacatctacaagggagtgattgtattccacaaagaaatgatgtgctagcatcagatccttcagaagtagagctcgaatggtaaaagattttctgtgaattgaaactaacattacataacaataaccan

SEQ ID NO: 24408 - DNA, 2991 bp, Homo sapiens; identical to SEQ ID NO: 22457
  misc_feature 1, 2, 3, 4, 5, 6: n = A,T,C or G

SEQ ID NO: 24409 - DNA, 816 bp, Homo sapiens; identical to SEQ ID NO: 21390

SEQ ID NO: 24410 - DNA, 1677 bp, Homo sapiens
  misc_feature 1, 2: n = A,T,C or G
nnaatacgtaaagactatttagaagagcctgaaaaaactcagtggaacaatgtagaaaatctcaataggtttgaaagaccaatggattattatgaagatctaaaaatgggaatgaagtttgtcagtgatgaacattatgatgaaaacgaagatgacttagtttcacatgtagatggttccgtaatttccaggagggagtggtatgtttagcaaccactgaatgtgacttaactatgtacaatgttcattcacactagttgatcattttcagattgttcatactttttcttgaggaagaataagctttttcaagttgattttcaagcttactttttatattctaatctgacaaatgaaaatgtaaaatctgagttcagtgtatctaagctgctttacaattttttttcaatgctgtactactgtctcaagatttaaattttaatgcagagtactttattggtgtgaggcacacaggtaagaagaaatgtcaacattaaatgtatgacttacttggtacaaaaattttttaaaaagggaactaccttgacattgtgtattaaatgtttacctaagactataatctcaagtatgatgtttgtttaacatatacctctcaaaatttatcaccactcaatgacactgcatcaaaattgactataaaactaattcaagaaatatttatatatattttttaatatacaaaaaatatttagcctgatggaatggctttccttttcaaacattattttctaagtttctatacaaatgaaatctttacctctgcatattaatgagccttgccataattactgtagagtggcttttcaaagatattttgttgcactaaaactgtggtagtaaactcagtgaacatgatgtgtggaagagcataattagctggtcaatatttttgtccaaaatacctgcaagagtaataaaatacatacctttcaaacatgataattattagtttttttttttcctttctggaacatggattttggtacattagcagtagccttattttaatgctttatgtcctaaacatactaatagaaatgaaaagacgcagagagagcatttcggaatactgaagtactagttttagaaatgagactttcagccaacaatctatagaaagaattttatggaccatcttgttttagttatttaatgttgatgttgttcaaatgggtaaatgtacagaaagaaaattttagagtaaacttggaactttggatataactagaaaaaactagattatagaattagtcggtaacacttgctaatggacattggcattcatctcctttttcctcctaagtgtatgtatgtgttttaagatttctgtttttacgattaaaactggaaacatgaggttttttgtttttgtttttttacataattacatatattccttctgaatcatttatcttttgagaaagaaatgttacctaaacttcaaatgtgctttttgtttgtgaggtaattaaattgcttctacagtggaggcttacaaaattattgtgacaactattttgaagctgaaaggatagttcttctattgctaagtcatttgaaaaagtgaccattttgccagtgaaatcaagtggaagttagtaggagaatcataaattaaatatattattttgttaataaaaaggcaaagtagtaggt

SEQ ID NO: 24411 - DNA, 929 bp, Homo sapiens; identical to SEQ ID NO: 20094
  misc_feature 1, 2, 3, 4, 5, 6, 7, 8, 9, 10, 11, 12, 13, 14, 15, 16, 17,18, 19, 20, 926, 927, 928, 929: n = A,T,C or G

SEQ ID NO: 24412 - DNA, 604 bp, Homo sapiens
acattatatcattttatttgtaaatacatcagtttgtatttctaagagataagctcattttaaccattatcacaatactattatcgcatgttaaaattatcagtaattctttaatattatctaataattggtccatatttaaccttctctgactccctcaaagttcttttttacaaagttgctttgttcaaatcaagatccagactatctggatgaaatgtctttaagtattaatttattttaatctgttaattaattttttggtagtcctcccccttttttatcttttgccacttatttcagtcatttgtcctgtagaatgtcttacattttggattttgctgattggcttccatggtgtcatgtgacatcttcctctttcttctgagtttcttgaaaatgggtagaccttaactgcataatgtaagagacagacatagaattgtttaaataattctgacttcaatgtcttcagaatacatgttttctcccaagatttttttttttaaccacgtaaggaaaatcaagaagcatgtttcttagcaatagttaagtcagccggtctataatttctgtataataaatgtatcaggagctgagaggt

SEQ ID NO: 24413 - DNA, 366 bp, Homo sapiens
  misc_feature 230, 231, 232, 233, 234, 235, 236, 237, 238, 239, 240, 241,242, 243, 244, 245, 246, 247, 248, 249, 250, 251, 252, 253,254, 255, 256, 257, 258, 259, 260, 261, 262, 263, 264: n = A,T,C or G
acctgcgctgtggagtgaagtgaaccggtatggccagaacggcgacttcacgcgcgctctcaagaccgtcaataagatactacagatcaacaaagatgacgtaactgccctgcattgtaaagtggtatgccttatccagaatggaagtttcaaggaagctttgaatgccatcaatacttacaccaaagtgttagccaataactctctctcctttgaaaaggcatattgcnnnnnnnnnnnnnnnnnnnnnnnnnnnnnnnnnnntaatactttattttctattgtattaaacgaaagccaggaaaataccaagttatttaaaggcaaatctttactccttaaagaaaaaatacaaactgtggtatt

SEQ ID NO: 24414 - DNA, 2407 bp, Homo sapiens
  misc_feature 2386, 2405, 2406, 2407: n = A,T,C or G
gcgtccgttcaaatttaggaaaaagaaatgtgcaaactagaatggggatttttgggatagaatgaaaacctatacctgtacctaacctagctctctttccaaaccatttatatcaaacactgtcttgaatgtgtacttggcctctgttaaaatgatggttttaggaaaggagctaggtttggacagaatagctatataaagccagcagttctcgtagtattattgctgacatgaccagggaggacaagcagcttagcttctcagatcaaaaacaagtaccagtagttcctgcttaaggctggtaaataatatcttgaaattctcaagttggaaaccagtctcaaacccatttctttgcaagaagttgtatatttagggtcatggttagggctttccagtctaggagtccttccagtggtctgtttcttgatagcatgcttttacagtctgcatggatgtaataacgcttttggtatagtgattgtcttgagtactgcttgactctggtcttgatgcccacaaatggctagcgtgcttgtcttcccatgcagtggaaggaagacagttaaatgaaatagtagtattagatatatatgaaaaagaaaacagcaaaataaatttgaagttaatgctttcgtctcttgtaaggtaaggcatatactgcttgcttacacaagaactatttggcattttctttttttcgtttgaaacaaatatgaaaaatagtatttggttttaagaaatttttattttagcatacaacatataactgacatttgttttttcttttttggtcttgtaaacttaattcttaaaacttaggaaaattttttggataggacaacttggtgattcagctataacagatcttatttcaataataactttactgcaatatgtattcatacattttcaaatgtgtgccttaggaaatcacaagtgcttttatagtgtgaagtgttaatggctgaatccaactgaatcaccaactagtaagtggggttctggttgatgttctggaataatattgggagattgtgaattgttccagacataccaactgaactttcattcattatcaaagtttgcaaaacttcccaagccccttaacatttagcacatttgaggatgttcgtgatgctgaagacgctttacataatttggacagaaagtggatttgtggacggcagattgaaatacagtttgcccagggggatcgaaagacaccaaatcagatgaaagccaaggaagggaggaatgtgtacagttcttcacgctatgatgattatgacagatacagacgttctagaagccgaagttatgaaaggaggaagatcaagaagtcggtcttttgattacaactatagaagatcgtatagtcctagaaatagaccgactggaagaccacggcgtagcagaagccattccgacaatggaagccaagtaagcaagaagaaaaatgagagataatgcttcagtgagagaggaaaggtgctacatagagtatgagctgttaagttacatcccaggggaaagacctgggaactattgtattattctcttgaaaatttggcccagtaagctgctacatccagttcaactaacaaaatcctgtataccacagagaagaataaagaaaaccaaactgacaaacatccttcttttatttaagaccaaactgcagctggaatacccagtacagttctgcttactacacttcaagaaagatctgaaagcggaaaaagaaccaaagaagggcagttcaagcgaccaaagggtgggtggaaggtgctgcagtatgaatactgtacgaatattttgactctggtctgaaaagataaaagaatgttatcgaaaactacatggaataattgaagtcccttcaagtttgaaagtaagcattttaggacaaataaaaggaaattcaactttgtacttgtggaaactaatccctaaatatgaataggtttatattgattcatgggtaacaggtccataataaattattggaaactaggatgtctgaatatcaaggaagacagccatagtctcttacagtgcctctgttggtctgtctcaaactgaattgggtgggacaaggtatggtcccatataacagttccatttttgcaatgatggcaaatcttgcctagttattgcgggcagtgtttcctgctaagcactgctggtggtctgtgttatttactgaacaaccaatgaggtaatcctgctaatagctgccaggtaactatcttggagagccaaaaaagggccctttgggcgttcagaaattaggaaatttgggcctctgggggggccgcgagacacggacacaaattagatcgagttgacacatgacacagggagcgggggagaattcactcgnaaacagaaggacgatacannn

SEQ ID NO: 24415 - DNA, 4151 bp, Homo sapiens
  misc_feature 1, 2, 4127, 4128, 4129, 4130, 4131, 4132, 4133, 4134, 4135,4136, 4137, 4138, 4139, 4140, 4141, 4142, 4143, 4144, 4145,4146, 4147, 4148, 4149, 4150, 4151: n = A,T,C or G
nntcaattctttcttcctcttcctgtgctcagtcccattaacctgccataccacggctcctcgtcttcccaattccctcacccagtattttcaatcgacccccccccgtccccccgcacctctttctctctcgctatatgtcctttcgtggccagtttgggcaaggggaaggacaccacaagtcggggtctttcctcagcgttgggtcgcggtggctgtgagggcggaagaaaaggccaggctgaggggagggtagagggtgaaaagctcggatctgtgtttggggaaggccaggcttgcgctcctcgccgggttccgcgaaggttaaccttggctgacttggctcgcgagcaaagggcagcgtctgagctcccggcgttccaggagtggcctcttttgtaggagcacctgaaatgcagcgtctggtgcactaagccgtagcggcagcagcagccacagcgacagcgctggggccctgtgtagaagctccatcccccttgtctttgtgcttgcctgcgtccccagactcagagattatcttagaagacctaggactccaaaaatgtttcccctgaaggacgctgaaatgggagcctttaccttctttgcctcggctctgccacatgatgtttgtggaagcaatggacttcctctcacaccaaattccatcaaaattttagggcgctttcaaatccttaaaaccatcacccatcccagactctgccagtatgtggatatttctaggggaaagcatgaacgactagtggtcgtggctgaacattgtgaacgtagtctggaagacttgcttcgagaaaggaaacctgtgagctgttcaacggttttgtgtatagcatttgaggttcttcagggcttgcagtatatgaacaaacatggtatagtacacagggcattgtctcctcataatatcctgttggaccgaaagggacatattaaattggctaaatttggactttatcacatgacagctcatggtgatgatgttgatttcccaatagggtatccctcgtacttggcccctgaggtaattgcacagggaattttcaaaaccactgatcacatgccaagtaaaaaaccattgccttctggccccaaatcagatgtatggtctcttggaatcattttatttgagctttgtgtgggaagaaaattatttcagagcttggatatttctgaaagactaaaatttttgcttactttggattgtgtagatgacactttaatagttctggctgaagagcatggttgtttggacattataaaggagcttcctgaaactgtgatagatcttttgaataagtgccttaccttccatccttctaagaggccaaccccagatgaattaatgaaggacaaagtattcagtgaggtatcacctttatataccccctttaccaaacctgccagtctgttttcatcttctctgagatgtgctgatttaactctgcctgaggatatcagtcagttgtgtaaagatataaataatgattacctggcagaaagatctattgaagaagtgtattacctttggtgtttggctggaggtgacttggagaaagagcttgtcaacaaggaaatcattcgatccaaaccacctatctgcacactccccaattttctctttgaggatggtgaaagctttggacaaggtcgagatagaagctcgcttttagatgataccactgtgacattgtcgttatgccagctaagaaatagattgaaagatgttggtggagaagcattttacccattacttgaagatgaccagtctaatttacctcattcaaacagcaataatgagttgtctgcagctgccacgctccctttaatcatcagagagaaggatacagagtaccaactaaatagaattattctcttcgacaggctgctaaaggcttatccatataaaaaaaaccaaatctggaaagaagcaagagttgacattcctcctcttatgagaggtttaacctgggctgctcttctgggagttgagggagctattcatgccaagtacgatgcaattgataaagacactccaattcctacagatagacaaattgaagtggatattcctcgctgtcatcagtacgatgaactgttatcatcaccagaaggtcatgcaaaatttaggcgtgtattaaaagcctgggtagtgtctcatcctgatcttgtgtattggcaaggtcttgactcactttgtgctccattcctatatctaaacttcaataatgaagccttggcttatgcatgtatgtctgcttttattcccaaatacctgtataacttcttcttaaaagacaactcacatgtaatacaagagtatctgactgtcttctctcagatgattgcatttcatgatccagagctgagtaatcatctcaatgagattggtttcattccagatctctatgccatcccttggtttcttaccatgtttactcatgtatttccactacacaaaattttccacctctgggataccttactacttgggaattcctctttcccattctgtattggagtagcaattcttcagcagctgcgggaccggcttttggctaatggctttaatgagtgtattcttctcttctccgatttaccagaaattgacattgaacgctgtgtgagagaatctatcaacctgttttgttggactcctaaaagtgctacttacagacagcatgctcaacctccaaagccatcttctgacagcagtggaggcagaagttcggcaccttatttctctgctgagtgtccagatcctccaaagacagatctgtcaagagaatccatcccattaaatgacctgaagtcagaagtatcaccacggatttcagcagaggacctgattgacttgtgtgagctcacagtgacaggccacttcaaaacacccagcaagaaaacaaagtccagtaaaccaaagctcctggtggttgacatccggaatagtgaagactttattcgtggtcacatttcaggaagcatcaacattccattcagtgctgccttcactgcagaaggggagcttacccagggcccttacactgctatgctccagaacttcaaagggaaggtcattgtcatcgtggggcatgtggcaaaacacacagctgagtttgcagctcaccttgtgaagatgaaatatccaagaatctgtattctagatggtggcattaataaaataaagccaacaggcctcctcaccatcccatctcctcaaatatgaagaaccaagagtgtgactgccaaaacttagtgtggcatcagcaccaacagcacagttcttcatatccacgccactctcagacaaaactagatgtccagattgttgcatttccgtaaagtttgtcacgagacattttttaaaatctcataacccacatgttcagttatccatgcaagaaacttgactctacatgtattgctgaaagaattttcttaacagtgaaatctgatcatatatttttaccacactgccacataaagcccaagaaattcagctgacaagacagatttagcattatcaagaaatcccatttgccctgaaaaagctgtcctccattgtactgaacagacagtcctgtcgattgtgttatttagaaacatacactgaatgtgggctgaaatcatcatctttccataatgaaaactgagaaactattcacaatgcattccttataaataaatgctacatttagtaactcatttcacccaaacaagaaatatgtgtgtgtgtgtgtgtataggaagtggagtttatccccattgcagaaagtggtaatacttactcccagaaaaatgaaatttagaaaccatttatatttgatagaatatttggtcagttcctgtagcaaagacgaatggcttaaacaaattttctagtttctttatcacatgaaagtctgtacagtcagtccagggctagtctactggtttcctgatcattaagaactcattaccttctctcattgctttacaaacctcaatatgtggcatccatctcatggatgaaaatggctcctcagcttctaccatcacatctgctatctagaaggaagagaatgagggaaggagggaggggatgaagagaaaagaaggaacaaaagaannnnnnnnnnnnnnnnnnnnnnnnn

SEQ ID NO: 24416 - DNA, 661 bp, Homo sapiens
  misc_feature 1, 652, 653, 654, 655, 656, 657, 658, 659, 660, 661: n = A,T,C or G
nagaagctattgtactagagctgtgcttttacaacaagtacatagcagtgctttctacatagaaggctgttcatagcaggctttgcagattctttttttttttttttttttttggtggggggcacaccaaccatccaaaaaagttgcttctgtttttactgtagttcaattacaggagttgggttttccactttttaaagggcatggcttttatttctaacttctgatttttttctaatttacctaaatctttattttacttaaataatgttaaaagtgtcatgcttcatcagccagtgtgtcatgctgcagatgttcttttggttcattagaagaaaatcttaagaagagcttcagaaagttgattttttaaaaaagaaagaaaactggctcgccgtttgtgttcataaaatggacccaaatttttattaaattcctactgaaagtatttgtggtggcccggtaaactttcgctcacacaccacctttttttttttcttttttagagctaaaaaaattattgccaattacttgctctgttctaagaattcttataataactgttttaccctcttttctttttctttttgaacaaaaaccccagaggaattttttgttagggaaggttcgatttggcttccttctacaatannnnnnnnnn

SEQ ID NO: 24417 - DNA, 377 bp, Homo sapiens
accttcagctcaggctttcatcgggtcataatgggctactagttctccgatgggggttttgaacatatcacctgctttttgaaattaaacattatctctaacattttttccttctttccttcactcattcacttattcactcatgaaatatttattaaacatatgtcatgtgccaggtaaaagaagtgtggttccttcccttgaggatctcagagttcagcaaaggtataaccctgatgtttacagcaaagacatagctgttataacaaggaatgtattccggatgtcctggtgtggggaaaagcaagagagatcagattgttactgtgtctgtgtggaaagaggtagacataggagactccattttgctctgtacc

SEQ ID NO: 24418 - DNA, 1632 bp, Homo sapiens
  misc_feature 1, 2, 3, 4, 5, 1632: n = A,T,C or G
nnnnnacaagttccaaagaaaagcacctctctaatttggcggttcaatgctatactactttttatcaattttatgtaaccaactcaacgttaagtatacccatagcaggccggccgggcacaggagctcaagcctgtaatcccagcactttgggaggctgaggcagcagaatctcttgaactcgggagggcgaggtttgcagttagccgagatcgcaccactgcactccagcctgggggacagagcaagactctgtctcaaaaaacaaaacaaaacaaaacaaaacccaaagacagcctattaatggcttcccactttcctggactagggtttaaggaccagtaactgctgacaaggccaagccatactagagcctgaagcaaaaggaacaatcagtagtgctgatcctgtctttacctaaaattttagcattgtgtacatcatgaatttctgcattaattttggttttttaaaaaaattgcataaaatattatttatgttgattactttttgggggtcccttaaaatttgcacccaaggtacgtgcctcacttgccttgcctgggcctagcccagctccagcacttctttgcccagtggcccactgtttaatccactggcagaagtaagcagcacaatctatgaccacagaacagatggagtcagcctagcacgcccatgatatcacacatatggtcatgaccttgctagcgcagagcactctttcaatctcagctaactgaatagttaccagatagaagaaaaggaaactacctacaaaataaaaataaaatgtcataaaattcacgaacacgtgacgcggtcgggcggaccactgcagactgagacggtggaccgaattgggaccgctggctgtataagcgatcatgtgatctccaggtatcacctcaagcgagcagggagatcagagtcatatacgctgaagaacattggaggccgatgggagaaacagacctgttcagaccatcctgctcggttctccccagatgacaaatactctcgacacccgaatcaccatcaagaaacgcttcaaggtgcgtcatgacccagcaaaccgcgccctgtcctctgagggtcccttaaactgatgtcttttctgccagcctgttacccctcggagactccgtaaccaaagctcttcggactgtgagccctgatgcctttttgccagccaatactcttgtggcatccagtctctcgtggcggattgattatgcttgtgtgaggcaatcatggtggcatcacccataaagggaacaccatttgactttgtttccctccatatttttaacacttaccctacaaggaatttattaaacagaatacacatggatctgcaacactcatgatacgacaatacaccagccgacaacaagtgtcggtgaggcctctggatcacctggcaaaacggcgtttgaagaccccaaccttgtgggcgccgaccccagactgcaaagggacaacggccgcgaacgggtttaccacagcgacaaccgggagccaagaaggcagcgggcattcacaccgatagaatacgcgcgggcacgccgctcgtacaatccgagaggcgctgggccacacgcgccaccagggtcagggacgaataatccn

SEQ ID NO: 24419 - DNA, 2187 bp, Homo sapiens; identical to SEQ ID NO: 21516

SEQ ID NO: 24420 - DNA, 1426 bp, Homo sapiens
  misc_feature 1317, 1426: n = A,T,C or G
cgggaaaaaagagaaagaattggtctttatttttcttgctaagaactctctggagtattgaaagacattgaaattatccctaaaattgtcacaacttttgtgaatactggtatacggttggaggtgtttttaaatctttatttcctctctttctttgttctagtgacttgtcttgctttaagattttttttaaagaattgttttattcaacatatatcaagttcttatggaatgccagtcatggtactagccccttgggatgtagtggttgagtgtgttcaatggaaacagccccagtatacaaagacagttcactctggtgtgctgtaggattggaaagggagtggtaccagatgaaaatgaaaccctaaagaagactgctgggccatgagttgcttccttctcctccaccttaaccctctgattccagaattgcagtcattttcttctgccaaggaaatccattaaaaactgcagccacactgcaatttcctaatgtagaacaagatataaagcaggctttgagacaacaacctacctttgtttactctttccaagctggaagagtccttctcctctagttgcccctaggtcactggctaatttattttaaaatttagatggaactcatgtatagttaagtgcacaaatcttagccgtgcagatgggtaattttcacatagctatttgcccacatccgtgcctctaagatagagacatacactgttttcagcaccccagaaagttcccacatgcccatggtgccattttgtgaaaggtatttataaggcccttcaaatttgtggcttcctttctcatacttctcaggtataatgaaagggggagaaaaaccccaccatcaacacaaaagaaggctataaagactgtgcaccttttaacaagtcaatttgtagtcagtccctgggcctgtcttttttttgttttcttttttttttaattttgaagctacctgaggtttagaattccttcagccctagctgcttttattctgctttttatttaaacaaaaagagggggaggatctgaaggaaactagttttctatacaaaggctttaaagtccatggactatacttatcccatttatcatcccaagtggtgctttaaccctaccataccctggctattaaaataaaaagatttttggacattaaaattattaatatatcactaataatccaccacacatttaaatatttacacacattaccataatttgtgcaacatcttataaacaatatcatttccatagtaatctaaggcttcaccaacctggcccactatatctacactttangttcattttaataattatactttccttctctttatcattttggaaatttataaatatcactttcttacataccttcattcacagatatatctagcttttaccttttgcn

SEQ ID NO: 24421 - DNA, 1147 bp, Homo sapiens
acatgctgtatgattccatttttataacatgctactaatgacaaaactaaagatgaaaagatttctgattgccaagggttagggctgaggagaggttgtgactataaacaaggagcatgagggagtttgcattgatgcaacattctgaatctcgattacggtggtggtgacatgaatcaatatatgtgttaagatttcttaaagctacatataaaaaacaaacaaaaatgcatgcatgttaaaactggtgatttccaaataaattctgtagttaacagtattgtaacaatttcactttcctgtatttggtaacgaaccatgcttatgtaagttgttatctttggaagaagctgggttaagggcattcaagaactctggaatattttggtaagattttgtgaatctaaacttatttcaaaataaaaacttacaaaaacatcttatttatattaatttcataacacctgatgttacttataaacttaaacatattcaagtatggtcaattacacttatgaattgaatatactgtatccagtttcattctgaagtactttagttattctgaaataacacaaacttagaactaaagaaatgcaggagctaatcatataataaaatgaggcaggcataaaatactccggtattatatacaatattaaattttagttcgtgattagaggaagtcacaatttaaaatgtataaaatcagtgacaaggcaactaggaatatggctcaagctatcctgttcccaaatgcacatgaggcatattatctgttaaggttagaattgtgacagaaagctctcatccatcattttgccaaggcttctttccttcattaaattctctgttgttttcctaaaagtcttctacattgaatgttttcattagtttttttctgcattatttcctagcacacgatgaggcaaaacattttactgaaaaccctgccacattcactgccagaggaaagtatttctccagtgtgaactctctcaatctgttgaggttttatttttgggcaaagacgttcctataattattacatttccacgaattagtagtttattcatgatctatgatcacttctgagggggtttatcttcccaccaaaggctttatagtctccacattcatcggacgc

SEQ ID NO: 24422 - DNA, 728 bp, Homo sapiens
  misc_feature 1, 2, 3, 4, 5, 6, 687, 710, 728: n = A,T,C or G
nnnnnnagttgcttggagtgaaaggaattattttagggcaaaactttaccattctactaaaaagaggtaacatggagattttttcaacataactttgtttagtatttgtttcctcatgtgataccttgctaaaaccacaaaaccactagctctaaaaacatcatcttttttttcaatagaataaaaaaaacagtatgaatttattttctttttttaaccattatttatttattttaattttattattattatactttaagttttagggtacatgtgcaaatagcatacacactgttgcaaaataaataaggagccaagttctttctctccccatgacttttcagttatgccatcattttattcaaaaatttttagtttgctctgatctaaactcttccctgggaaacttggggttatatttccatagaattctgtcttgctcttaataaattcaaaattctttggaaaagatgcatttcagaggattattcttatgaccagttatgctttaaaaaaattaaagtcttaattaaaatgcacttatatttaatgcattagtgggtagatttttgttttgagtaaaatctttattagaatctatttgtaactggatattttgtaattttgggctcaaacatatttactcttgggtactgcttttttatatgtattcaaatttatagcttngtctcttttaatgtaatattctncattactttcccgcaggn

SEQ ID NO: 24423 - DNA, 758 bp, Homo sapiens
  misc_feature 1, 2, 4, 100: n = A,T,C or G
nncntcaaatataaactatttactttcacgttaccaaaggaatatactcaggaatactagaaaacagtacaacttgagagatctccaaagtcctaaaagnaaatacagacagcctgagaattcttattgaattcttgacaaggtaccacaaaacccaacagaccatttgaaataggttacctcaaccagtaaagcccttaacatctacggaaaacgggttaactttaagatatatcagagctgtattataataaatccatggggatgggcttcaaaatttttataagatacatatgaccataaactatatataataaacttgtgtgaacatgtagaaatgagaaaatactactaccattaaacaaggtagcactaaaagttgatttaagttcaaaaatcaaagtagtttgagatattggactggctatatttttttaaaagggacattagaagaaactagaatatctcttctaataatgctttaaagacatggtatttaaatatacaaatacaaagccacatcaaaatcctgtctagtatacactgatagaataaaaatatcatctacatcaaagcgattatgggaagatcagacatcctttcagaaagaggtgttgaatacaggagaagaaaagatcaatacatagaataactgatatgctaacaacatcaaaaggacatggttggactatgaccacttccgagatatatcccacaggaagcaaacaaaatttccagtaataagttatctcaatggt

SEQ ID NO: 24424 - DNA, 6169 bp, Homo sapiens
  misc_feature 1, 2, 3, 4, 5: n = A,T,C or G
nnnnncgccggcaatcgagtggcttcctggccatggagaggagatctggacccgaggacgccagggactcctctccgtctccctggaccgctgtgtaggcacctgagttaacggacgctaagcggggtaggggaagtaacagtgtatcatgtatgccactgattccaggggacactcccctgctttcctccaacctcagaatggaaatagtcgtcacccatctggctatgttccagggaaggttgtcccattgcgtccccctcctcctccaaagagtcaagcttcagccaaatttacctccatcagacgagaagaccgggcaaccttcgcattctcacctgaagaacagcaagcccagagagaaagtcaaaagcaaaagagacacaaaaatactttcatttgttttgctattactagtttctcattttttattgcacttgcaatcattttaggaatatcctcaaaatatgctccagatgaaaattgcccagatcaaaatcctcgtctcaggaattgggatccaggacaagattctgcaaagcaagttgttatcaaggagggagatatgctccgtctgacctcagacgccaccgtgcattctatagtcattcaggatggaggactgcttgtatttggggacaataaagatggatccagaaatattactttgaggactcattacatcctgatccaggatggtggggcgcttcatattggagcagaaaaatgccgctataaatccaaagcgacaattaccttgtatggcaagtcagatgaaggtgaaagtatgccaacatttggcaaaaagtttattggtgtggaagctggcgggacactggagttacatggggcacggaaggcatcgtggacgttgttggcaaggaccctgaattcctcaggcttgccctttgggtcctatacctttgaaaaggacttttcccggggcctcaatgtgagggtcattgaccaagacacggccaaaattttggaaagtgagagatttgatacccatgaataccgcaatgagagcaggcggcttcaggagtttctgagattccaggatccaggtcggattgttgccatagctgtcggggattcagccgctaaaagtctcttacaaggaaccatccagatgatccaggaacggttgggaagtgaactgatccaaggactgggctacaggcaagcttgggctttagttggtgtcattgatggtggaagcacttcttgcaatgaatccgtgagaaactatgaaaatcatagcagtggcgggaaggctcttgcccaaagagaattttatactgtggatggccagaagttctctgtgacagcttatagtgaatggattgaaggcgtttctctttcaggattccgggtagaggttgtagatggagtgaagctaaatttgctagatgatgttagtagttggaaacctggagaccagattgtggtcgcaagcacagactattccatgtaccaagcagaggagttcactcttcttccctgttctgaatgcagccattttcaggtcaaagtcaaagaaacccctcagttcctgcacatgggtgagatcatagacggtgtagacatgagagctgaggttggaattcttacccggaatattgtgatccaaggagaagtggaggactcatgctacgcagaaaatcagtgccaattttttgattatgatacctttgggggacacattatgataatgaaaaattttacttcagtccatctttcttatgtggaattgaaacacatgggtcagcagcagatggggcgataccctgttcattttcacctgtgtggtgacgtggattataaaggaggatacagacatgcaacatttgtggacggcctgtctattcatcacagcttctcaaggtgcatcactgtgcatgggacaaatggcttgctaataaaagacaccattgggtttgacacactaggtcattgtttctttttggaagatggtattgaacagaggaatactttgttccacaatctgggactcctcaccaagccgggtactctcctgcccaccgataggaacaactccatgtgtaccaccatgcgagataaagtgtttggaaattacattcctgtgcctgctactgactgtatggctgtttcaactttctggattgctcatcccaacaataatctgattaataatgcagctgcaggctcacaggatgctggaatatggtatttattccacaaggaaccaactggggaatccagtggattgcagctcttggcaaaaccagaactcactccattgggtatattttataacaacagggtccattcaaattttaaggctggcttatttattgacaaaggtgtcaaaacaaccaactctagtgctgctgacccaagggaatacctctgtttggacaatagtgcaagatttcgacctcatcaggatgcaaaccccgaaaaaccacgtgttgctgctctaattgacaggctcattgcttttaaaaataatgataatggagcttgggtcagaggaggagatattatcgttcaaaattcagcatttgcagataatggaataggactgacctttgccagtgatggaagcttcccaagtgatgaaggttccagccaagaggtatctgaatctctctttgttggggagagcaggaattacggctttcagggtggtcagaacaagtatgtaggcactggaggaatagaccagaagcctcgaacattacccaggaacaggacgttcccaattagaggctttcagatttatgatgggcccattcatctcacaaggagcactttcaaaaaatatgtgccaactccagataggtacagcagtgcaattggcttcctcatgaagaattcctggcagataacccccaggaataatatctccctcgtgaagtttggtccacatgtctctctgaatgtcttttttggaaagcctggtccctggtttgaagattgtgagatggatggtgataagaactccatattccatgacattgatggctctgtgacaggatacaaggatgcttatgtgggaagaatggacaactacctgatccgccatccaagctgtgtaaatgtgtctaagtggaatgcagtgatctgcagtgggacctatgcacaggtctatgtacagacatggagcactcagaatctttctatgaccattacacgagatgagtatccgtccaaccctatggtgctccgaggtattaatcagaaggctgcctttccacagtaccagcctgtcgtcatgctggagaagggttataccatccactggaatgggccggcaccacggactacatttctatacctcgtcaacttcaacaagaatgactggattcgagttggcctttgctatccatcaaacacaagttttcaagttacctttggctatttgcagcggcagaatggctcattatccaaaatcgaagaatatgagcctgtgcattcactggaagaactgcaaagaaagcaatccgagaggaaattctattttgactccagcacggggttactgtttttgtatctcaaagccaaaagccacaggcatggccacagttactgttcatctcagggatgtgaaagagtcaagatccaagcagccacagactcaaaggacatcagtaactgcatggccaaagcatacccacagtactacagaaagccgtcagtggtcaagcggatgccggccatgctcactggactctgtcaaggctgtggcactcggcaggtggtgtttactagtgatcctcataaaagttacctccctgtgcaattccagtcacctgataaagcagaaacccagcgtggagacccgtctgttatttctgtcaatggcactgactttaccttccgaagtgcaggcgtcctcctccttgttgtggatccgtgcagcgttccattccgcttgacggaaaaaacggtttttcctcttgctgatgtcagtcgcattgaagagtatttaaaaacaggcatccctccaaggtccattgttctgttgagcacaagaggagaaataaagcagttaaacatttcacacttactagtacctctgggattagccaaaccagctcatctttatgacaaagggagtaccatatttttgggattcagtggaaactttaaaccatcatggactaagctatttaccagtcctgctggacagggccttggggtgcttgaacaattcatacctttgcagctggacgaatatggttgtcccagagccaccactgtccgcagaagagacctggaactgctaaagcaagcttcaaaagcacattagagactaactgtaacttaagtgctgggggaaaaaaaatgtgaactaacttatttaatttatggcattttaaaatgacactgttaacccaacggaaccattttccagtttgatacagaatggggagaaaagaaagcgtttgaaattattgcttggataccagcttcatgcaccttctagttgtacaaaatgttaaagacgttgtttgtatttgtaaggctggtgtattcagagagcagatctcttattcctcactttccacccccgtattttgtaatgaccatgagcaatgtttttactttttgtataatggggtggggtggagtgggggcttctgagagtcagcctgaggtctttagaggaccagctattgtagcaccttggatacttgaagtttaatgctcagttgggtcgggtggcagttgacttggtggctggcatgttcagcagtgcctggggccctgtttctgggcagcctttgaggattttctatgatattgaatgacagttttaagtggcaactcaggcccagctcatgcccttttttgcctggacatgtgctatttttattcacttatatatcaattacttgtaagggttaaactttcaaacaggaagtatattgggacaaaagggctcttggggattagatatccctttaatctgtgaccattgggcaaaaaattttcctgcagcaaaagtctgaggctgttgggaccatttttgcagctttaatccttagcctcttttgactgtatatttgtgtttaaaatgcagagctcaactgaatatttccttttttgttttgttttgttttgttttaagaagtaggttgttttcctgaaccgtaaacttgtatcattttaacttgcacaaaggaagtctgttcttggtattgctcttgcacttgggttttttgttattgttttgtgtggattttttaaagcttttctgttcaccctcctgccaggaaaatcccagaaagcttaatgataccccaaaatgattacacccagggaggaaaaaaaggagcgctttctagggtcagaatcgtggagagaatactcagaaatgaacctctttaaagccttgcaggaatgagtcactcttacttaatgaaatgttaaagccaattaaaaagcatgctgtgatgcccagcttccctttccacagggtgcatgcgtctcctgctggtgaatcacatgcggcaagaggcaactggctccacagcctgggatgctgccgtaccaagaggaaagaagcagcaaaatgcctttacgttgttctaaacccccgacgcataaagtgtagaggagggatggccaagggtgggtggtagaaagtgtgttcaggctgacactggcaatgagtacagataatttcactttcctcttccaggggcaaaggctgatggcctctacctttgtatccaggagaaactgcagagcagccctgtgactttacaaaatatgctacctcaaagtgctaccgataaacctttctaattgtaagtgcccttactaagggcacatgtcttaatcaaagttagttttttgttttctggtttgtttttttttttttgtatattgatgaatgagatcttacctattaaatatattattggattatggttcctgaaggtcattagagtgtgtgtgtgtgtgtgtgtgtgtgtgtgttttatgacttaaatatctttacgtgtgttttttagagcttggttctttaaagatttggagaagatatgtaaattaccaaggcacttggtttttctgttttatatactaataatcagggcctaagttaaataaaaatatgtgtgcatgtattttaaaaaaaaaaaaaaaaaaaattgcggccgcaagcttattc

SEQ ID NO: 24425 - DNA, 2538 bp, Homo sapiens; identical to SEQ ID NO: 20316
  misc_feature 2538: n = A,T,C or G

SEQ ID NO: 24426 - DNA, 1236 bp, Homo sapiens
  misc_feature 1, 1044, 1208, 1209, 1210, 1211, 1212, 1213, 1214, 1215,1216, 1217, 1218, 1219, 1220, 1221, 1222, 1223, 1224, 1225,1226, 1227, 1228, 1229, 1230, 1231, 1232, 1233, 1234, 1235,1236: n = A,T,C or G
natgttggccgggctggtctcggactcccgacctcaaatgatccggccaccttggcctcccgagatgctggcattacaggcgtgagccaccacacccggcttacatgcattttttatcaccacaaactgaaactctgtacccactgaaaaagagctccaaattccaccctcaccccagaccctggtaaccactatttcactttctttctgaatttcccttcatatgagtgggatcaaacaagagttgtccttttgtgtttagcattcttacttagcaagccatcaactgctcgaacagtcactggggcaactacttttcgcccagtgtcctccagaaaagaaagatctggagggtcaggccactctttttcttcaaaataatggggtgcagaagggtagggatgaacctcttcctcctttgccactttagctttagctcaaaggaactccaactttttattatttgcaacagttagctttctttgtttcacatctctgccttgcagaaccatgacctatcaaggtgttttgtcaaacaaaaactaatactttccctgggaaaaagccatgtggtagcaagtaccagaaatttttatggccaaataatacaccactatatccatagaccgcatttggtttatccactcatctgctgattgtttccccctcttgggtattatgagtaatgctatgaacatgggtgtacacatctctcttgaagtcccttcttaggtcctttagggatacatatccaggagcagaactactagatcacatatgctaaggtctgaatgtccccccaccaaattcgtatgttgaagcaaccaccaacgtgataggtgaggctttaggaggtgattatgtcatgagagctccatcctcattaatggatttagtgcctttataaaggggctcaagggaaccaattacctccttttgcccttcgattcccttccaccatatgaggacacagcaacaggccccgtcctagaagctgagactggggcctcatagatgatacagtctgcagcacgctgatcgtgngcttctcagtcttcacaaatatgagaattaatcgtactttaaattaaaaaaaaaaaaaatcggggttttgcgggggcaagggtttgatggctggctagttgtttgaccagtttggaaaggtgaatgcggccaaggaggtaatggaacgatgtttttgagaaagnnnnnnnnnnnnnnnnnnnnnnnnnnnnn

SEQ ID NO: 24427 - DNA, 2538 bp, Homo sapiens; identical to SEQ ID NO: 20316
  misc_feature 2538: n = A,T,C or G

SEQ ID NO: 24428 - DNA, 781 bp, Homo sapiens; identical to SEQ ID NO: 22348
  misc_feature 1, 2, 779, 780, 781: n = A,T,C or G

SEQ ID NO: 24429 - DNA, 2538 bp, Homo sapiens; identical to SEQ ID NO: 20316
  misc_feature 2538: n = A,T,C or G

SEQ ID NO: 24430 - DNA, 464 bp, Homo sapiens
  misc_feature 463, 464: n = A,T,C or G
acttttttttttttttttggtatttctttttattgcattcgttgtctaacaacaataatactcattggcaagaaatttatttacactaacaaattaaatttaatcacaggtattgttagattggtcagaaaacaaaagaccactgtgatattttgcttgaatgcctctgaaaaccaaagagtaaggaatgtcatttgaaactttttgaacaatctagagaagtacaaccgtttggggcagctgagttgtgccctgtgtaacactccggttaagagcgagctcctgtggcagactcacgtcctgggaaagcagcaccgagagaaagtggccgagctgaaaggcgcgaaggaagccagccagggtccgtccgccagttcagcgcctcagtccgtcaagaggaaagcgccggacgcagacgaccaagatgtcaagagagcgaaggccaccttggtgcctcaggtann

SEQ ID NO: 24431 - DNA, 598 bp, Homo sapiens
  misc_feature 1, 594, 595, 596, 597, 598: n = A,T,C or G
ncgaatggagctccccgcggtggcggccgaggtaccctggactcatacctgaaagcagtgttcaaccttagcaaaatctccaaccagcgcatgaacaattttctacatcacaacgacctggttttcaaattcagctctcaaggccaaatcttttctaaatttaaccaagaacttcatcagttcacagagaaagtaatccaggaccggaaggagtctcttaaggataagctaaaacaagatactactcagaaaaggcgctgggattttctggacatacttttgagtgccaaaagcgaaaacaccaaagatttctctgaagcagatctccaggctgaagtgaaaacgttcatgtttgcaggacatgacaccacatccagtgctatctcctggatcctttactgcttggcaaagtacctgcccgggcggccgcccgggcacgtacgcggggggcttttgattctaatgataattgcacctttatctttcaaaagctgatatttcctacctaagcatctcccgagaaaaatatctcattaaaaagcccataaataataggggagaagaaagccttacgtatcaattccaaaacatgannnnn

SEQ ID NO: 24432 - DNA, 2538 bp, Homo sapiens; identical to SEQ ID NO: 20316
  misc_feature 2538: n = A,T,C or G

SEQ ID NO: 24433 - DNA, 1100 bp, Homo sapiens
  misc_feature 1, 2, 3, 4, 5, 50, 63, 94, 122, 130, 168, 172, 1099, 1100: n = A,T,C or G
nnnnncgttggcgctgccacgtctgggccgcggttcccaactgtggcgcnggcggtggaggangaggtggggctggcgctgaagccggatccgnatccggtgctgtgcacactggtgggggngagtccgncgcgcctggctaggagcgccgaccgcagggcctctacngacnttactagaaaaatgaaacctgatgaaactcctatgtttgacccaagtctactcaaagaagtggactggagtcagaatacagctacattttctccagccatttccccaacacatcctggagaaggcttggttttgaggcctctttgtactgctgacttaaatagaggtttttttaaggtattgggtcagctaacagagactggagttgtcagccctgaacaatttatgaaatcttttgagcatatgaagaaatctggggattattatgttacagttgtagaagatgtgactctaggacagattgttgctacggcaactctgattatagaacataaattcatccattcctgtgctaagagaggaagagtagaagatgttgttgttagtgatgaatgcagaggaaagcagcttggcaaattgttattatcaacccttactttgctaagcaagaaactgaactgttacaagattacccttgaatgtctaccacaaaatgttggtttctataaaaagtttggatatactgtatctgaagaaaactacatgtgtcggaggtttctaaagtaaaaatcttgtaagaaaattgtcaaaggggctaatgctacaaggctacactcttcctagagttgaaatattttgttgctgcagccgagtgacctccataaatactggactgaaaaaacattgtaatactacaagtataatgacatttagaagattactttgggctggtgggacatgctgtgaatttagattacaaatgaatattataaaggggatgatttttaaccaaaggaatatatttttaacttgaatctttccttgcatggattttcctaaaagttggttactttctggtagcaagagttgggtataggagaatggcggcatcggttggcctttagtactgggggggtttccgcgtgcnn

SEQ ID NO: 24434 - DNA, 712 bp, Homo sapiens
  misc_feature 1, 2, 3, 4, 5, 708, 709, 710, 711, 712: n = A,T,C or G
nnnnncacttttaatctgactaattttatacatttataaggtacaagtatgtgttttcaatacatgtatacattgcaaaatgatcaaatcaggctaattaacatatctatcaccttacattcttattatttcttggtagtgagaatatctaaaatggaaatacagtcctttttatgtaactgagagaaacaagagcaagtatatgtggtagaatttaaaagtcatatgtgtatatttatatatgtacatctaggtacaatggcctgtgtacatataattatctgctatatattatgcatatgtaatacatatgcacctgtgtaagttggaattcttatctattctatagaaagaaaagttctacattgaaatatagccaacatccagttaactctgaaaaaaaatcacatcattgcttggctttttctgttgttacttcctgttggcctagtggcaatgattcattataatgcaatgtaattcaatatcacatggtgaatttaaatggctgtataggaaatctgtaacactgttcttgcttaaaaatgtaaaacttcaatagaaggcggttcatcagagaatttggtaacaccaaatagtaaacgctttgatttcagtaatactaagaccctgatagaattaaaatgtgactgaattttacttcttagtaattattttatagctaatatgtaaaaaagaaagacaccnnnnn

SEQ ID NO: 24435 - DNA, 1396 bp, Homo sapiens
  misc_feature 1, 2, 3, 4, 5, 8: n = A,T,C or G
nnnnnccngcaggaggatggcggaggacctggacgagctcttggatgaagtcgagtccaagttttgcacagctgaccttctaagacggggtatggtcgagcagcccaaaggctgcgccggcggcacccacagtagcgaccggaaccaagccaaggcgaaagagacgctcagatcaacagaaacatttaaaaaagaagatgatcttgacagtcttattaatgaaatacttgaagagcccaacttggacaaaaaaccctctaaattaaaatctaaatcttcaggtaacacatctgtcagagcttccattgaaggccttggtaaaagttgcagtccggtgtaccttggtggaagctctattccatgtgggattggaacaaatatttcatggagagcatgtgaccatctgcgttgtatagcctgtgatttcttggtagtcagctatgatgactatatgtgggacaaatcgtgtgattatctgtttttcaggaacaacatgccagaatttcacaaattaaaagcaaagttgataaagaagaaaggaacacgggcatatgcctgccagtgtagctggagaactgttgaagaagtgactgaccttcagacagatcatcagcttcgctgggtttgtggtaaacattaagaatgcagactgcacattcggacagatgcatccatgagagtggtctccatgaatcatcatcatgtttagacaatagtccctagcaataccattccctgtgggaaaaggcagtgaattttattgatacaactacatacatttttgaagaccaaatggactaaggaagatcatgtattataacactttggaattattcctgatacatggatgtttcacttagtaacaggcatctacattctttactaatctgtcttctgtttaatagaggtttgattatggagttccatacaaatatctagtttttcattagcaactgcaatattgattgctaatacgtttagcaaatcattccccaacttgtagcagttaaagtggataaagccggccagggcaaagagatcatttaggggtgtctacaacacttcttccagtcagatcttttgttgccaaagatcataatttggacatggcagaaaccaggtgatcagtggctgactgaagggtgttcagaagtagttacaggtattttgcaaaaacactgcctcatagctgatcttacctcatcaactcaaagcaatgttatgcacaatattaaatacatgttaccagttttagcttatttttccctcttttgttcatttaactatcaaaagttattttctattttgattacccaatatttttttaaaagagtttgatgcacccaaaatcacaaaaatcctaatacatacaggttattgttggattttcccaagt

SEQ ID NO: 24436 - DNA, 2182 bp, Homo sapiens; identical to SEQ ID NO: 24288
  misc_feature 1, 2, 3, 4, 5, 6, 7, 2179, 2180, 2181, 2182: n = A,T,C or G

SEQ ID NO: 24437 - DNA, 2538 bp, Homo sapiens; identical to SEQ ID NO: 20316
  misc_feature 2538: n = A,T,C or G

SEQ ID NO: 24438 - DNA, 2538 bp, Homo sapiens; identical to SEQ ID NO: 20316
  misc_feature 2538: n = A,T,C or G

SEQ ID NO: 24439 - DNA, 618 bp, Homo sapiens
  misc_feature 617, 618: n = A,T,C or G
acaaagttgaagagactttattctcaataagttgatttactgatgatatgtcatatgatgcaaaaaaggttttgtgtcattaactgaaaagtagcagcttctctatccaggatgatgagtcaacaggtttcactaatatttgtcatgctgtagcatttgtaagatttgtaaatgatgaagttcaaagaaaactttttctattgctaggagcctgccagaacaaaggccaatatataatgttgtgacatcatatctgataaccagaggtctggtatctacactcctggtgccccatcagtggttgtctccataagtcattttgcgttattaaaaaaaaaaagaaatcctgatgttgacattatagcacactgctttctccacagagatgctgatatcaaaaacttgaagatacagtgaagttctgaataatgttacaaaactggttacctgtatcaaagacccatttatgcaaaaatgttaaaaaaaaaaaaacacccaaaacaaaaacctggacagacagcacataaacctcctgcaccatacagacatccagtggcttctcagaggaagcgttctctacaggatatttgaattgaaaggtgaattgccagagtacnn

SEQ ID NO: 24440 - DNA, 2826 bp, Homo sapiens; identical to SEQ ID NO: 24318
  misc_feature 1, 2, 3, 2817, 2818, 2819, 2820, 2821, 2822, 2823, 2824,2825, 2826: n = A,T,C or G

SEQ ID NO: 24441 - DNA, 2639 bp, Homo sapiens
  misc_feature 1, 2, 3, 2637, 2638, 2639: n = A,T,C or G
nnnctcatattgtgggtgacactgtcgttcctaacgtttctccgatctcgtgagaggccttttcgtccaatttctacagaggtctcctaagatccccccggcgggcccgctcgtaattactcaatagtctttctctccgaaggcctcgcagtgtcactgatcaataggacatggcaaaagtaactacctggagaactaaaactaagcataatcttggcctgaactactacggtaaagatagtatcttttatttctgtttatgtaaacttatcaacaaattattaaagcagaaactctatcacttcttggaactaaagatttacatctagctataacaatagaaacctacctatcctggagttaactttctcagattactgctcctgacttttgctgttcttttccttttgcaagggggtgccaacaatggatggaagaggcaaggagatcttactttataggaatttctccaagttacaacgagcaactgaccaaatcatattcaactacaggtgttgagagagagagtacctgacttcagaccacctgggaagcacaatgcttagttaacaagaatatctggattaagcagtgccgaagtggccgcacaccgagtcaggccaaggaagctcttctgtcattgccgcccaactctgttccactttgcatgcagacatatcaaagactgtgatgaagatcatggtggacaaggaagaatgaaaaactttgtgatgggatctgggcctctacattagagaaagaacctaacaaaccccagttctttggattcgtaaggtgaggctgaggagggcttactggagttggagacagggagagctgtgtttctgggctcaaagccaagaaacggttaagaagaggggcttgcatcagtcatatagattaaaaagagcaaggcatgataattactaaatttatagtttcatgttttaacacagaagagtcagagggaaaactgacaatttaaaacggggcatgggatgagaaaaagtctaggagttactgagatgcctggtacttatctacaaaacttccatcactagacccttttgacctacgagaatagcagtttctatggttcaacctaatacactgtatgggctcaaatatataacaattagaattgagagtaatcagaataccaataatacccccccttctgaaaaagtaacagctcttagatgaagagagcttcttaagatcagcgtttaagagtcaaagcacctgtaagggagagttaacgaccctttcaaatcaagtgagggcagaagggtgagggcatagttcaaaggaacgaggcagctccaccggaaggtggcgagtaaaagctgcacaccgtggcaaatcagtagcaatgggaaagggcaggaaggtacagccaagaatagctacaaacaactggtcaccttcaaaggaaacgctgcatatggatgtctgtgtatatgtactatacatatcaaccaagcacacacataaatatttaatatataaaaaataaagtgctttctaacaggtccctgggcagggacattataaaacatttcacagaactgcaaaacaaaattgatacaatcaaagaacactacatccaacatatgtgaaaacagccaaacacagtatgtacaatctggtgggtgtcccaggacaaacatcctgtcatatacatggtatatacatatatactcttttactcaatatattatgacaatatatattttaaaattttgttatagacaaaaaataaaaaaccaaaacaaaagacaacccctacaaaaacacgataaggatcaagcaggtgagtcctagactgacagacaaatcactgcctccacggggagtcccattgccactgctggggaaaatgtgccagcgttccttccttgggtgcagggcctccacatcctccaaggcactgtgggctgcggcagtaaagttggcatcaccagtggtgagcaggtcgaagacacaggactggaaatagatgtccttcactggcatcttctcatggcattgagtgttggcagtctccagtgtgtagccaggccaggcctgcaccaaggaggtgcgaggcaggctgtgtcccaggatggcagacacctggccctgcccgtcatcgatgcgttcactcagggggcagccgttcacgcacagctgcaggtcctggctctcctcgtaggacatggccaggtcttcaggcatacggatggcaagggtcaggtagcgacccacctgccgcacaaacactgtggtccctatatagcgggcgtgcatctccacatagtggccactctccctttccacgatacgcaggctcttggcatcgctgtccccaccactggtggtgccatccacaaaggcggccggcaggtcatctgtcacagcttggtagactttctgatctgtacactcatggtgggctttgaagataatagtgatcttatttgtagcagtagcactggatccagggaccacaggtacgtttgtcacttgaactgaaagataattattatctatgagtggccaggccccttctactttgcatgtttggaagttatccttgaaagttctgaggtgaggatctccaaacaagccacaaaaaaggtaatgggagcggacgcnnn

SEQ ID NO: 24442 - DNA, 1517 bp, Homo sapiens
  misc_feature 1, 2, 3: n = A,T,C or G
nnnggctacaacattccactaaatcatctgccagacagagtggccatgtatgtgcatgcatatacactctacagtgctgttagaccttttggctgcagtttcatgttagggtcttacagtgtgaatgacggtgcgcaactctacatgattgacccatcaggtgtttcatacggttattggggctgtgccatcggcaaagccaggcaagctgcaaagacggaaatagagaagcttcagatgaaagaaatgacctgccgtgatatcgttaaagaagttgcaaaaataatttacatagtacatgacgaagttaaggataaagcttttgaactaccccccagcccggttgctctctgcagctctgcgcgaagcagttctttccgatcatggtttttcaacaaaaggaaaaatcatgaggtgaatcttccccttaaatgtaccagtactgattaactcaaattataaataccagaaatgcccactttcaatatgaactgaagatcttactcttcgaattgcaatctgctaagatatatatggggcattatatgagcatgtcctgcagattaagaataattttaaagtgagtgaagtcaaatcttacaacttcattgtgcctctttggtttttactatagaaacagtactttttttaatgatatacatacccatgaaaccttttcttgaatggcacaacccagagcttctgtgcttaaaatgttataatccaaattcctctcttttaagaaaaaaaatcagccatgacaatacttagcaattatcatctgagctatgtaaagtctaaaacaactataagggccatacattagtggccatttttaagcttgctaaacgatgatgggcttaaagaggtgggagccgggctatttaagatacagatctatttatatttagaggatgtgctaaatactttgagtggccatcctcttacacataattatactaaactcagattgaaacctgcctacaaatttcattctttaaatattagtcagttctgcttatttaggtcttctatggacaaactgcaaccaaccattcagtattaaaccaacagtccagtattaagccctctgaaaccttaatctttgtctggcaggaaggatttgagatataaaaccaacctctatgtgagcaggatgcattaaatgagttaagctgtttataatgaagcttcattatcttgaagcattataaactcttcgaaatataaaatatctataaatttctatgtacctgcccgggcggccgctcgaacatagcaagagaagaagcttccaacttcagatctaactttggctacaacattccactaaaacatcttgcagacagagtggccatgtatgtgcatgcatatacactctacagtgctgttagaccttttggctgcagtttcatgttagggtcttacagtgtgaatgacggtgcgcaactctacatgattgacccatcaggtgtttcatacggttattgggggctgtgccatcggcaaagccaggc

SEQ ID NO: 24443 - DNA, 390 bp, Homo sapiens
acgcgggggccggagtgcggcgctgggcggaagctaccatggcggccgagagaaagacaaagttgtccaagaatctgctgcgcatgaagtttatgcaaaggggactggactcagaaaccaagaaacaactagaagaagaagaaaagaaaatcattagtgaagagcactggtacgcggggggagaaggcgcggcgcccgtgggagtgcaaaaatggactaatacagatgacatggagaagatctggcaccacaccttctgcagtgagctgcacgtggccccagaggagcacctagtgctgctgaccaaggcccccctgaaccccaaggtcaacagagagaagataactcagatcatgtttgagacctttaacacctgggccatgtacctcg

SEQ ID NO: 24444 - DNA, 2199 bp, Homo sapiens
  misc_feature 2197, 2198, 2199: n = A,T,C or G
acacataaaaaaacctcttttataaaaaaatttttatttttttacataatagagacaggggctcgctgtagctgccaggctggcctaaaactccagggctcaagcaatcctcctgtcttggcctcccaaagtgttgggatttcaggtactgagacaccacacctgcccatttttgtttggttttttaatgggcaggttcttgctctcccaggctggagtgcagtggtgtaatcacagctcactgcagtctcgaactcctggactcaagcagtcctcccacctcagcctcctaaagcactgggattacaggcttgaggcactgcacctggccctgaccattttttaaaaaggttaggcttagtgcaaagtttaaaattatatgattcttaaaatactgaattagtttctaaactaaactagaggtataggtggacctgcttgaggtatctttgtttttatggaacatttttattacatgcctttataatttttcattgttcacaccctgtactgaaacctttttctcaaataccaactcttggctatgttaaatttgtagactttaaaagatgttatctaaattaatggtttaaatatacaaattgaaaatattttctttttagtggcaattttaaaagcaggccttaatatgggacctgcttttaaagtaaaatatgtggtactatgaattactaaattgctatataccatgtaatagtgagtatagctaatatttagtatgccttttaaaaattttggactgcttttcggttttaacaaattctccacatgtgaactactcaagaaattttccctttttaattgcctctatagcactcataagagctagggcattaggataaactagaatattttatgtttatgaatacttgtataaacttaaaagtgttttgatttcccacaatttcccaaaggaatgtttatttattaagagttgtgttgataatttaactgttacaatttcagcagttgaattcagtgaacactggttgaggagtgcctatttctaagcactgggtgtaagaagaaaagacacttgcaaaggaagagctaagattaacataatttctttggtttttctattgcttgttattattatgtaaaaactgggtggcagttcacaaggaagattgttgtaacagaagagtgacaaccaatagttttttgatcattaaatcaaattttgtaaacagtggcaggagcgtggacttaaaacaaggcttgcttatttggttttgtcaaagttttacgaaaatatatgatatatatttatactaaaactatataatccttagatttaggaaagcaatcagttaatgtctttagcacactaaagcagtattaaacacaggtacaagttggaaattgtagaaaactgaaagaaaacaagacaaaatgtctatggtagggaataaaagagtttaagatattatgtaaaattatgtgtattttcttctcttttacataaattgtttgtgaaaagtgtgctcaacttttttacaagagtgatattaacttggatttatttttcaatataatttggagaccctttgttatccaaataaaattgatgagtttctgtgcctgtaacaaaaaaaaaaaaagaaaacagaacagacaagacccctgtgtgcttgccccagaaagcttgtggtgggtggtaagttctcacgagatttatttatctgagcaacattgggactgagggaacatctgaaagctaccatcttgaaaatttttgaggaagtgtttctgaaatatttaaaaatacttaagtcagtcattttgaacaaaagaaattgatacaagaagtttttttttttaaggatgattgtctaattttgtaatatgttgttttttaaaaacctgtctgatggtgttttatacatttctaactttttacctgagttatctctttagtcttttggaaaataccctacacaatactaacctttaaaactatcaaatttttgttataagataacggtcatttggtaaaatgaaccttatgggtgcaggataaacggcatgtgacatccttttagagattggcgcatctggggcggtcgtactgatattcacaacgagagtccctatgtgtgtattgctagtcaaccatgtcgaaaaaaatccggcagcacatgcacaacatggcgaacgtatcattatatctaannn

SEQ ID NO: 24445 - DNA, 370 bp, Homo sapiens
  misc_feature 367, 368, 369, 370: n = A,T,C or G
acgcgggggagcgagttgacgctgaaaggctgctcacctttccctctcctggtagcgataccttttgtgcgtgggagtggacatcgcccaagttctgcgttagcctgggctcttgactcatggtttccgtgaatcctctaaagtatatgcaaaatttcgcgtgaaacattggcaaatttggagcgacagatctatgcttttgagggaagctacctggaagacactcagatgtatggcaatattattcgtggctgggatcggtatctgaccaaccaaaaaaaactccaatagcaaaaatgatcgaaggaaccggaagtttaaggaagctgagcggctcttcagtaaatcctcggttacctcagcagcnnnn

SEQ ID NO: 24446 - DNA, 1642 bp, Homo sapiens
  misc_feature 1, 2, 1641, 1642: n = A,T,C or G
nncctcatttccaaccgccattgtaaccttccccacttgtactcctttgtttctccccgtgaaaccattcccaattcgcctaaaataaaatttttccaaaagttttcccaccccccacgacattcccatgtaatctctctagtgtagagtccacctgtggtgttctaaggcagaattttttggataaaaggcataatcaaatagatgacttcccattatgatttacatttggtgtgaatttccttgtggttgatttaaaggataaccagtcagctgaagattttcccccaactttttgcttaacaaaagtgtttcgttctcatgtaggtaatcacattttgagtcatgctatatgttgagtgaaatcttctcctaagtcattgcatagaaaaggatcctcttgagtatgagatctcattgtgctgatggtggacgtgcccttctgatagatatgttgaatgaatggtatctcttgatgtttaatgccaacttctctaccttgcagtaagcttattctttgtgttgaaagtttctctacttgctccattgggaaagcacaactgatttgcagagctgtttgccatagagaccagatgactgatgttctccacatcacatcttgaaacagctttctctgggatgtgtccagcagggcccactcttcttgagtgaagtctacatgatatcctcgaaggtcatggaatccggtgatggcattgtactagctcagccaccaaatgtattcctctgggttttcactcacaccatccaagcactaagaagacaatccgagcggacctcggctccggagacgcagatctggcagctgggcgacaggcttcggagcatttccgggcgtcgcgggactccccgccgacaggagggcggttgccgagcctgtgacatccgcggagaccagcagaccccgggaatctcaccagtgacacgcgtttgtgaaaagctgtgaatattcagtgccacagggttaaacctcggtacagaagcgagaccctgctgggcagagaaagggtgacctggaaggtgtgtgagggctccgcccatgggcccctgtgatggtcatggcctcaagaatcacagtccagtttccatcattatcttctatggagttcttcattcccacatctgtggaccttaaaatcctaccgttgagtgcctgccttggatcagcagtcagttcgttaccttggttctcagacgatgcttgcaacaacaccatgcgattcgcccactcttggagaaaataagagaagtatccctgaaggatgaaatatcctcgaatatgaaaaggtctgctctctgaagaccaactgtctcagtctgctttttgctgctgtaacagaataccacagacttgtaggcagagaagccttcagagaaggatcctgactcggtggtttgtgcagtgacatttggcagtgttttctcggcaagcgagtctttgaggctgccctcatgctgctcagtgggcacaccaagaacaagagctggccagggatgacggacgcatctaggccttctcggcctaagggttacattagttatacactctggaggtgacttgacctgtcattgtgaacaattattgctcttggacgacccaggacataggccagccagtann

SEQ ID NO: 24447 - DNA, 561 bp, Homo sapiens; identical to SEQ ID NO: 24400
  misc_feature 559, 560, 561: n = A,T,C or G

SEQ ID NO: 24448 - DNA, 143 bp, Homo sapiens; identical to SEQ ID NO: 6927

SEQ ID NO: 24449 - DNA, 582 bp, Homo sapiens; identical to SEQ ID NO: 23129

SEQ ID NO: 24450 - DNA, 1966 bp, Homo sapiens; identical to SEQ ID NO: 22146
  misc_feature 1961, 1962, 1963, 1964, 1965, 1966: n = A,T,C or G

SEQ ID NO: 24451 - DNA, 4596 bp, Homo sapiens; identical to SEQ ID NO: 24040

SEQ ID NO: 24452 - DNA, 5134 bp, Homo sapiens
  misc_feature 1, 2, 5133, 5134: n = A,T,C or G
nnataggggagtcgacccacgcgtccggccgctgctgccagcgcttcctcctctgtcttcgccgagcggggctggttcctgcggcccgagcggcggggaggtgaaacaggagcccgtcggaggaaggggcagaagggagtggagagtgtaggggaaggggctagagggagggggaccgaaacggagcggggcagagaagagaaggcgccgcggcccagcccctcccccgcccgccgccgacccgccccggcagcgcctctgttccctagaacggcgctccccccgccctagcggccatgccggtgccgctctgccgctgagggagcccttccccgccagcgcgtgcccttccactccgccccgaggtcgcagcggcccgctctcccgccagcgccccctcctcgcggccacgcagcagcccgcgtctcgctctccccacccagtgcagtggccgccgcctcttccgccgccgggctcggggcctccgcagcgacaacatggaggccgtgaagaccttcaatagcgagttgtattccctgaatgactataaaccacccatttcgaaagcgaaaatgacccaaattactaaggcagccatcaaagctattaagttctataaacatgtggtacagagtgttgagaagtttattcagaaatgtaaaccagaatacaaagtacctggactttatgttattgactccattgtgcgacaatcccgacatcagtttggtcaagaaaaggatgtgtttgcacccagatttagtaataacatcattagcactttccagaatttatatcgttgccctggggatgacaagagtaaaatagtgagagtactaaacttatggcagaagaataatgtatttaagagtgagattattcagccccttttggatatggcagccgggattccgcctccagttgtcacacctgttttggccagcactaccactgctatgagcaatactccaggaactcctgtgacacctgttactccggccaatgtggtccaaggcttacctgatccgtgggtatctcagataacaaatacagatacacttgcggctgtagctcagatcttgcaaagtcctcaaggccagcagcttcaacaattaatacaaaccttacagatacaacaacagaagccccagccttccattctgcaggccctagatgctggtcttgttgttcagttgcaagctcttacggcacaacttacagctgcagctgcagctgccaacactcttactcccttagaacagggagtctcctttaacaagaagttgatggataggtttgattttggggaagactctgagcatagtgaagaacccaaaaaggaaattccagcttcacaactttctcacgtttcagaatctgtgaacaattccatttttcatcagatagcagaacaactacaacagcaaaacctagaacatctcagacagcagctcttggagcagcaacagcctcaaaaggccactcctcaggatagtcaggaaggaacctttgggtcagagcattcagcgtcaccatcacaagggagtagtcagcagcattttcttgaacctgaagtcaatttggatgattccatagatattcagcaacaggatatggatatagatgaagggcaagatggagtggaagaggaggtctttgaacaagaagctaagaaagtggcggttcgctcaagatcaagaacacattcacgatctcgttcaagatcaccaagaaaacgaaggtctaggtcacggtctggctctagaaagcgtaaacacagaaagcgatcacgctcccgctcaagagaaagaaagaggaaatcatcacggtcgtattcaagtgaaaggagagccagagaaagggagaaagaacgacagaaaaagggattacctccaattagatctaaaacactaagtgtatgtagtactactctctgggttgggcaagtggacaagaaggcaacacagcaagacttaaccaacctgtttgaagagtttggacagattgaatccattaatatgattcctccccggggctgtgcttatgtctgcatggttcatcgacaagatgcatttcgagctcttcagaaactcagttctggatcatataaaattgggtccaaggtcattaagatcgcttgggctttaaacaaaggtgtaaaaacagaatacaaacaattctgggatgtggatcttggagttacatatataccatgggaaaaagttaaagtggatgacttggaaggttttgcagaaggaggcatgattgatcaggagactgtaaatactgagtgggaaactgtgaaaagctcagaacctgttaaagagacggtccagacaactcagagcccaactccagttgaaaaggagacagtggtcacaacccaggcagaggttttccctcctcctgttgctatgttgcagattccagtggcgccagccgtgcctacagttagtttagtcccaccagcatttcctgtgtcgatgccggttcctcctcctggattcagtccaatccctccacctccttttttaagagcaagttttaacccttcacaaccaccacctggtttcatgccgcctccagttcccccacctgttgtgccaccccctacgattccaccagtagtaccaacatctttagtgcagccgtcattatccatgacaccggaaactgtgaaagatgttggatttggtagccttgttataccaggcggttctgttgccagcaatcttgctacttccgctctgccagctggaaatgtttttaatgctccaactaaacaggcagagcctgaagaaaaagtacctcatcttatagaccaccagatttcttctggtgaaaacaccagatcagtgattccaaatgatatttcaagtaatgctgcaattttaggaggacagccgccaaatgtgacaagcaattctggaattctgggagtccaaagaccaaatgtatcaagtaattctgaaattcttggggtccggccatctaatgtttccagtagttctgggattattgcagcccaaccaccaaatattctaaataactctggaatattgggaatacagccacccagtgtgtcaaatagttctggacttttgggagtgctacccccaaatatacctaacaattctggacttgtaggagtacagccaccaaatgttccaaatactcctggacttctgggaacacagccaccagctggacctcaaaacttaccccctttaagtatccctaatcaaaggatgcccacaatgccaatgttagacattcgtccgggactaataccacaggcacctgggccaagattccctttaatacagcctggaattccaccccaacggggaatcccacccccatcggtacttgattcagctcttcatccaccaccccgtggaccttttcctccaggagatatttttagtcaaccagaaagaccttttttagctcctggaagacaaagcgtagacaatgttactaacccagaaaaaaggataccacttgggaatgataacattcaacaggaaggagatagagattaccggtttcctcctatagaaaccagggaaagcattagtagacctccccctgtggatgttagagatgtggttgggcggcctatagatccaagagaaggtcctggacggcctccactagatggtagggatcattttggaagacctcctgtagatataagagagaatcttgtgaggccaggtatagatcatcttggtcgaagagaccactttggctttaatccagagaagccctgggggcatagaggagattttgatgagagagagcatcgggttctaccggtctatggtggtccaaaaggcttacatgaagaaagaggtagatttcggtctggaaactatcgatttgatcctagaagtggtccttggaaccgaggatttggacaagaagttcacagagattttgatgaccgcagaagaccctgggagaggcaaagggatagggatgacagagattttgatttctgcagagaaatgaatggaaatcgtcttggacgagacagaattcaaaacacttgggttccccctcctcatgctcgggtttttgattattttgaaggggccacttctcaacgaaaaggtgataatgtgcctcaggttaatggtgaaaatacagagagacatgctcagccaccacctataccagtacagaatgatcctgaactttatgaaaaactgacatcttcaaatgaaataaacaaggagaagagtgacacagttgctgatatagaaagtgaaccagtggtagaaagcacagaaactgaggggacataatcatcactcagtaggtaaaagataccttttgtaaagttgtcatctctctgtaatagataatggctgactggaccatagttgttcacttttgtctgccagaattaagttaatctgatgttcatgttcacctttctcttaaaataattgtacaactgacttgtatagacattgttcttaatatgaacatggtaggtaaactttttttttatttttttctgataaaatacaaatgttggccccagattcttttaacgtcaaggaaatgaataacagcttgtcagagacttcctatggaagaaagaattttttagatactatcattaggttggatatggtaatagatatatttcagaatagcaagtggtggtatatcttatccatatctttaggctgctgcagaattttaaggttatagataaagctgtgatattttatgcaaagactggctctaggtatttgaggagcacaatacagagattttaaaaagtgattttgtaaaatctacactatggtctctgtttctccaaagtaagtgtttgtgatttgttcctcatactgcagtgagtaaaaaagaaacaagaaaacaacaacataaatattaaagtacgtttcaatgttgggtgaattttgtttttagatgccaataaaacttatttgtttgataccagtgaaataaaaaaaaacttttgtgggcggcccggcccgaaaaatttttaaaccatccttgggcgcggcgccaggtaatggacacggtcctccggtcccagggacccgcccgcacagggtggtttcaccaaaaaaccggggccgctctcgcaann

SEQ ID NO: 24453 - DNA, 654 bp, Homo sapiens
  misc_feature 653, 654: n = A,T,C or G
acatgagcaaaaacagcaagtggtgaaatttttaatcaagaaaaaagcaaatttaaatgcactggatagatatggaaggtatagttctttcttttaatctgtgtgttctagatggatagcagtcactcaagtcataaatattaaattaataagattaatgtatacttattgggatatagggatcagtatgaacacaaatcagttaggtagaaaaacaattatttggactgggcaacataaaagttttagtaggattcatcttttattatattgactgatgttatttgctatgtaatgtttttggttacatgatcttatgttagctaaagggatttcatattttatgaagtttgaactttaattttagtttactttatgactcagtattgaacttcttaaccctttctaatagtttttaacctgtgtcttacatgcttttccactaaatacgctgtattaaccataaataggggttgaaaatccttttgtcttttcaatgattctgccttaagttgctttctttgaagaatattaatgttagcttatccctgcatgacaattaattgctgttcccacgtaccctgcgttcaacagcttttttccttttttatttccagtgtattttgatgtttttatttttaattggtgtcgann

SEQ ID NO: 24454 - DNA, 467 bp, Homo sapiens; identical to SEQ ID NO: 21929
  misc_feature 445, 456, 460, 461, 462, 463, 464, 465, 466, 467: n = A,T,C or G

SEQ ID NO: 24455 - DNA, 4151 bp, Homo sapiens; identical to SEQ ID NO: 24415
  misc_feature 1, 2, 4127, 4128, 4129, 4130, 4131, 4132, 4133, 4134, 4135,4136, 4137, 4138, 4139, 4140, 4141, 4142, 4143, 4144, 4145,4146, 4147, 4148, 4149, 4150, 4151: n = A,T,C or G

SEQ ID NO: 24456 - DNA, 773 bp, Homo sapiens
  misc_feature 772, 773: n = A,T,C or G
acctcaatgaagcagcaggtgtcgcagcagaagaagccaggaactacaaggaaaagaaaaagttaaagggccaggaaaattctctgtgttggactgctttagacaaaaatgaaggcgaaatgataacttctaaggataatttagaagatgagactgaagatgatgacctatttgaaactgagtttagacaatataaaagaacatattacatgacgaagatgggggttgacgtagtatctgatgactttctggctgatcaagctgcatgttatgttcaggcaatacagtggattttgcactattactatcatggagttcagtcctggagctggtattatccttatcattatgcacctttcctgtctgatatacacaacatcagtacactcaaaatccattttgaactaggaaaaccttttaagccatttgaacagcttcttgctgtacttccagcagccagcaaaaatttacttcctgcatgctaccagcatttgatgaccaatgaagactcaccaattatagaatattacccacctgattttaaaactgacctaaatgggaaacaacaggaatgggaagctgtggtgttaatcccttttatggatgagaagcgattattggaagccatggagacatgtaaccactccctcaaaaaggaagagaggaaaagaaaccaacatagtgagtgcctaatgtgctggtatgatagagacacagagtttatctatccttctccatggccagaaaagttcatggccttcaaacaatgaann

SEQ ID NO: 24457 - DNA, 1159 bp, Homo sapiens
accgccgccggggggggcatatttttatttcggggccccccttggacgcctccctcgttggggaaggccccccctctggctcccccgtgaacccctctgcgggggtgttgtttgacaagagacgctcgtcgtgtttcccccggggcggcgttttttattggtgggggaggatcaccccgcgccccccggctcggttttatgacgccggcggtatttctcttctgggacgaacgcgcgctgtgtggcccgcgcttgctcttctctctttcctcaatctggggggcccgcgcgcgcgccccccccgccgctgttcttcagagaacatttctctcggtgggggaggtgccgccgccgccgcaccctccttcttcttttttttttcttttttttttttttttttttttttcttttttgttttttttttttttttttttttactgtgaatatatactttttatttagtcatttttgtttacaattgaaactctgggaattcaaaattaacatccttgcccgtgagcttcttatagacaccagaaaaagtttcaaccttgtgttccacattgttctggctgtgctttgtccaaatgaacctttatgagccggctgccatctagtttgacgcggattctcttgcccacaatttcgcttgggaagaccaagtcctcaaggatggcatcgtgcacagctgtcagagtacggctcctgggacgcttttgcttattttttgtacggctttttcgagttggcttaggcagaattctcctctgagcgataaagacgacatgcttcccactgaactttttctccaattcgcgtactagccggacttggattttctggaaagatttcagttgaggaacgggaacaaagattatgatagctttccgaccaccaccaacttcaatttccttagctgccgtaatattcagctccctgagctgagccttgaggtccgagttcatctccagctccagaagagcctgggagatgccggactcgaactcgtccggcttctcgccattgggcttcacgatcttggcgctcgaactgaacatggctttctcctgggagaacttgccgagcgccggcttaggaagagacccaaatctcgcgagagcacgtcaaaatccggcgtccgaaggcaagaggcggaaac

SEQ ID NO: 24458 - DNA, 2538 bp, Homo sapiens; identical to SEQ ID NO: 20316
  misc_feature 2538: n = A,T,C or G

SEQ ID NO: 24459 - DNA, 2055 bp, Homo sapiens; identical to SEQ ID NO: 24301
  misc_feature 1, 2: n = A,T,C or G

SEQ ID NO: 24460 - DNA, 1715 bp, Homo sapiens; identical to SEQ ID NO: 23747

SEQ ID NO: 24461 - DNA, 1309 bp, Homo sapiens; identical to SEQ ID NO: 23323
  misc_feature 1, 1308, 1309: n = A,T,C or G

SEQ ID NO: 24462 - DNA, 1017 bp, Homo sapiens
  misc_feature 1, 2, 3, 4, 5, 29, 30, 40, 41, 970, 995, 1011, 1012, 1013,1014, 1015, 1016, 1017: n = A,T,C or G
nnnnnctctcttgtctcccgccttgaacnncccatcgaanntcaattgctagggacgcgcgccattgtgttggtacccgggaattcggccattatggccggggatattttagaatagactttttaaaatgccatatgtaattttatgcaagttgactatatatcttgtacttaataaattataggctcattttgttctctgctagtttaaagtaattcgtttaataatagatgtgtttttagaggaaatgctgttacttggaattaattttccagttatacagtcttctataacttactaataatattctatatgtactttatgtaatttccctaaaaagaatgaactaccactacactatggtgttaaaccaaaatatagggaaaataaacactaactgctgcttatggataatgttgcaactacttgttatgcatataaatattttactttttcacatgtatagattgcatttcttaggtgttttaattttttaaatatatttatgttttaaaaatttagttttgttttctgttttataactatagtgagaatgatgttttgaagcaaaatttttggttataaaatagttttcaggattatatatatatatactggatcctatcgccttttagtagaatatgaaatattcttttagaaatccaatataaataggttataatagccatattctttattactttattgagatataatttacatgccataaagtttacccttaaaatatataattcagtggtttttagtgatatttacgtggtacaatcatcatcactttctaattccagaatattttcatcaccccaaaaagaaatcctaaatccattagcagttacttcccattcttcccttcctccagcccctgaaaacactaccatctacttttcatctgtatggatttgtctgttctggacatatcacataaatagactcaaacaatatatggctnttttttttttttggtctggcctctntcatttagcttaatgnnnnnnn

SEQ ID NO: 24463 - DNA, 3317 bp, Homo sapiens
  misc_feature 1, 2, 3312, 3313, 3314, 3315, 3316, 3317: n = A,T,C or G
nnctccccgcggtggcggccgaggtacgcggggtgctgggattacaggcacgagccagtgcgcccagctgcctctgtttcttttattagctgttctggactgtggggctccttgggcagatgctgtattatggggataagccacacactttttgaactggcccggtcaggggggacataaccatttcctgtgccaccccatcaatccccacctattctgagtgtaggctcctcccctgcttgagtaatggccacagatcttggctcggcactcctaagctgcatgttgaattcctgggacaacaagactggcttgtggttccattctccagatccttgggttggcttctgggtgcactaggagatctgaaatgctctcaggccaccaggaaagtactggaagtaaagtctgactctaaagaagatgaaaatctagtaattaatgaagtaataaattctcccaaagggaaaaaacgcaaggtagaacatcagacagcttgtgcttgtagttctcaatgcacgcaaggatctgaaaagtgtcctcagaagactactagaagagacgaaacgaaacctgtgcctgtaacttctgaggtgaaaagatcaaaaatggctacttcagtggtcccgaaaaagaatgagatgaagaagtcggttcatacacaagtgaatactaacacaacactcccaaaaagtccacagccatcagtgcctgaacaaagtgataatgagctggagcaagcaggaaagagcaaacgaggtagtattctccagctctgtgaagaaattgctggtgaaattgagtcagataatgtagaggtaaaaaaggaatcttcacaaatggaaagtgtaaaggaagaaaagcccacagaaataaaattggaagagaccagtgttgaaagacaaatacttcatcagaaggaaacaaatcaggatgtgcaatgtaatcgttttttcccaagtagaaaaacaaagcctgtgaaatgtatactaaatggaataaacagctcagccaagaagaactccaactggactaaaattaaactctcaaaatttaactctgtgcagcacaataagttggactctcaagtttcccctaaattaggcttattacgaaccagtttttcaccaccagctttagaaatgcatcatccagtgactcaaagtacatttttagggacaaagctacatgatagaaatataacttgccagcaggaaaaaatgaaagaaattaattctgaagaagtgaaaattaatgatattacagtagaaattaataaaaccacagaaagggctcctgaaaattgtcatttggccaatgagataaaaccttctgacccaccattggataatcagatgaaacattcttttgattcagcatcaaataagaatttcagccaatgtttggaatccaagctagaaaacagtccagtggaaaatgttactgctgcttcgactctgctcagtcaagcaaaaattgatacaggagagaataaatttccaggttcagctccccaacagcatagtattctcagtaaccagacatctaaaagcagtgataacagggagacaccacgaaatcattctttgcctaagtgtaattcccatttggagataacaattccaaaggacttgaaactaaaagaagcagagaaaactgatgaaaaacagttgattatagatgcaggacaaaaaagatttggagcagtttcttgtaatgtttgtggaatgctgtatacagcttcaaatccagaagatgaaacacagcatctgcttttccacaaccagtttataagtgctgttaaatatgtgggctggaagaaagaaagaattctggctgaataccctgatggcaggataataatggttcttcctgaagacccaaagtatgccctgaaaaaggttgacgagattagagagatggttgacaatgatttaggttttcaacaggctccactaatgtgctattccagaactaaaacacttctcttcatttccaatgacaaaaaagtagttggctgcctaattgcggaacatatccaatggggctacagagttatagaagagaaacttccagttatcaggtcagaagaagaaaaagtcagatttgaaaggcaaaaagcctggtgctgctcaacattaccagagcctgcaatctgcgggatcagtcgaatatgggtattcagcatgatgcgtcggaagaaaattgcttctcgcatgattgaatgcctaaggagtaactttatatatggctcatatttgagcaaagaagaaattgctttctcagatcccactcctgatggaaagctgtttgcaacacagtactgtggcactggtcaatttctggtatataattttattaatggacagaatagcacgtaaaacaaattcttgcctacaccactagaagacatctattgaagagaatggattggttgctgactttaaccaggaactagggccatttttattacaatgaactcaggactggcaacaaccatatggttgttccattttcataaaattggaaacaatgcagtaatagcttattgttttgttttttaaagaagatattttattatcttttacagaaatttatgattgatgtattttatctatagttatttagacatgtttacatgcagcagataattgttcatagtggactgaaaactaatgcaaggactatggtctcagtgataagtatattttgaagttcttaatatggaaatataccagtgtagcttggtactgtatttttttatattgatctgctgataccagtgataggcttaaagattgtattttcacagagtggaaaccaatttttttagttattgttcaaggagggtgcaatattaagtgttttggaatttgaagctaatttttaaaaggcctgaactatactttgaagaaacccctatagaaaaggaaagctccagctaaataggaagaattagaatattgagcttttttttcctgatttttctctttcctatctttgatggaaggaggaagtagaaagtggtaaagaattgaggctttccttcttggagagctgtaaatgactagcattaggaaggtaccctcctagattcattattctttcttgctgggttcccctttctaaactacagggactgggcccctgtgggttccaattctcacaggtttaccaacgtcttcatctcctgcggcatcgtggtgccggttctgggcccacaaatggcggggttgcgccccggcggtggaggcgcacaggcccaaaagggtgaaggcgggccctgaaaaattgtgaaaaaaaggcgcctcnnnnnn

SEQ ID NO: 24464 - DNA, 2143 bp, Homo sapiens
  misc_feature 1, 2, 2062, 2083, 2129, 2130, 2131, 2132, 2133, 2134, 2135,2136, 2137, 2138, 2139, 2140, 2141, 2142, 2143: n = A,T,C or G
nnccagtgagggggggtaaaacgactccctatagggggaattggaggtcccccccggggggggccgcctttttttttttttttcctttttttttttttttaaaaattttttttttttttttttttttttttttttttttttttttttttttttactttacgcatttttaataacaatggtacccaattcattaacaaatgaatttaggcaatgtgctttgctctacaatccatcagatacattttcactgcagatagttcagaaatcattttggaaatagacacaaacatgtacatattcatttgctgaaaatgccacttacagctttaatatcaaatatagttatcatagttcacagaaaaagtataaagtgcaaaagctccacttcaaaaggccttaagtcactcccaaagcaatgaggattaaattttaccacagccagtgggcatgccacccttatgtaggacacctacataaggtataaaacaaggtatatatctgaaaatctggtttaacatacagagaaagatacaattcaaacaattagtcctataaagtaggggttatttatttttttaagtttgcaggggaattatgtctataaaatccattgagaatcccaatctggcccaagacttctctttggccagctggaataatagcacctaggcaaagccttggctatgaaagctttcagattaatttcagtgtaaaaggagctaggagaggggccctgactgggtgagcttcagcatccacctggtccctcagagatggttccatgtctgccccaagggataaagagccaggaaggctcaaatcccagtcctgagggctcatggaagcatgatgaactggcgagagaagttttacacacctgacagatccagtaagtggaataggtggtcgtatttttacaaagccttgtgtttgatgaccatcaagctttgtccctcaacagaacatctttgatctataattaatgttttaggcactcttcactggacaggcatagagttccccaaaaatgcagcccatccccaaatggattcagacatctcatctccacacaccttaaatgtgttcatggaaggacttgatttataatgatgtaatcataaagggaagaaaatattactttttctaataatcaacaactaaacactgtaaaacatgaatcgctgactgaaatgatcactcggaaacatgaatggttttttatagcctaactccagtttctgctgggtattgatcttgggcaaattctgaccagaacaaaatctgattagccatgccaagtaaccacaaccatgacctaactcctaagtgtcagccctactgaagggagggagattcttgactgcccatcaattaatgaaataaactattcattttttacaatctgaacatatcaaaatctgtaaagtcacatatttaacagctatttatgatgactcaccaagccaagtgcagaggcacatcaaaaagtacaattacattcattactttttggagcccattcatgttaggcttgattaaaaaggtagactcagtagtcagtctcagaatccagtgatcagcattcaagcatatagctaactctagtgtattccaaacctacacttcatgaaaaaatatacaactggcatttacatgccattcaagctacaggataaatgtcaactctgaaagacatcatttatttacaactatattgggggaaaaaagaggagaccaaaccaaaatattaacaaggattatacctgggcaatagaaatatgggttacttttttttttctttgacttctctgtagtttcccaattttctttaaagagtttgtagtgcttttacatatatgagcgatgccataaacccaacttaaaataagatgggtatatttctactctcttggtttacatcccatgctggcaagctagagtgatttctgttcaaaagtgaagttatgttttgtcctcctcaaatatactccattccacatttctttctcagctcatctctttaaaaccagtttctagaagcacattctgcttctcacattanaaaaaaaaaaaaaaaaatatnaaagggcccccccccgggggggaccccaaatcccctttttagaggnnnnnnnnnnnnnnn

SEQ ID NO: 24465 - DNA, 2538 bp, Homo sapiens; identical to SEQ ID NO: 20316
  misc_feature 2538: n = A,T,C or G

SEQ ID NO: 24466 - DNA, 1037 bp, Homo sapiens
acgaattgggaagccacagttaccaccagtgtgcttgtaaacagtttttaagataaacattcatgtggtgactctacttggggttgccaaattccacatattttctcaaagcagaagctttgcataagtctatacaagtgaccagcctcctctttttcagggttgtacgcgggagccccggcgacccgggcttctgtgaaacatggcggtaggctgggaccataacacaagcatgactatatgaaggaagaggaaggttttcctgaagatgaggcgactgaatcggaaaaaaactttaagtttggtaaaagagttggatgcctttccgaaggttcctgagagctatgtagagacttcagccagtggaggtacagtttctctaatagcatttacaactatggctttattaaccataatggaattctcagtatatcaagatacatggatgaagtatgaatacgaagtagacaaggatttttctagcaaattaagaattaatatagatattactgttgccatgaagtgtcaatatgttggagcggatgtatggatttagcagaaacaatggttgcatctgcagatggtttagtttatgaaccaacagtatttgatctttcaccacagcagaaagagtggagaggatgctgcagtgattcagagtaggctacaagaagagcattcacttcaagatgtgatatctaaaagtgcttctaaacagtacatcaacagctcttccaccaagagaaagatgattcatcacagtctccaaatgcatgcagaattcatgggccatctatattgtcaataaagtagcagggaatttcccataccagtggggcaggaatccccatcctcggggtctgcctttggggcttgtcaacatgatcttcaattgctccacgaaaaacaatgcctttggggaaggtcgccaattatccttaaggagcgccaaaatgtttgttcaaccatgtccacttttacgggggccacacactataaaaacacacccttgtgaagagtaacaacgggagcggcgg

SEQ ID NO: 24467 - DNA, 1474 bp, Homo sapiens
ttttcacagacacacacacactctctctctctctctctctctctctctcaacacatggccctcaaaaaagtgagggaatcttaattatttagcaatgtggacagttctcttcccagagagctctgctttgagattctcaaagactaaatatctagatggatatacgccaagggagagacccgcacagggcacagtcccattccaggcacagagatctgtgtctgtgcagaaattcaccaaatagggggttgaagtagcaagcatacagtactggaggtggagggaacaagccacagggacgtccctgtcaccttgaggggcagagctctgaggctccaacccagaggaaacttcccattctgttgctttctctaccggtgctgaggaaggaggccagattggtacctgttgtgggaagttttgtctgcagagaaacttgaatagaccccccgactcttcccggagcagaatttgtatggactctctgggtgtggagcccaggcagggctcacttctcaggctgaagtcgctgagatgaatgggcagcccaggctcagccccaggccctgctgcaggcttgtgggaattggtgtctcaccagggtgtgcgcggctcaaggttctcacatcccccaaaaagatctggtgacttctaggcttcctgcctagaaactgaactgagggcacccagttttagaaagattcaaacatacaccagaaggatcacagcccaaatatcaggacactggggtgagagagggctgctgggagtcatttttaggccaggtctctctgagcagctggctgcaccacaacagaaatcaaaacaaggaacagctcccgagggcctgcctctgctccagggactggggcctagaggtcaagggccccatgcctgaatccctttcttctgggtggatctggcagggacccctatcatcttcccaaagaagggggagaggagaacgccacaagatcaaactccaccaacccacccacctgttccacagctaggattccttcagcaccccgctcctgcctcttgctctctgagcgccactggtattccctccattgtccccaatgagcctggcatccatcttggtaacattgcagtttcctgtctctcagattgtttccatttttgattgagaatgcaaggtatttggaggggtaggggaagtgagtaaccttaaagaaataatatattagttaaatacaataacaggaaaaataggggttattttatctttttccccttattaaaaacaagaactaccaaaccaaggtctaaacttaaatagtcctacacctattctgcaaacactagtaataggaaaataatgcctgactggaattcccttgtcttttttccttagatgataaaagtagtaacatgccttgctgaggaaagcaatggatataaatgcctgtaaaatacgctgctctaacatctgaaagtgacggacgcgggg

SEQ ID NO: 24468 - DNA, 328 bp, Homo sapiens
aattcaagctccacattgttattactttagcacatatcgttttataacgtggtgctcatttgctatgcacatctagtaaaacaacattttttacaacttaaaaatagtgaactagttacgttaatgaagagcttattaaagcctttaatcttcaagtagctactatgaatgtcagcaagagactcataaattacatattttaatttactggttaattgtgtagttatatgagacgtctttggtacactgagcacctgcactaaattactcaaaatgtgctgtaaagtttcttctttccagtaaagactagccattgcattggctcctt

SEQ ID NO: 24469 - DNA, 1185 bp, Homo sapiens; identical to SEQ ID NO: 21532
  misc_feature 1, 2, 3, 4, 5, 6, 7, 8, 9, 10, 11, 12, 13, 14, 15, 16, 17,18, 19, 20, 21, 22: n = A,T,C or G

SEQ ID NO: 24470 - DNA, 522 bp, Homo sapiens
  misc_feature 1, 2, 3, 4, 504, 522: n = A,T,C or G
nnnnagcagtcgtggacgttctaagagtagcagatttagtgaagggtttggtgccagagactaccgacaaagtagcggtgccagcagttccagcttcagcagcagccgcgcaagcagcagccgcagtggcggaggtggccacggtagcagcagaggatttggtggaggtggctatggaggcttttacaacagtgatggataatggaggaaatttataacttcccagggggttgactggtgggagtatctgagcctgctttgcagtaggtcaccctgccaaactcagctaacatggaaaccacatccccctcacccagactataccttgtgtagcttcaagaactcgctgtattggcataatcagtgacttgtacattcagcaatagcatttgagcaagttttatcagcaagcaatattttcagttaataaggtttcaaaaatcatgtaaggatttaaacttgctgaatgtaaagattgaacctcagtcactgtagctttagtantgcttattgtattagtcn

SEQ ID NO: 24471 - DNA, 1380 bp, Homo sapiens; identical to SEQ ID NO: 20118
  misc_feature 1380: n = A,T,C or G

SEQ ID NO: 24472 - DNA, 897 bp, Homo sapiens
  misc_feature 1, 2, 3, 5, 10, 11, 16, 19, 25, 27, 30, 35, 39, 43, 44, 49,52, 66, 73, 78, 80, 86, 91, 107, 116, 119, 122, 128, 131,132, 138, 139, 149, 153, 157, 163, 166, 167, 172, 181, 182,184, 185, 188, 198, 211, 220, 226, 229, 231, 237, 240: n = A,T,C or G
  misc_feature 243, 249, 250, 258, 267, 282, 289, 293, 294, 297, 308, 319,328, 335, 352, 359, 372, 389, 390, 897: n = A,T,C or G
nnnanatctnnagccnaanttggananaanaaatnagcngttnntgttnacnaaaaaattttaccnccgaaanttttnanaaaaanaattnacccctgtaacaaatnttgccaatnccnccnatggtnaanngtccannaaaatttgtntggnaaanggcctnatnnggttncgggcccannanncgnctaatttacnccaatgcttggcncaaaaaggngggganttntncttatnaangcnggagtnnaaaggttngggtaaccncccaaggggttttcnccaaggncacnnacngttgaaaaacngaccggcccangtgaaattnaaatacngactcacctatagggcnaaatttnggtaccgggcccncccctcgagttttttgnntttttttttaaaaaaattttattgtataaatagagacagcgtcttgctacattgcccaggctggtctggaactcctgtgctcaaggaatcttcctgcctcggcctcccgaaattccagaattacaggctgagccatcactcctggtctcgcccagtagatgtttcaaagtagatgttttcttattagagagaaaagcactcttggaggtagtaagatgggccggtccttgatctgagaaatgggcgcacaacatcgctgttctctctgcaaaggtggggaccagaatccagcttgcctgaccttgcaagcaggcatcggcctaaaggtttcagcctcccagtggcgctctgtttgcacgccttaggctcccgcgtacaaaggtctggcctcctcaccccaacttgggaaaccctctggggccatcccagctccagagccccttgtggggtcggtgagacctcattgtggccacattacagcccagtgcctctccctgacaagcctgn

SEQ ID NO: 24473 - DNA, 1214 bp, Homo sapiens; identical to SEQ ID NO: 20119

SEQ ID NO: 24474 - DNA, 2887 bp, Homo sapiens; identical to SEQ ID NO: 23946
  misc_feature 2877, 2878, 2879, 2880, 2881, 2882, 2883, 2884, 2885, 2886,2887: n = A,T,C or G

SEQ ID NO: 24475 - DNA, 933 bp, Homo sapiens
  misc_feature 1, 2, 3, 933: n = A,T,C or G
nnnccagatgcctctgggcgtcggtgttctcttcccggtgtacgaagggtaccgggccacgtgtacatgccagagctgttgatgagagttaccagtattatgaatgtctgtgcatccaggaaaagtgttctgttggagagtcccaaaatagctgtaaatgctctcttctagctctgccattaaattattgggacatttgtttctttctctcccctcctccaagcccaccactttctgaagctgtgttactgatgtgatgactgtccaggattttgtatcatcccctgccttatgccctccggtctcctctcctgtgggactctcccttcttaggcacagctgcacttagaattgtaatccagtggctctcactggtttcactgaggcagcttagagggaatgccttagtaaactgaactggagcagaatctagtttgattaggagctagattataatctaggttccaagtacagaatttggagctaaggactgtgactgaaatcattttcccatatgagcagaccctgtgtgtcaggcctgtttcccatatgagcagagcctgtgtgcaagtctgtttctggcatgtccctcattgaggaagggaagcaaaagctggttattgccaagcctattaacacttaatatgcaaattctatcatcctgaaactggggcatctgaggaaaaggtgaccttgctggatggctttatttgcatggctctgcctgtctgcagtggttgagtcctcatcacctggtatgtgttgagcaaatgtgtgctgatcgtgatgcccaggcagaaacctcttgaaaactgctgcggcatgctttaaagacagccactaaagggggaccgcccagaaggtaaaatcacgagcaggacaaaggggactacccagaacgcgatggggtaagagacaacgctctcaacgaan

SEQ ID NO: 24476 - DNA, 1782 bp, Homo sapiens; identical to SEQ ID NO: 21380
  misc_feature 1766, 1767, 1768, 1769, 1770, 1771, 1772, 1773, 1774, 1775,1776, 1777, 1778, 1779, 1780, 1781, 1782: n = A,T,C or G

SEQ ID NO: 24477 - DNA, 829 bp, Homo sapiens
  misc_feature 1, 2, 3, 829: n = A,T,C or G
nnngacctcatgatccgcccgcctcggcctcccaaagtgctgggattacaggcgtgagccaccgcacccggccaatgtacattctctaaagtcacctgtcaataacacactaggcctgcctcctgcctgctataaatatcctcaacaggttataaacagcagcaggctacctgtgttcattgcaagtaaattactcatcatttgtaggttaaaagcataggcccgacttcttaaataaacatagggaatttgctgcagcagcaggccagaaaccactgtttcaaatctgcaagattttcctatcaggtgggaagacagagataagaaatatggtaaggcctgaaaaattgcaaaagtagaagcaagtcaggtttgctgatctaagagctaagtttgatcccaaatgcactgaagaagttagaggagcttaaagaagtctcaggaagcattttttaaaatgtgaaaacatcaggctcactatagcttccaaagaacaacataaacgagcatcagcagtcatacaatgacagtatcagaaatggcactcaagtgcatccccccagtacaatgcattgcacacaacacaataagacatagtaaaaaacattaacacaaaacaggaattctacagcaaagatgcaaaactgaattctaaaatacaggaacaaatacttttctaaatgaaaagttttccatacttttcttaaaaaaaaaaaaaaaaaagtccccataagatgccccatatgggaaagtcaagaaaagaataaatagagctgaagggaagagggaaaagggagaaacaggtgggcagagtgccaatttacaggan

SEQ ID NO: 24478 - DNA, 1394 bp, Homo sapiens
  misc_feature 1393, 1394: n = A,T,C or G
gcgtccgcatttgtcagatggcaatttttaacattaagagaaagaaacaaaattaaatttgggaagcggtatacaatttactctccgaaagatggacagccttgcatggatcatgatagacaaactggagagggtgttggacctcaggaatatactttactcaaattgaaggtgcttgagccatacccatctaaattaagtggcctgaaaggtaaaaatattttcttggtggctgctactctcagacctgagaccatgtttgggcagacaaattgttgggttcgtcctgatatgaagtacattggatttgagacggtgaatggtgatatattcatctgtacccaaaaagcagccaggaatatgtcataccagggctttaccaaagacaatggcgtggtgcctgttgttaaggaattaatgggggaggaaattcttggtgcatcactttctgcacctttaacatcatacaaggtgatctatgttctcccaatgctaactattaaggaggataaaggcactggtgtggttacaagtgttccttccgactcccctgatgatattgctgccctcagagacttgaagaaaaagcaagccttacgagcaaaatatggaattagagatgacatggtcttgccatttgagccggtgccagtcattgaaatcccaggttttggaaatctttctgctgtaaccatttgtgatgagttgaaaattcagagccagaatgaccgggaaaaacttgcagaagcaaaggagaagatatatctaaaaggattttatgagggtatcatgttggtggatggatttaaaggacagaaggttcaagatgtaaagaagactattcagaaaaagatgattgacgctggagatgcacttatttacatggaaccagagaaacaagtgatgtccaggtcgtcagatgaatgtgttgtggctctgtgtgaccagtggtacttggattatggagaagagaattggaagaaacagacatctcagtgcttgaagaacctggaaacattctgtgaggagaccaggaggaattttgaagccaccttaggttggctacaagaacatgcttgctcaagaacttatggtctaggcactcacctgccttgggatgagcagtggctgattgaatcactttctgactccactatttacatggcattttacacagttgcacacctattgcaggggggtaacttgcatggacaggcagagtctccgctgggcattagaccgcaacagatgaccaaggaagtttgggattatgttttcttcaaggaggctccatttcctaagactcagattgcaaggaaaattacaccataaagccgaatgaatccggtaccggacctccgtcggaagatcgccaacattcacaacttaaacnn

SEQ ID NO: 24479 - DNA, 417 bp, Homo sapiens
  misc_feature 1, 2, 3, 4, 5, 6, 7, 8, 39: n = A,T,C or G
nnnnnnnnatgtcaaggataacataatttaggcacgtanaccatctcttatcttgtactttggtgttgcttcatactcttcaagtagatgaaagctcctggtaggaactgagcgcagcattagtgcctaataaacatgtattgtttatttatttttaatcagctgtagaacaagactgcttatgacccagttattagctgcacggattaccgacatctttcaaattataatttaataaatcttaggaactcacatttattttgcaagaatacttgtatgcttattttgccaccatgcataactgcaagaaccccacccctcaatctattttctgcctcagttcaataagagattcccctgaaaatctttccatccctgccacttgttgcccctaacaaagcaacttgaaggttttaa

SEQ ID NO: 24480 - DNA, 3819 bp, Homo sapiens
  misc_feature 3817, 3818, 3819: n = A,T,C or G
attttgctaattcccggcagtggcggcggcagcggcggctggagcctcctgattgggtttcggagtccggtactggagccaatcagcgcgggcagcgaaccgggggagcgaggcacggagtgtacctcacagccttctaggatctccagagtggacaggaatctcacttggagggaccatggagcagtatacagcaaacagcaatagttcgacagagcagattgttgtccaggcaggacagattcagcagcagcagcagggtggtgtcactgctgtgcagttgcagactgaggcccaggtggcatccgcctcaggccagcaagtccagaccctccaggtagtccaagggcagccattaatggtgcaggtcagtggaggccagctaatcacatcaactggccaacccatcatggtccaggctgtccctggtggacaaggtcaaaccatcatgcaagtacctgtttctggaacacagggtttgcagcaaatacagttggtcccacctggacagatccagatccagggtggacaggctgtgcaggtgcagggccagcagggccagacccagcagatcatcatccagcagccccagacggctgtcactgctggccagactcagacacagcagcagattgctgtccagggacagcaagtggcacagactgctgaagggcagaccatcgtctatcaaccagttaatgcagatggcaccattctccagcaagttacagtccctgtttcaggcatgatcactatcccagcagccagtttggcaggagcacagattgttcaaacaggagccaataccaacacaaccagcagtgggcaagggactgtcactgtgacactaccagtggcaggcaatgtggtcaattcaggagggatggtcatgatggttcctggggctggctctgtgcctgctatccaaagaatccctctacctggagcagagatgcttgaagaagagcctctctacgtgaatgccaaacaataccaccgtattcttaagaggaggcaagcccgagctaaactagaggcagaagggaaaattccaaaggagagaaggaaatacctgcatgagtctcggcaccgtcatgccatggcacggaagcgtggtgaaggtggacgatttttctctccaaaggaaaaggatagtccccatatgcaggatccaaaccaagccgatgaagaagcaatgacacagatcatccgagtgtcctaaccccacgccatgtgatggagctgatcaaggtcatgtttctcactgttccaggaaattgatcaactcttccaatgggacattgatgatcacattctgccctttactacaggacagaaaccacttagtttttaataagtggctcagtattacaattgcagcgatgcctggcaaattgaagttgcaagcctttgtcttactctttcagtcaggacctatttcagactgttgatgacattgacatttcatggattcggatgatgcaaggagacacatgccaccccagcagtacacaaagcacttaccttgactggtgaagtcagccagccatctcagcagggaagaacaaccttctcaaccaaaactgcaatcaggaaagcagcagcccactccttcccatggaatctagacagcatttatccctctggtgggggaatctcacactgactaactgaatggacgctttgtattcagagatggcttccaggcaaggaagttctatcttgtgatacggaaacaataaattcctgagatacattcttccaatctgtggtaataataagaattcctctctgcccagatggtaggttgatatttctggactctagccaagaaaaagctaattctggggatagaatgataaaagactcaagcactaaaaatatacattgccgaatctctttttctagctttgaaaagttgtggcctgcttgtccctctgttgactggtcatctggaccatcgtacttgctgtggctacttctaagacaatgtagagggttattaaaccttgaaactgcctttcctaagtagagaacaagactattcaacaacttctttgctgaagcactgaggagatttgtaatactcctaaaggaagggccaaactagagattttcaatcatagactttgtgacagcatttggggaactaaaagattcatgtgtttcagcctagtgggagagagtgggggagaggaagagagagagagagcatgtatacccgtatgttatcatagagcacgattctccagtggatggatacctggaatggatcattaagatgaagagagtaattcacatttactctagaacctttaacaagcactgaaaggaagaagcctgagatttgatccttgacaatttctggaaagcactggtcagtcacactgtcctggacagagtccaagttacccactaaagcttgaggtggatgttggcttcactcctgcagcacaatgctggccctagaaagcgagcattttcattcttcccatggcagctgattctttggtgccagttttcatgttttctccataggccttgtgcagaaaggttttctcattgcatccatactgtgagaataaactgcagactgaaagaaacatgcctgcagggtcaggaactgggccactgttcccagaacgggttgtgcctcagaaatctatttctcttttagatgttgaaccctgagagaactaagatgatatttcagaagagttggctgccttctctggaaacaaggaaaacccaataattccgaggaacattgggggttaaataccaagaataaaaattggttcttctttgacttcagcttaactgtattaagacagaaattaagccctctaaaaacaccacaaagagagatgattgtaatgatagaaatagaggtacagagctatgcaaaggaaacaggaagtgaaatattcctagtcccagggatctggtaatcgctcctggcttccagatgtcaaaggactgatcctttggtaagctcactagaaacttctagctctacaagagtttgggatattaatgttattcagtaagtcccaagtttttcagagaatagattactaacaatgaggaatttatattccttggttaatttaggagtctaagatgcagagttcagaaagaaattactcagacctaactttgagtgcttaagctgccaacagttagaagatgctatttatttgtgtctgtaagtttgtacatagtaatgccagccttgttgctgaattttttattggggggggaggcttgaatttgggggaaaaggtcagggttgggcgggttaaaaagtatttcaaatagctcatgacccttttcttgtggtcactttggcacaccatagtagcccacaaagtgggggcagggtattgacatttggattttttctttgatactagttcttttattcatttttatttgtgactgtagtgataactttacagatggagaaagagtgaatggatgaatgaataattggtttaatgcctagttatgcaacttgagtgcttttttttttttttgcaggataattttaagtgtatatattttaactgcactggtacattgaacatgtcagtgtcgatgccactggaccaacagagcattttgtggctatagggtgcctgataataatgtcttgatttttctttgggattcaactatatcgaaggtttttcccccagcagtatgggggcgtacaggtgatcgatcattaatgtcattgcaattgttattttttaaaataaatttataaaaataaccgaaaagtaatgtgacttttgaggaatctgcaactccnnn

SEQ ID NO: 24481 - DNA, 1700 bp, Homo sapiens; identical to SEQ ID NO: 21861
  misc_feature 1, 1603, 1604, 1605, 1606, 1607, 1608, 1609, 1610, 1611,1612, 1613, 1614, 1615, 1616, 1617, 1618, 1619, 1620, 1621,1622, 1623, 1624, 1625, 1626, 1627, 1628, 1629, 1630, 1631,1632, 1633, 1634, 1635, 1636, 1637, 1638, 1639, 1640: n = A,T,C or G
  misc_feature 1641, 1642, 1643, 1644, 1645, 1700: n = A,T,C or G

SEQ ID NO: 24482 - DNA, 512 bp, Homo sapiens; identical to SEQ ID NO: 24208

SEQ ID NO: 24483 - DNA, 404 bp, Homo sapiens
  misc_feature 403, 404: n = A,T,C or G
ggccactgtaaccaagaaagtggctaagagcccaaagaaggccaaggttgcgaagcccaagaaagctgccaaaagtgctgctaaggctgtgaagcccaaggccgctaagcccaaggttgtcaagcctaagaaggcggcgcccaagaagaaataggccaacgcctacttctaaaacccaaaaggctcttttcagagccaccactgatctcaataaaaagagctggaataatttcttttaaaaaaaaaaatacctaaaaaaaaaggcctacctcggcccgcttctaagaactaggtggattccccccgggctgcaggaatttccgatatcaaggcttattcgatacccggtccaccttcaagggggggggccccggtacccagctttttgttcccctttagtgann

SEQ ID NO: 24484 - DNA, 1872 bp, Homo sapiens
  misc_feature 1, 2, 3, 4, 5, 6, 7, 1871, 1872: n = A,T,C or G
nnnnnnnaaactagtttagcggccgccccctttttttttttttttttttttttttttttttttttttttttttttttttttttttttttttttttttttttttttttttttctttgaaaaaagatgtttattaaacaactttaattgtcataaaatgactaaaatgggttttaaaaattaaggctcttctctttctgtggattgccagaacaatgtaaaaataatatcaatcaaccctgctaaacgttttgttcctaaagttaaatttcatagattcctaaacattttatgattaagataaaaaattggactataaatgacaattcatggccatctgtgctgaacacacattgatcaggtgtacaatattctaattgagtagttaagcaaaaaatattccagttaaagcataaattttaatttcagcattttaaagtcattgtttccccacatggtcatgattttctaaattaaatgtctaatacagggcgctccttgtcatatactcccaggaggtgatgtacttaacggctaccggcttaacccgcatccactccgcaatataataatttaagccgaaggatccaatgtcgattcctgcaaccatagccaatatgctctgacctgagattacattaagtattagagtgcaatcacattcatgtacaccccaccctccccgaaaaagaaaaaagtcactacctattcaagttctagatctggtgcagcattaaggattaaaacttaccactttaccaggccttccccatgtgcaaataaatccctcctgacaagcagtgactatacagtcttcaagaaatattagtacagtcagtctctcatgtgctatctttttacatatcagcggctctaacaagggaacatcttccattcgaggacacaggggcgttcccagagttttagcagggtccgttttggttttggtaactagattcagtttgtcactgctcttgctagaaatgtgtcccatgctatgatttcgcttgtgatctttctcgtggtgcctctccttccggtcatgtagtgaaagtgttgcaaatttgctgaccccagaagcaatggccccgtccatgacactgcttttgctgccagcatttgagactgctgaatgtggaaggctgttggaccgtggcagaggaggcggcacagagttcccgggtgttgtaacactgttcccattgcttccagcaggaggactcgtggcattcatgacatttgtgtgtgtccttgctcttgagaggggttggtgagggaaaaggatatcttctgtaaggtcccataaacagagctgtgtgtcctggcccacggaaccaaaccgatacgtgacacttacggggcggctgtctgtagagttccgtttggagagcctggactgtgtactatttgctcgatctctgccaaaatgaagaaggtcttggaagtcctcatcgctgccactaaactccatagggtcaccttcttctacactagtggtataagggtcaaacgctacaacactgacccaggacttgtgcccgtggcctctggctattactcggcagtctacaaaggaccagactgtcaccaagtcgtcctcgccacctgtcacgatgtacttgccatccgggctccagcacacacacagcaagcccccaaagtagcttttcatcgtaccgtgcagctccactgagtcaaagttgaacacccgcagaaacccgtcctggctcacgctcgctaagaacttgccatctggggagaaagcaaactcgttgagggccccctcgcccaccgtccacttaaggagagggttcctcgtggatttgctcttgcaagtgtgcacggcaaagctctctccctgcttcagaagccgnn

SEQ ID NO: 24485 - DNA, 1268 bp, Homo sapiens; identical to SEQ ID NO: 21760
  misc_feature 1, 2, 3, 4, 5, 6, 7, 8, 1266, 1267, 1268: n = A,T,C or G

SEQ ID NO: 24486 - DNA, 1412 bp, Homo sapiens; identical to SEQ ID NO: 24391
  misc_feature 1317: n = A,T,C or G

SEQ ID NO: 24487 - DNA, 1669 bp, Homo sapiens
  misc_feature 1, 2, 3, 4, 5, 6, 7, 8, 9, 10, 11, 12, 13, 14, 1664, 1665,1666, 1667, 1668, 1669: n = A,T,C or G
nnnnnnnnnnnnnntttttgtgtttttatctgaaaggccactttattgatggagataaaactgaatggagttccccacagccctcccctcactcatgttagtggcttcactgggcatctgagaccagcgtggcctgtcacccacatagactaggctgcttagcccacccagcctatcacactgcccgctccacgttgggcagccacataaaaacacgtcacagctcaagaagatccgtggatgcacctctgaatcccccccaatggtttctgtgcatttttttaatattgtacaaaatatgttaactaggaaaaattagctgtactgtgacaagtgcgggacgtcctattaggattaccgtcccccaggcattacttcttattgcagtaagacctctaaaaggtggagctgtacaaaccaaaaaaaatctaaacgattttaagaagagcagcaactcaatactgctttagttcatttaaattttctttcccaaaaatacactcctaaatatacaaactatacaatcttattattttaatgctggttttttttgtttctgtttttgtgtgtgtgtgtgttttgtttttgttctgtttttaataacaacagtaggacccaaactaaaaagtcggttcatcttcaaaccaacaagagcactagaggacttgtgactcagtaccttcatataacaccacataaataactttagccacagtcaatgttcacagcctggtcagtggaacaaaggaaatacttttctggcgattagacgtcatctgcagagagagctgggatattcatccgaggccgggtgaaaaatgccatcttctccctgaaagactgaacttctgggggttccttacagctctggcctcggagcctgtgcacatccttggcagctgccctcatcatcttgtctgtctgaagctcacccttgtgctccgctcggtccatcccgcttctccagcatcctcagcagcaggcggaaacgctcgtcctcacgcaaccactgtggcagctccttctccccgtggctcttggcttgttccagctgctccttgagctccttcagcaccgagatctcctgggtcaattggctgtgccaggttcttgtcgcctgcaggtctaactccaggtccagcgaggtacggatcagacgctcggagcgcagcgacttgaccgaggaaggctgtgggggtggggacggccgcttcatccggacgctgcgtcgctccagggagtttcgaacaaaaggtggctttttggacagagtggagctgtcactatcactccgattcagccggcacacgtactggctctggggtcctggggagaaggtcttagagcggatgatggtgctccctcgaagaaatggcccctgggacggggtgcccactctccggtccttaggtcgcaccactgtgggggatggggccggggtctccgtgttggtctctttgtccacctttaatgctgggtacccatccatatcaggtgaggctttctcggtgaaaacatcctcttctccctcctcctccacctcctcctcctcttcctcggctactgcctcattctcactggtctcctcatacctccagctgtcttccagtgtctgtgtgctgctcctgccctcctgcctcttctccagctccactgctgtctgnnnnnn

SEQ ID NO: 24488 - DNA, 365 bp, Homo sapiens; identical to SEQ ID NO: 21784

SEQ ID NO: 24489 - DNA, 1120 bp, Homo sapiens; identical to SEQ ID NO: 22234
  misc_feature 1, 1119, 1120: n = A,T,C or G

SEQ ID NO: 24490 - DNA, 1390 bp, Homo sapiens
  misc_feature 1, 1385, 1386, 1387, 1388, 1389, 1390: n = A,T,C or G
nctttttttttttttttttcttacttccggcttggcaatgcagctctagcttctaatgcccttttttaaccctttaggtatctgatcgctttgccaattttgcgttactgggcaggctaagagatcttcttttaattcagcctgcttaagacgggaactgataactgtagtgtatcctctgccttttttcttatctattggaggaagctcagatggtgtcacaagaaggatctgaagtggagcttctagtatccccaggagcgcgaagtgaacacggaaggtacctgcaggatccaattgtgtccattgatctctcagagtggctgaggataatagagtttcttcttcaaggtctcaaggtctgaagcatcccacagaatgatcctactgaataactcccataagctgctggccctatacaaatccttggccaggagcatccctgagtccctgaaggtgtatggctctgtgtatcacatcaatcacgggaaccccttcaacatggaggtgctggtggattcctggcctgaatatcagatggttattatccggcctcaaaagcaggagatgactgatgacatggattcatacacaaacgtatatcgtatgttctccaaagagcctcaaaaatcagaagaagttttgaaaaattgtgagatcgtaaactggaaacagagactccaaatccaaggtcttcaagaaagtttaggtgaggggataagagtggctacattttcaaagtcagtgaaagtagagcattcgagagcactcctcttggttacggaagatattctgaagctcaatgcctccagtaaaagcaagcttggaagctgggctgagacaggccacccagatgatgaatttgaaagtgaaactcccaactttaagtatgcccagctggatgtctcttattctgggctggtaaatgacaactggaagcgagggaagacatgagaggagcctgcattacatcaagcgctgcatagaagacctgccagcagctgtatgctcggcccagagggagtccggtctcatgggtatccatggaacccttcttgtgaagtagggaatgggctacaagcatgcgaacaaataccgtcaggacaagggcaacatggcacgagtgatggtgcggataccatgacacaatcgcgtcagaaagaaagatgccagtaaacatctcctggtggacggacaatgcacgacgcccgcgcatcgggggcaggccggcacactcgacgcccgcgagtgggaccaaggacatgcgaccccaccgcggccatacgcaagacggggtaaaacccggcagcaactgactcaacacccccgaaatgcgcataaaggcaggcgacaacagacgaccccgggccgcagcacaccggccnnnnnn

SEQ ID NO: 24491 - DNA, 2760 bp, Homo sapiens
acgcgggggggtgcgccgctgaacggatggctgagggagccccgcggatcgtttaggaaagccggccagctgatcgtcgtgtgttgccacccattcatgtcaagatgactaagtttggatttttgcgattgtcctatgagaagcaggacacacttttgaagcttctcattctgtcaatggctgctgtattatccttctccactcgtctgttttgctgtcctgagatttgaaagtgttatccatgagtttgatccgtactttaattatcggactaccaggttcctggctgaggaggggttttataaattccataactggtttgatgaccgagcctggtaccctttgggacgaatcattggaggaacaatttacccaggtttaatgatcacctctgctgcaatctaccatgtactccatttttttccacatcaccatcgacattcggaatgtctgtgtgttcctggcccctctcttctcctccttcaccaccatcgtcacgtaccaccttaccaaagagctcaaggatgcaggggctgggcttcttgctgctgccatgattgctgtagttcctggatatatctcccgatctgtggctggctcctatgataatgaagggattgccatcttttgcatgctactcacctactacatgtggatcaaggcagtaaagactggttccatctgttgggcagctaagtgtgcccttgcttatttctacatggtctcgtcatggggaggttatgtgttcctgatcaacttaattcctctccacgtcctcgtgctgatgctcacaggccgtttctctcaccggatctatgtggcctactgtactgtttactgcctgggcactatactttctatgcagatctcctttgtgggtttccagcctgtcctttcatcagagcacatggcagcctttggggtctttggtctctgccagatccatgcctttgtggattacctgcgcagcaagttgaatccacaacaatttgaagttcttttccggagcgtcatctctctggtaggctttgtccttctcaccgtgggagctctcctcatgctgacaggaaaaatatctccctggacggggcgtttctactcgctgctggatccctcttatgctaagaacaacatccccatcattgcttctgtgtctgagcatcagcccacaacctggtcctcatactattttgacctgcagctcctcgtcttcatgtttccagttggcctctattactgctttagcaacctgtctgatgcccggatttttatcatcatgtatggtgtgaccagcatgtacttttcagctgtaatggtgcgtctaatgctagtgttggcacctgttatgtgcattctctctggcattggagtctcccaggtgctgtccacatacatgaagaatctggacataagtcgtccagacaagaagagcaagaagcaacaggattccacctaccctattaagaatgaagtggcaagtgggatgatactggtcatggctttctttctcatcacctacacctttcattcaacctgggtgaccagtgaggcctactcttctccgtccattgttctgtctgcccgtggtggggatggcagtaggatcatatttgatgacttccgagaagcatattattggcttcgtcataatactccagaggatgcgaaggtcatgtcctggtgggattatggctatcagattacagctatggcaaaccgaacaattttagtggacaataacacatggaataatacccatatttctcgagtagggcaggcaatggcgtccacagaggaaaaagcctatgagatcatgagggagctcgatgtcagctatgtgctggtcatttttggaggcctcactgggtattcctctgatgatatcaacaagtttctttggatggtccggattggagggagcacagatacaggcaaacatatcaaggagaatgactattatactccaactggggagttccgtgtggaccgtgaaggttctccagtgctgctcaactgcctcatgtacaagatgtgttactatcgctttggacaggtttacacagaagccaagcgtcctccaggctttgaccgtgtccgaaatgctgagattgggaataaagactttgagcttgatgtcctggaggaagcatataccacagaacattggctggtcaggatatacaaggtaaaggacctggataatcgaggcttgtcaaggacataaatgtcacgtccagctctgatatgcttcgcactgagcacatcacatttaggacgttgaagatttttttttttttttttttttaatatgcagtttgtaagaacaaaactggatggcatcagaattgtctggaagttttgtcttgggcagtatgggctgggccaaatgaaatgatttttataattctaaacaggttaccaaatgaaatgtcatggctttactttggtcaattaaaggggggacatctttcaacaagaacatcagcaaaagaacaacatcggaggcacaaaataggcgcggccggacaaacagcggagtcgacaggggcacagtgaccaaaccgtgatcacgaccaactcttcgacacaagggaaaacgggggacccccagggaggtcggaaaatccgaaaccggaccgcgtaatgatgcagaacagaccaaggaaaagaagcagcacaaacggctcaaatcgcaacacgaacaacacaaaaaacaacacaaaagaagagggagaacgcagaaggagacacaccagtgca

SEQ ID NO: 24492 - DNA, 1441 bp, Homo sapiens
  misc_feature 1439, 1440, 1441: n = A,T,C or G
tagaattatttcttcctccacctccttctggcttttcaggagatgtttcacaaagcagaagaattattttctaaaacaacaaacaatgaagtggatgacatggacacgtcagatacccagtggggctggttttacttggcagaatgtgggaagtggcacatgtttcagccggataccaacagtcagtgttcagttagcagtgaagatatcgaaaaaagcttcaaaacaaacccttgtggctccatttcttttactacttccaaattcagctacaagatagactttgcagaaatgaagcaaatgaatctcaccactggaaagcagcgcttaataaaaagagcccccttttctatcagtgctttcagttacatctgtgaaaacgaggccatccctatgccaccacactgggagaatgtgaatactcaagtaccatatcagcttattcctctgcacaatcaaacacatgaatataatgaagttgctaatctctttgggaagacgatggatcgcaaccgaattaaaagaattcagagaattcaaaacctagatttgtgggagttcttttgcaggaaaaaggctcagctcaagaaaaaaagaggtgtgcctcagattaatgaacaaatgctgtttcatggtaccagcagtgaatttgtggaagcaatctgcattcataactttgattggagaataaatggtatacatggtgctgtctttggaaaaggaacctattttgctagagatgctgcttattccagtcgtttctgcaaagatgacataaagcatgggaacacattccaaattcatggtgtcagcttgcaacagcggcatctgtttagaacatataaatctatgtttcttgctcgagtgctaattggagattacataaacggagactccaaatacatgcgacctccttccaaagacgggagctatgtgaatttatatgacagctgtgtggatgatacctggaacccaaagatctttgtggtttttgatgccaaccaaatctatcctgagtacttgatagactttcattgatttcacttccaaatctcggtggtcaaggaagctttattcttttttgcaggaaggtttgctcttcagtcatctagccactaaatgttaattatctgatacttttgaaacagatatgaaaaaaagtggcctccatataaaaagacatactgacttcaaggttggtttttgttgttttgtttttgcctgtttcttgtagtcttgtttgttaaaagttgatatcattgatgttttaacacataggggtgaaagataccattcaaaatggaatcagctgagtctcaactaatgtggtcattgagatctttaaagtttacgtgtgtgttatcaggataaatgattttagtttaaatagacttattcgtataaatgttgaaaaaaaatacagacataaatgtgtcccnnn

SEQ ID NO: 24493 - DNA, 3470 bp, Homo sapiens
acgcgggggggcccggaagtggtccctgtagaaccactgtggcaccgctactccggtgccgcgcccgtcgagcattgcgttgctgcattgcgccccaccgactccactatgttgaagaaattcgacaagaaggatgaggagtcaggtggaggctccaacccattccagcaccttgagaagagtgcggtactccaggaggcccgtgtatttaatgaaactcccatcaaccctcggaaatgtgcccacatcctcaccaagattctttatctcataaaccagggggagcacctggggaccacggaagcgaccgaggccttctttgccatgaccaagctctttcagtccaatgatcccacactccgtcggatgtgctacttgaccatcaaggagatgtcttgcattgcagaggatgtcatcattgtcaccagcagcctaacaaaagacatgactgggaaagaagacaactaccggggcccggccgtgcgagccctctgccagatcactgatagcaccatgctgcaggctattgagcgctacatgaaacaagccattgtggacaaggtgcccagtgtctccagctctgccctcgtgtcttccttgcacctgctgaagtgcagctttgacgtggtcaagcgctgggtgaatgaggctcaggaggcagcatccagtgataacatcatggtccagtaccacgcactagggctcctgtaccatgtgcgtaagaatgaccgcctagccgtcaataagatgatcagcaaggtcacacggcatggccttaagtctccctttgcctactgcatgatgatccgggtggccagcaagcagctggaagaggaggatggcagccgtgacagcccactgtttgacttcatcgagagctgcttgcgcaacaagcacgagatggtggtgtatgaagccgcctcggccatcgtcaatctgccaggctgcagtgccaaagagctggccccggctgtgtcagtgctccagcttttctgcagctcacccaaggctgctctccgctatgctgctgttcgtaccctcaataaggttgccatgaagcatccgtcagctgtgacagcttgtaatctggatctggagaacctggtcacagattcaaaccgcagcattgccacgctggccatcaccaccctccttaagacgggcagcgagagcagcatcgaccgcctcatgaagcagatctcctccttcatgtcagaaatctcggatgaattcaaggtggtggttgtccaggccatcagtgccctgtgtcagaaatatcctcgcaaacacgccgtccttatgaacttcctgttcaccatgctgcgggaagagggtggctttgagtataagcgcgctatcgtggactgcatcatcagcatcattgaagagaactcagagagcaaggagacagggctgtcacatctgtgcgagttcatcgaggactgcgagttcacagtgctggccacccgtattctacatctcctgggccaggaggggcccaagaccaccaatccctcaaagtacatccgcttcatctataaccgagtggtcttggagcatgaggaggtccgggcaggtgctgtgagtgctctggcgaagtttggagcccagaatgaagagatgttacccagtatcttggtgttgctgaagaggtgtgtgatggatgatgacaatgaagtaagggaccgagccaccttctacctaaatgtcctggagcagaagcagaaggcccttaatgcaggctatatcctaaatggtctgactgtgtccatccctggtctggagagggctctgcagcagtacactctagaaccatcagaaaaaccttttgacctcaagtctgtgcccctggccacggcgcccatggcagagcagagaacagaaagtacccccatcacagcagtcaaacagcctgagaaagtggcagctaccaggcaggagatcttccaggagcagttggcagcagtgccagagttccgcggtcttgggcccctcttcaagtcctcgcctgagcccgtggccctcaccgagtcagagacggagtatgtcatccgctgcaccaaacacaccttcaccaaccacatggtttttcagtttgactgcacaaacacactcaatgaccagaccttggagaatgtcacagtgcagatggagcccactgaggcctatgaggtgctctgttacgtgcctgcccggagcctgccctacaaccagcccgggacctgctacacactggtggcactgcccaaagaagaccccacagctgtggcctgcacattcagctgcatgatgaagttcactgtcaaggactgtgatcccaccactggggagactgatgacgaaggctatgaggatgagtatgtgctggaagatctggaagttactgtagctgatcacattcaaaaggtcatgaaactgaacttcgaagcagcctgggatgaggtaggggatgaatttgagaaggaggaaacgttcaccttgtctaccatcaagacacttgaagaggctgtgggtaatattgtgaagttcttgggaatgcacccttgtgagaggtcagacaaagtgccggataacaagaacacccacacgttgctcctggctggtgtgttccggggtggtcatgacatcctggtgcgctcccggctgctgcttttggacacagtgacaatgcaggtgacagccagaagtttggaggagctgccagtagacatcatcttggcatctgtgggataagaggccagcctgcataggacctcatacccttccccaacactacctggaagttgtgccttcctcatgaaactggcagaaaccccttcccaagcttctgtattgaaaaacaattaggaatcattgcagatttttttttattctgctcccacctcccacccgggactacttgctggtgactttttttttttttttttttaaataggggatgattttagcttgtcctaaatcttgctgtccacccttccaggaaagggacattgtaaatgaataaaacattctcaactcctcttgaatctatcccccaagaaaccatcttatccctgtaataaatcagcatgtatttattgaaaaaaaaaaaaaaaaaaaaaaaaaaaaaaaaaaaaaaaaaaaaaaaaaaaaaaaaaaaaaaaaaaaaaaaaaaaaaaaaaacaaaaaaaaaaaaaaaaattaaaaaaaaaaaaatggggggcccccccggggggggcccccaattgccctttaaaggggtggtaaaagccccccccctggggcgttttttaaaaaggggggggggggaaaaaccccgggggcccccaaattaaatggggaggagccccaccccctttccccttggggggaataaccaaaagggcccggcaaatggccccttcaaaaattgggccccccccaaagggggaggggaattttggccccctttttttttttaaaaacccgggcgaaaatttgggcaaaacccc

SEQ ID NO: 24494 - DNA, 318 bp, Homo sapiens
actccacctagtatagacattaggctgggttgaagatgttgttgttgtagctggggtctaggaactaagaatggcagaggaacagttaaatcaactttgtcagggtgtttctggaatatagggtcacctagatcagttaaaggcccgattggcttggggggggctccgtgagaccaagattttcttttggatggtgaacatagtcccaacatcaaatcctgggatataaagtcttaatccccatgacatgccataataccattgagctgcattagcgtcatggacagttatagtaagaggattacaattttttctagt

SEQ ID NO: 24495 - DNA, 1120 bp, Homo sapiens; identical to SEQ ID NO: 22234
  misc_feature 1, 1119, 1120: n = A,T,C or G

SEQ ID NO: 24496 - DNA, 1901 bp, Homo sapiens
  misc_feature 1, 2, 1893, 1894, 1895, 1896, 1897, 1898, 1899, 1900, 1901: n = A,T,C or G
nnacccacgcgtccgcggacgcgtgggtttttttttttttttagtcaaagctcgaatcgattatatacagaggacgtactagttcatgacaatacagatattgaaaggaagttcccatgctgttcatgaactgaaaagtttaaaacaagaaaaagcaccagtttcaaaaacttacacggtaccacttaatgggcaagtttatgaacttttaactgtcttcatggactggatttcggatcatcatcttagcaaagtgaaacatgaagaatctggaatggatggtaaaaaaccacaactcaaatttgcttcccagagaaatgatattcaggagaagtgtgtaaagcttttgcctctaatgacagagcagctacagtggatgccatttgtgaatatcaaacttcacgagccttttgtaaaatttatatattggtccctaaggcagctagatgctggagcacagcactcgactatgacatcaacattgaggagattgggtgaagacatttttaaaggagtggtaactaaaggaattcaggataattctccacagcattctgtggagaataaaccaaagacagctgctttctttaagagctccaatttgccattgagatttttatcaaccttaattgttctcaaaacagtcactcaagctgattacctggctcaggcatttgattctctttgtttggacttgaagacagaagaaggaaaaaccttgtttttggagtatcaggctgttccagtaatattaagtcatctaagaatatccagtaaaggactcctgtctaatgttattgatagtttgctccagatgacggtggaatctaaatccttgcagcctttcctggaagcctgtagcaactctttattttttcgtacttgctctgtgctgcttcgagcccctaagcttgatcttcaaatactagaaaaactcagtattattttacagaaactttccaaaatcaagagtaataagaagctctttgaactttttacgattcatctgatgcttcaagaaatacaaaggacaacaaacccagagcatgcatttctctgtattaatctaaattcaactctgttcaatctgggtttaacaaaatgtaactccctggtctccagtgcaagcccttagactggctaattttttaatatagtatatgtggtgcttatttataaacatgtagaaattaccaaagtaactacaattctaccaagtaaagttatcagtagcatcatttatcatgaaaaataaataatttttttgaactgtaaaaatgaaatctgtagaaggtattggaacttttggaatgtttcagttcaggtaaggtagtactaatatacaagatggcgtttctagaatgtatgacactgaagtgactttttgtaaaaatatattaggaaaattatttcttaaaattatgtgattatttggaataaaattggtgcttatgtgagaacagggttaaataatactgtctttctattttcctaatatattagaatccttgcttttgaaagcaaaaatgtatatctttaaactatcatcttgataccataacttttctatatactgtattctagattaacagatgttgatttttattgggtgctcttggtgggacttggcacacacaggttcttattatgcctgttcacagggtttacaaactttggttttcacaataattattactggaggctgtatttccaggcaagacattctttaacattggaaggctaacaaaaatatcgtccgtaccgagaatctctgtggaagccaagattagttaggtgccaggtctggggagacacggggcacctggactctgacagagactgcgaacaagggaagaggcaaaatattggggagacacagggggaaaataaaannnnnnnnn

SEQ ID NO: 24497 - DNA, 1643 bp, Homo sapiens; identical to SEQ ID NO: 21150
  misc_feature 1, 2, 3, 4, 1615, 1616, 1617, 1618, 1619, 1620, 1621, 1622,1623, 1624, 1625, 1626, 1627, 1628, 1629, 1630, 1631, 1632,1633, 1634, 1635, 1636, 1637, 1638, 1639, 1640, 1641, 1642,1643: n = A,T,C or G

SEQ ID NO: 24498 - DNA, 1120 bp, Homo sapiens; identical to SEQ ID NO: 22234
  misc_feature 1, 1119, 1120: n = A,T,C or G

SEQ ID NO: 24499 - DNA, 1716 bp, Homo sapiens; identical to SEQ ID NO: 21700
  misc_feature 1694, 1695, 1696, 1697, 1698, 1699, 1700, 1701, 1702, 1703,1704, 1705, 1706, 1707, 1708, 1709, 1710, 1711, 1712, 1713,1714, 1715, 1716: n = A,T,C or G

SEQ ID NO: 24500 - DNA, 427 bp, Homo sapiens
  misc_feature 425, 426, 427: n = A,T,C or G
aagcttgaaagaagatttttttttcccccactaatgctgtaaggccagtgagggcaatcaaggggtcaagggggctcaggccttagtagttcccgcgtacgttgcaatctgtggatcagctacgagactgagagaaaggaatgaaaggatggaagaattacaagatcaggcactgctgtctgtctgttccacggatgtaaccacagcacacgcgtggctcacgatggatatctgagagccagcgaactttctttacctcctagtatcatttcatgaaaattagtagcacctgcacaatggggccttggagacaggaataaaaggaaaaatctggaatggaatcacatgacgcaacaggctatgaagactccctgcccggctgctatatgtctggtaaacagaataaatagtacttgagcatcccnnn

SEQ ID NO: 24501 - DNA, 4358 bp, Homo sapiens
  misc_feature 1, 2, 3, 4, 5, 6, 4357, 4358: n = A,T,C or G
nnnnnnctggaacccggccggagtagctctgagcgccggctgtgaggaaggaggttctgggcaagctatagccatggctgtggctgtagccatggcgggagccttaatcgggtcggagccaggccccgcggaagaacttgccaaactcgagtacctgtctttggtgtcaaaggtttgcactgagctggacaatcacttggggatcaacgacaaggaccttgctgaatttgtgatcagtcttgctgagaaaaataccacctttgatacttttaaggcttctctcgtcaaaaatggtgcagaatttacggattctcttattagtaacttgctgcgtctcatacaaaccatgcggcctccagcgaagccttccactagcaaagatccagttgttaaacctaaaacagaaaaagaaaagctgaaggaactcttcccagtcctttgccaaccggacaacccttctgttcggaccatgttggatgaagatgatgtgaaagttgctgtggatgtcctgaaagaactggaagctttaatgcccagcgcagcaggccaggagaagcaaagagatgctgaacaccgggacaggacaaagaagaagaagcggagtcgaagccgagatcgaaaccgagatcgagacagagatagggaacgaaaccgagatagagaccacaagcggagacaccgatcccgctctcgatcacgttccaggacccgggagaggaataaagtgaagtctagatatcggtccaggagcaggagtcagagtccccccaaagaccggaaggaccgggacaaatatggagagcggaatctggatagatggcgggataagcatgtggaccgccctcctccagaagagcccaccattggtgacatttataatggcaaagttaccagcatcatgcagtttggttgctttgtgcagctggaaggactaaggaagcggtgggaaggcctggtgcacatctctgagctccggcgggagggtcgtgtggccaatgtagctgatgtcgtgagcaaaggccagagggtcaaagtcaaagtgctgtccttcactgggaccaagaccagcctgagcatgaaggatgtggatcaagagactggagaagatctaaacccaaatagacggcgaaatcttgtcggggagaccaatgaggagacctcaatgcggaatcctgatagacccactcacttgtcccttgtcagtgctcctgaagtagaggacgactcactggaacgcaagcgcctcacccgaatctctgacccagagaagtgggagatcaaacagatgattgctgccaatgtcctttccaaagaagaatttccagactttgatgaagagactggcattctccctaaggtggatgatgaagaagatgaggaccttgagattgaattggttgaggaagagcctccattcctgagagggcacactaagcaaagcatggacatgagccccattaaaattgtcaagaacccagacggctccctctcccaagcagcaatgatgcagagtgccttggccaaagaaaggcgggaactcaaacaggcccagcgggaagctgagatggattctattcccatgggactcaacaaacactgggttgaccctctgcctgatgcggaaggcagacagattgctgccaacatgaggggtattgggatgatgcccaatgatattcctgagtggaagaagcatgcctttgggggcaacaaagcctcttacggaaaaaagacccagatgtcaatccttgagcagagggagagcctgcccatctacaaactgaaggagcaattggtccaggccgtccatgacaatcagatcctgattgtcattggtgagacaggatctggaaagacaacacagatcacccagtacctggcggaggcaggctacacttccaggggcaagattgggtgtacccagcccagaagagtggcagctatgtcggtggccaaaagagtgtcagaggagtttggttgttgcttaggccaagaggtgggctacaccattcgatttgaggactgcactagccctgaaacagtcatcaagtacatgacagatgggatgttgcttagagagtgcttgattgaccctgacctcactcagtacgcgatcatcatgttggacgaggcacatgagaggacaattcacactgatgtgctctttggattgttgaaaaagacagttcagaaacggcaggacatgaagctgattgtcacctcagccaccttggatgcagtgaagttttctcaatacttctatgaagctcccattttcaccatcccaggtcgaacatatccagtggaaatactgtacacaaaggaacctgagacagattatctggatgccagcctgattactgttatgcagattcatttaacagaaccaccaggtgatatcctggtcttcctgactggtcaggaagaaattgatactgcttgtgagatcctgtatgaaagaatgaaatccctgggacctgatgttccagagttaattatcctcccagtgtactctgctcttcccagtgagatgcagacccgaatctttgacccagctccaccaggcagcagaaaggttgtgattgccaccaatatcgcagagacatcgctgactattgatggtatctactatgtggtggacccaggattcgtgaaacagaaagtttacaattccaagacagggattgaccagctcgtggtgacgcctatttctcaggctcaggcaaagcaacgagctggcagagctgggagaacaggcccagggaagtgttacaggttgtacacagaacgtgcctaccgagatgaaatgctgaccaccaacgtgccggaaatccagagaaccaacttagcaagcacagtgctgtcactcaaggccatgggtatcaatgatctgctgtcctttgatttcatggatgccccacctatggaaactttgatcacagccatggagcagctgtacacactgggggccctggatgacgagggcctgctcactcgcttgggccgccggatggcagagttccctctggagccaatgctatgcaaaatgctcatcatgtctgtgcatctgggctgcagtgaggaaatgctgaccattgtatccatgctgtctgtgcagaacgtcttctataggcccaaggataaacaagcccttgcagatcagaagaaggccaaattccaccagactgaaggggaccacctcaccctgctagctgtgtacaactcctggaagaacaacaagttctccaacccatggtgctatgagaactttatccaggctcgttccctgcgccgggcccaggacattcgcaagcagatgttaggcataatggacagacacaagctggatgttgtttcctgtggcaagtccacagtccgagtgcagaaggccatctgcagtgggttcttccgtaatgctgccaagaaagacccgcaggagggttaccggacactgatcgaccagcaggtggtctatatccatccttccagtgccctcttcaacagacagccagaatgggtggtgtaccatgagctggtgctcaccaccaaggaatacatgcgtgaagttaccaccatcgaccctcggtggcttgtggagtttgccccagccttcttcaaggtctcagacccaactaagctaagcaaacagaagaagcaacagcgtcttgaacccttgtacaaccgctatgaggaacccaatgcctggagaatatctcgagctttccgacggcgctgaaaggcaagattgttcctttgcctctccagcagcagtagccagggcttggacttatcgatgacaggctggtcctgaggatacagctgtcccgtgactgactgtcttaactgagcattttctcaactcgactctcatttcttccctgctggtaaaatagaaacagggatttaaacctggctttggcaagagcctgcagcctccatcaccccaagtccttgggcccagttgggagctcatatctaacacagagacacattgcatcaacttcaagaaagggacaatttgtgcagctccaggatgggaaggtggagtgggtgagcatcttgtgcagggacatggtgagtgccctgatgccccagctagcaggagctactgtgctcatctaaagtgtttgccccacttcccaccccgtctccagcccctgtactttggcttgacctcgtggaaatatttattttcttaaggaaacaaaaatggttttctgtgactgttttcttttagccgaaaggttaggatattggcctgggctcagggtgagggagatttagtatctgtgctctggcacacatgatgagaatcccctgaatcccctgaaaccagaacgcaaggcctctttgcgcnn

SEQ ID NO: 24502 - DNA, 2224 bp, Homo sapiens; identical to SEQ ID NO: 21832
  misc_feature 1, 2, 3, 4, 5, 6, 2220, 2221, 2222, 2223, 2224: n = A,T,C or G

SEQ ID NO: 24503 - DNA, 318 bp, Homo sapiens; identical to SEQ ID NO: 24494

SEQ ID NO: 24504 - DNA, 170 bp, Homo sapiens
acagaaatgacacagataaaaatactcatgagcgcaatgtctggagataagcatttcaaagtctgtgccctttttttgtctaccccagtctgcctcttgtgaaccccttcacaggactgaaagcaaaaagcacccgagacaaaacagtcagcatggatttccaggtgggt

SEQ ID NO: 24505 - DNA, 1545 bp, Homo sapiens; identical to SEQ ID NO: 23819
  misc_feature 1, 2, 3, 4, 5, 6, 7, 8, 9, 1541, 1542, 1543, 1544, 1545: n = A,T,C or G

SEQ ID NO: 24506 - DNA, 4841 bp, Homo sapiens
  misc_feature 1, 2, 4840, 4841: n = A,T,C or G
nncgacccacgcgtccgcagcaacaggaagcccagctgtaaattcctctctttgtactctttctctttatttctcagaccagccgacacttagggaaaatagaacctacgctgaaattttgggggcaggttctcttgctaggttttgaggttttgctgaagatattcctgaagaatcatcccaggtgccacactaaaaaaatgatccagttgacagctacccctgtgagtgcacttgttgatgagccagtgcatatccgagctacaggcctgattccctttcagatggtgagttttcaggcatcactggaagatgaaaacggagacatgttttattctcaagcccactatagggccaatgaattcggtgaggtggacctgaatcatgcttcttcacttggaggggattatatgggagtccaccccatgggtctcttctggtctctgaaacctgaaaagctattaacaagactgttgaaaagagatgtgatgaataggcctttccaggtccaagtaaaactttatgacttagagttaatagtgaacaataaagttgccagtgctccaaaggccagcctgactttggagaggtggtatgtggcacctggtgtcacacgaattaaggttcgagaaggccgccttcgaggagctctctttctccctccaggagagggtctcttcccaggggtaattgatttgtttggtggtttgggtgggctgcttgaatttcgggccagcctcctagccagtcgtggcttcgcctccttggccttggcttaccataactatgaagacctgccccgcaaaccagaagtaacagatttggaatattttgaggaggctgccaactttctcctgagacatccaaaggtctttggctcaggcgttggggtagtctctgtatgtcaaggagtacagattggactatctatggctatttacctaaagcaagtcacagccacggtacttattaatgggaccaactttccttttggcattccacaggtatatcatggtcagatccatcagccccttccccattctgcacaattaatatccaccaatgccttggggttactagagctctatcgcacttttgagacaactcaagttggggccagtcaatatttgtttcctattgaagaggcccaggggcaattcctcttcattgtaggagaaggtgataagactatcaacagcaaagcacacgctgaacaagccataggacagctgaagagacatgggaagaacaactggaccctgctatcttaccctggggcaggccacctgatagaacctccctattctcctctgtgctgtgcctcaacgacccacgatttgaggttacactggggaggagaggtgatcccacacgcagctgcacaggaacatgcttggaaggagatccagagatttctcaggaagcacctcattccagatgtgaccagtcaactctaagaagactagatattcctagaaaataaagaagcaaatctctttaccgggaccttctctcaattttcatggcggaatgtctcccccagctgccacacacacattttgtattaattttaatgattaaaaagagcatagggtaaaaacctgatatttcacttatactgcataacaagctaaccaaactggacatggtgaataaatcataaaacaaatcattttacttattatttacatgacttttctttccatcaggtcttctaaataggactgaggtatagtacactggcaaaaataagaaaaggcaaacaagaatagcaccaaagtaacagatataaaaccaaataccatgtcagaaaacactatatagtaagaatttatcagattagagcagcaggagaaaattaatactaaattataatcattttagtgatatttttcaacttcaccacagtaactttgcaacatcatttttcatttgtggggtagtaaaattcatgtcaaaaaggaaagaaggaatggaggaggtcagttagttcattgcaataaattacctcttcagttcttaaaaacatgcccattggcacataactgagacataataactaagactggaagagccttggtttaagttatgaagcaaattaaaatggaaaatacaagaaaatagaaccaattaggttgaaaatgccccttactgaaaatctgtattaaaaataaaattaataaaagtaaaaaataaaaatagaaacacaactctactagtacaggctagcctggggagtttgataaactgagtgattgggtcaactatcactgtacttccataatgaatttcttcagtcatgttagagtagcacatgaatgtgagctctataaggacaggtactatatttccgtaagacccaatagttactgtacatcccataaataaaaaatactttagtttgataaccaactgaatatatgaggactgcatgtaattcaaccacatggttgtttgctgtacagtcctttgcaaatattaaaaaattttttttgctataaggctttgatcatatagtcctcatagcaacataactaccatctagcatgtaccacattttgcaagactttaagttcaacattccaaactgccaatttgtattatgtccaaatgcagtatccttgaggaatatagtgggtcagttaaatatctagagacatacaaacatctgctaattcatctcattgagatggatcattctgatctccatcatccacccacttttcatcagcttctcctacttcatttctcctcatagtctttatcatgagggattctgtatcctgtctctcatctacacttgctggccttcctggctgtgatttattggaacagtctacacaaacaccataacgtcgagatccatgtcttattccaacactggctgctaacatgaagatcttacacaccatacatttgtattttttatcctttttatgcaccagggaatgtctttttacatgttctcttcgagtaaacagttttccacaaatatcacagctaaatgatctcactcctgtgtgaatgagcaagtgcctttttagtgttcgtctgtatttggctacatagctacaatgagggcattttaacttgttcatgattagagatgattcaccattttcccaggtttcttgttttggccaagattctggcaataatccatacttgaaatcatttgaagcacctggtatcaatccatacttgaaatcatttgaagtacctggtatcaatccatacttgaaatcatttgaaggaccaggcatcaaaccatacttgaaatcatgtgaagtaccagcatcacctccatcttgactagtgccagcttcagccaataaatttgcattcacattcctatcaccatctggccccgagagtagagcaccatctaaatctggttcttccttgatgagtagtgtattttcttctggataggcaacaggtggctgcattactgagcaatcttctaaattcgtttcattattaggtggaatattataaataaatctttttgtagtttggtttttcctccttgttttgccagtctcttgaattccctgggagcccatattattccaaataaacacttttgtttgaccttcagattcattttcagccatttcaggagatccatcctggacccaactactgtcattcatttggtagttttctatttggccctcgtcgacattacaaccatcattttcaatctttacattacttgccaaattggtaagattccgtgttgcccaaaaactggcaattttttgatcccgtgatgaagacagaccatctctattaactggttttctattattatagtccacaactacagactctggagcttctgatttaatgcttatatttaaggcatctttaatgaaatttcggcaagtttgaacaacttcactcatttgaagatagctggccacggtcataacttcaatggcattttggcttgtgagcaccaggttaccagaatacaagaagtccaagatgactgaaaaaccttgaactgcagcaatatctaagtgggtagtattgttttggttagggctttctttgtttgaaaagcaatataaagtcttaaagaaacggctgcctgcaaccaggatgttcttatgagctttgaagatttttccgcttaccacaatgctgacatcacaaagaatacctttctttctctgttcatttagttgtcgcagaagttgatagcaataagagttctcatttggcctactattaaagtcacagtacccctcctctgatggtatttctgactcctggggcgttggcttcgtggagtttgtgctcggtagagacgtggtgcctcaggaggagggttttcttgtagttgcgggtccctcgcgaaagctcatcatgccccactgggggaaggtccacgcttcccccatctgcaggggtcttttggcaccagccgcaagacataagaccagtatccttggaatagcgcagccagggaaagtccttgagccaggaggtctggaaggagcattggagcttctgcattagagacttgggccgcgcgagcgggaagtgctggacagtctctccttcgccagctcccacaccgctgccctccacttcgtccccgccatcgccgcccgaccgcctgctgctgctgcagctgccgccttccgccccgctgccgtcgcccaggctcgccccctcctcctcgtcctcggtgctgtcgctcagggacgcgccgtcctgcatcaactccttcccctccagcgcgtccagctccagatccacagtcgccggccctcgcccattgaaatgcctcaagggccacaccgaggtctcggggcggccgcaagcnn

SEQ ID NO: 24507 - DNA, 1233 bp, Homo sapiens; identical to SEQ ID NO: 24207
  misc_feature 1, 2, 3, 4, 5, 6, 7: n = A,T,C or G

SEQ ID NO: 24508 - DNA, 429 bp, Homo sapiens
  misc_feature 429: n = A,T,C or G
actgcagccacaggctggctcttcccaaggggcctcttctgggctctctgtagttaaagttctgagtgccagtgaagtggcagctttgtcatcaccagcaagctctgctcctcattcggggggaaagacaggaatggaggaaaaccgcagattggaacaccagaagaagcaagagaaagcaaatcggattgtagcagaggccattgcgagagcccgtgcccgcggtgagcagaacatacctcgagtcttaaatgaggacgagttgcccagcgttcggccagaggaggaaggcgagaagaaacgcaggaagaagagtgctggggagaggctgaaagaggagaagccaaagaagagtaaaacatctggtgcctccaaaacaaagggcaagagcaagctcaacaccatcactcctgtagtgggtaagaagan

SEQ ID NO: 24509 - DNA, 1076 bp, Homo sapiens
  misc_feature 1, 2, 947, 948, 949, 950, 951, 952, 953, 954, 955, 956, 957,958, 959, 960, 961, 962, 963, 964, 965, 966, 967, 968, 969,970, 971, 972, 973, 974, 975, 976, 977, 978: n = A,T,C or G
nncaagaaagtacagttcagcatatgatcactttatattccaattaatttatggggccgagacttgttacaacaatggcatgcagcgattactatcccagcccccaatacagccccacgagtcaaaaaatcataactaaaatgggatatctccctgaaaagggactaggaaagaatgaagatggcattaaagtcccaactgaggctgaaaaaaatcaaaaaaagaaaaggaatagggcatcctttttagaagcggtcactgtagagcctccaaaacccattccattaatttggggggaaaaaaaaaactgtatggtaaatcagtagccgcttccaaaacaaaaactggaggctttacacttattagcaaagaaacagttagaaaaaggacatattgagccttcattttcgccttggaattctcctgtttgtaattcagaaaaaatccggcagatggcgtatgctaactgacttaagagccattaatgccataattcaacccatgggggctctcccatcccggttgccctctccagccatggtcccctttaattataattgatctgaaggattgcttttttaccattcctctggcaaaagaggattttgaaaaatttgcttttactataccagcctaaataataaagaaccagccaccaggtttcagtggaaagtattgcctcagggaatgcttaataattcaactatttgtcagactttcatagctcaagctctgcaaccagttagagacaagttttcagactgttatatcgttcactatgttgatattttgtgtgctgcagaaacgagagacaaattaattggccgttacacatttctgcagacagaggttgccaacgcgggactgacaataacatctgataagattcaaacctctactcctttccgttacttgggaatgcaggtagaggaaaggaaaattaaacnnnnnnnnnnnnnnnnnnnnnnnnnnnnnnnntcacatcgtcgttcacatgggaagagtcaccgaaggaaaagaaccaggagtgtagaggatgatgaggagggtcacctgatctgtcagagtggagacgt

SEQ ID NO: 24510 - DNA, 1120 bp, Homo sapiens; identical to SEQ ID NO: 22234
  misc_feature 1, 1119, 1120: n = A,T,C or G

SEQ ID NO: 24511 - DNA, 1380 bp, Homo sapiens; identical to SEQ ID NO: 20118
  misc_feature 1380: n = A,T,C or G

SEQ ID NO: 24512 - DNA, 2757 bp, Homo sapiens
  misc_feature 1, 2, 2528, 2529, 2530, 2531, 2532, 2533, 2534, 2535, 2536,2537, 2538, 2539, 2540, 2541, 2542, 2543, 2544, 2545, 2546,2547, 2548, 2549, 2550, 2551, 2552, 2553, 2554, 2555, 2556,2557, 2558, 2559, 2560, 2561, 2562, 2563, 2564, 2565: n = A,T,C or G
  misc_feature 2566, 2567, 2568, 2569, 2570, 2571, 2572, 2573, 2574, 2575,2576, 2577, 2578, 2579, 2580, 2581, 2582, 2583, 2584, 2585,2586, 2587, 2588, 2589, 2590, 2591, 2592, 2593, 2594, 2595,2596, 2597, 2598, 2599, 2600, 2744, 2745, 2746, 2747: n = A,T,C or G
  misc_feature 2748, 2749, 2750, 2751, 2752, 2753, 2754, 2755, 2756, 2757: n = A,T,C or G
nnccacacgacactgaggcgagcgagtgggtgtgtgcgtggggggtcagccaaacttcctgtcccgcgctcgagctgcttccggcgggagccggaagacgctgtgtgtggacggaattcgggaccgactgacggccggccggcttcccggaactggaaggttacattgattacccacctagtacaacatcttacgggaagagcatagtatttcctagaggaatatgaacataacaggaaggtatcattggctctgaattaaatttgaacttgtcccctgaatagctacaggttttggaagctgaatcaatgttatcagatgagttagaatccaaaccagagctcctggtacagtttgttcagaatacgtccatcccattgggacaggggcttgtagaatcagaagctaaagatattacttgcttgtccctccttcccgtgactgaagcctcagaatgcagtcggctaatgttaccagatgatactacaaatcattctaactcctccaaggaggtcccttcctcagctgttttgagaagccttcgggtgaatgtgggtccagacggagaggagacgagagctcagactgtacagaaatccccggagtttttgtccacttcagagtcttctagcttgttgcaagatctacagccaagtgatagcacttcttttattcttcttaacctaacaagagcaggtctgggctcttcagctgagcacttagtgtttgtacaggatgaggcagaagattcagggaatgatttcctctccagtgagagcacagacagtagcattccatggttcctccgggttcaggagttggcccatgacagtttgattgctgctactcgtgcacaactggcaaagaatgcaaaaaccagcagcaatggagaaaatgtccaccttggttctggtgatgggcagtcaaaagattctgggccccttcctcaagtggaaaagaagctcaagtgtacagttgaaggttgtgaccggacatttgtatggccagctcactttaaataccacctcaagactcatcgaaatgaccgctccttcatctgtcctgcagaaggttgtgggaaaagcttctatgtgctgcagaggctgaaggtgcacatgaggacccacaatggagagaagccctttatgtgccatgagtctggctgtggtaagcagtttactacagctggaaacctgaagaaccaccggcgcatccacacaggagagaaacctttcctttgtgaagcccaaggatgtggccgttcctttgctgagtattctagcctccgaaaacatctggtggttcactcaggagagaagcctcatcagtgccaagtctgtgggaagaccttctctcagagtggaagcaggaatgtgcatatgagaaagcatcacctgcagctgggagcagctgggagtcaagagcaggagcaaactgctgagccactaatgggcagtagtttgcttgaagaggcttcagtacccagtaaaaacctggtgtctatgaattcccagcccagccttggtggagagtccttgaacctaccaaataccaattctatcctgggagttgatgatgaggtgcttgctgaaggatccccacgttccctgtcttcagtgcctgatgtgacacatcacctggtgaccatgcagtcagggaggcaatcatatgaagtttctgtcttaactgcagtaaatccacaagagttactaaaccaaggagatttaactgaaagacggacatgagcgtgggtgctgactcctggaagagcaactctatctgatctcaaaatgcgtatactgggaacaggatgccttagcccacaacagaaccagaatgaatctttgaaggcacaagactctgcttttgccactcttcctctttcctggtatagaagatggatgtaggagagcttcttttctaactaccatctgatcagacaaggaatgaagcaatgactgtgggctgggaaactgtacctacctctcttcccactgcaaatttctgggatagaccaaaagtgaatttgattatgtgttggctgaagttcttcattctgactgttgaggggaggttttcctttgaagagttttcatcccagactcagctgtcttttcacatggatgaaataattcctgctaccaacaacagagcttcaccaggaagttgagttttcaagatgccttgttgctttgaagaagggagtgatgtcaattctcttgttacattctccctttagcaacctgagtaagagactctctgccactgggctgcaaaaaaataaattacttgaatctccccttggcccaggctgaggtactatcttgtcctatacacttctacttggtcactttgctttcttcgttaatggaacatacagtagcatgttaagagggatttcatgtttttgtttttttaaagttaaaaattacatgatgcagagattcaggttttcctttaaataaacaaaacagcccagtcaaaaaaaaaaaaaaaaaacccgagggggggcccgggtacccaattcnnnnnnnnnnnnnnnnnnnnnnnnnnnnnnnnnnnnnnnnnnnnnnnnnnnnnnnnnnnnnnnnnnnnnnnnnttccccccccccccgggggggagggggggggaaggccccccccccaaaacccagttttttggggaaaggccacaaaacccgtggtttttttttttgggaaaaaaaaaaaaaatttgtaaaaaaaatccccccctataagaaaannnnnnnnnnnnnn

SEQ ID NO: 24513 - DNA, 1321 bp, Homo sapiens
  misc_feature 339, 340, 341, 342, 343, 344, 345, 461, 462, 463, 464, 465,466, 467, 468, 469, 470, 471, 472, 473, 474, 475, 476, 477,478, 479, 480, 481, 482, 483, 484, 485, 486, 487, 488, 489,490, 491, 492, 493, 494, 495, 496, 1217, 1218, 1219: n = A,T,C or G
  misc_feature 1220, 1221, 1222, 1223, 1224, 1225, 1226, 1227, 1228, 1229,1230, 1231, 1232, 1233, 1234, 1235, 1236, 1237, 1238, 1239,1240, 1241, 1242, 1243, 1244, 1245, 1246, 1247, 1248, 1249,1250, 1251, 1252, 1253, 1254, 1255, 1256, 1257, 1258: n = A,T,C or G
  misc_feature 1259, 1260, 1261, 1262, 1263, 1264, 1265, 1321: n = A,T,C or G
ccttctgaaaacatagagctattgagtacaaaaatatggccatttcctctaaattttctttcccctgttttttttttaaggtctgaatttcctgctgctgttcacaaagatgctttttatctttaactttttgttttccccacttccgaccccggcgttgatctgcatcctgacatttggagctgccatcttcttgtggctgatcaccagacctcaacctgtcttacctcttcttgacctgaacaatcagtctgtgggaattgagggaggagcacggaagggggtttcccagaagaacaatgacctaacaagttgctgcctttcagatgccaagactannnnnnnacaggtaaaattgaatataaaaaaaatgctacacatgtgtagggcagtttcattataatttgtccatctttgactgaaacattattattcagcgtatgactatatatacaagaaannnnnnnnnnnnnnnnnnnnnnnnnnnnnnnnnnnnggttttttttttttttgagatggagtttcactcttgttgcccaagctggagtgcaatggcgcgatctcggctcactgcaacctctgcctcccaggttcaagcgattctcttgcctcagcctccaagtagctgggattacaggcacgcactaccatgcccggctaattttttgtatctttagtagagatggggtttcgccatgttggccaggctggtctcgaactcctgagctcgtgatcaccccacctcggcctcccaaagtgctgggattacaggcatgagccaacacgcctggcccatatacacatctttatatatccagggcttagtgctacgtctatcatagtgtggctattacattttatagagagaatagctaagtatgaagaaactcttacaagaggttatcccagattaatttaattctaagcttttggtcatggttccctaagacctttgactcacacacagctggacaggacagtggccttgtgcatagtgcagatgaccattataggggaaaaacaagtcgaaattcatagtcctttactcctcctgcccttctccttttgcttaaggtgagcttcaccaggaacattttcgccacaccaaaggaaaactagccagaggcaaaccagctctaagttaatatttgccaattaaatggtttaagttttggattcacagaaacactgacagcatcttattagaatatactgtnnnnnnnnnnnnnnnnnnnnnnnnnnnnnnnnnnnnnnnnnnnnnnnnngggaagaccgatggcccatgcatctggccgtcctttttcacacaggaaacagctan

SEQ ID NO: 24514 - DNA, 922 bp, Homo sapiens
  misc_feature 1, 2, 3, 4, 5, 6, 7, 8, 9, 10, 11, 12, 13, 14, 15, 16, 17,18, 19, 20, 21, 22, 922: n = A,T,C or G
nnnnnnnnnnnnnnnnnnnnnnagaatgaaaatgatttccgtatttatgtttgtcagcaatatagttatttacaaataacccatatgaaaatgtaaaaaagcatattacatcttcacatgccatctgtattgactgaataaagcttagtgacattatttgcaaatctgtagttaattgtacatagacattttgtgcgttaaaaaggaaatgtacataatgtaaaataaattacattacgcaatttacaaagtaatattaacaaaaattcttagacagctgcctccttatttaaacaaaataaatattcaggtagttaaattaacataaaatacacatttagggaataataatttatagaaagacagattgcaaattttaataaagttatattttacaatgatagatactgatctcttcaaatctgtgtgatagaaatggagaaaaaaagtaccagaaaaggaatctaaatgtttactttctaaaaataaacacaaacagatttctgaaaaatagggaaaagtttacttgagggttaaaagtaggtaatctagaaactatggcttaaaaacaataaatctacaaaacacaacaagactgacagttatattctaaataatatagagatttttgatcactgaaaacatgactcccacaaactaaagctcttcatatactgcccatttttaagatctgacttggtagaaacacagaaaaataaaaatgcaaaattaactgtttagcattagtttcattcatttaataatgtagacataaccatttttcattgtccctgctagatataaaattattataacacactgcaaaccatcctttttataaatggataactatttgcttggctcacacaccagtttctgatacctgaaatcctgtcctgcagccagggccacctgagggcan

SEQ ID NO: 24515 - DNA, 1380 bp, Homo sapiens; identical to SEQ ID NO: 20118
  misc_feature 1380: n = A,T,C or G

SEQ ID NO: 24516 - DNA, 557 bp, Homo sapiens
  misc_feature 552, 553, 554, 555, 556, 557: n = A,T,C or G
gcgtccgctttctttggctctgagcttaattgtacattaagcaaacttaagtagaaaagaaactgaatatgttaaatatattaacaacatatttggacttgcttaactaagattatagagatgatcagtttataaaaccaccttcaacttaaataaatttgaactcgaaattgcaaaagcagtctagaggctttgctagtatccttcaaccaatttctagtaaaaatatcctatataaccataattatcaaaaccagaaaaacaacattggtaggatactataaagtactaatcttattttggatttgacgaatttttacatgtttttttcttttttagtttgtactctaagaagttgtattacatgtacagattcgtgtaaccgctgcaaccacataaaactaatgaacacaaagtccctcatgctacctttttatgcttacactccatccaaacctaactctgccaaccacttttctcctatcagtataatttcatcatttcatgaatatgataaaaataaaattgttttctgtaatggtttttataaannnnnn

SEQ ID NO: 24517 - DNA, 577 bp, Homo sapiens
  misc_feature 1, 2, 3, 4, 570, 571, 572, 573, 574, 575, 576, 577: n = A,T,C or G
nnnnaaaaagctcactgctgatcgtagaaaatttgctttaagttaattaagtatctgggattattctttgaaaacagatgaccataattttttttaaagaagagtgacttattttgtcttattcttaagtaaagtgtgccaattaaacctgtgtggcctatataaatgaagttaataacttcatagtaagaataaataggtttaactaatgtgatagttttctaaaaggagattgtttgaagacaactattatgtaactgagggaaaagcaacttaactgtatgtgattgtgaatgagaaagttttgtgctatgtgggtcatttatctagacattgctgtggtgaataccagttatgtttgattttattctcaaatcattagttgccttttttcttttttatttttgctttctaggaagaaaacaatcttttttatctagaaggaaagatactttgtgttttcatttttagccatttgaagtttttaatttattgcccccagtggggttactggctctaatttcaaactaaatactttcttaattttttcaaattaaataagttaaaagnnnnnnnn

SEQ ID NO: 24518 - DNA, 545 bp, Homo sapiens
  misc_feature 1: n = A,T,C or G
natgtgtcactgggcaggcggtgcctctaatactggtgatgctagaggtgatgtttttggtaaacaggcggggtaagatttgccgagttccttttactttttttaacctttccttcccgcgtacagtttcccccaaaaaaagagatttatttatgaaatatttaaagtttctaatgtggtattttaaataaagtatcataaatgtaataagtaaatatttatttaggaatactgtgaacactgaactaattattcctgtgtcagtctatgaaatccctgttttgaaataagtaaacagcctaaaatgtgttgaaattattttgtaaatccatgacttaaaacaagatacatacatagtataacacacctcacagtgttaagatttatattgtgaaatgagacaccctaccttcaattgttcatcagtgggtaaaacaaattctgatgtactacacgcgcatgcagtcctcgcttgcacggtaattctggacgctggaaatgactgaaccatgcaaaactaccttaataatcactgggaaaaatta

SEQ ID NO: 24519 - DNA, 542 bp, Homo sapiens
  misc_feature 1, 2: n = A,T,C or G
nnctgtattggagctgggagtaaggaaagagataatatttatggcacacttaggaaatgtcaagcgctgagctaagacagtttacatatgctatcttttttaacctttgaaacagccttgtgaagtagacattattttacagaggaggaaacaggctcagagaagtgaggtacttgtcctaggtcacaacgctaataaatggtacagaaactaggatcatttgaatccaaaggttatgagctttccactacagcaaactatttaccagcactgatgaattttactgaggttgttcatttcctgattagcagtaagcacatatggtatttaaaatcaaaaaagatgacattgctgctagatttatatttttgagccttccttgtgtgtctgcatcagtcttgccttccacattaagtgaacaaacaatacataactgttattggggaggattatatactttgtttcttccacagaatagtaagccatttggcagcaggtagagcattttgttaatatgtgcactcccatggcagtaatttggt

SEQ ID NO: 24520 - DNA, 2595 bp, Homo sapiens
  misc_feature 1, 2, 3, 42, 2589, 2590, 2591, 2592, 2593, 2594, 2595: n = A,T,C or G
nnnactggggtacccgggccccccctcggaaatacttctagnaattaattaacgcgggggtcacggcaaatcatccgttactccttttatacattcagtctattaaaccatctgccttacctcatcaaatgggccaggtacacacttttcattgtgctgtacccaatgggagtgtcaggagaactgctcacaatatatgcagctctgccctttgtcagacaagctggcctatattccatcagtttacccaacaaatacaatttctcttttgactactatgcattcctgattctaataatgatctcctacattccaatttttccccagttatacttccacatgatacaccagagaagaaagatcctttctcatactgaagaacacaagaaatttgaatagttcctgctttctgcacctcccaccaaaacaaacttttcaatgatcaaaaaatgctgcagattttttgagttcccaatacgtttcatagaaaataagtaagaactatttttaaaatattcaaacaaaactaaaacaaaaatccagtgtcacatgggcctgagattttattttagaaaaaggttgttacataaaacaccctggccagttcatttcagcatgctctttcaaccagaagttcttaatatttatgatggcactagaaagggatttggcattttatgtccttctgtgtccttcatgtatctgatcaatgaagacctgtaacactaagtacttgagagttacagtctgaataatgaagtcgtaccagctgaatagcccagcttgcagtatagttatgtttcagtctgcagtgtgtttagcattcccttgtcaaagtgcttgactgcatgctggaaactttgtatttttgaagcggcaaactctgttctctggaatgctctgaagttatggctgggacctatcccctcacatctaatgaatgaattataaaatgtatatgtctatgaagcttcggggtagtgcctgtaatcagaaaacaacttagaacccttttgtttgtttccaattgagtcattactgcctgccactaagaaacgtgcttgaatctaataagtatgtgtgtaccgtaaagaatatatcttatctggagctcagcctcaatcatgtcttaacaaaatgacaggtctcagaaagggggagctcaatagctcaaaagtgacaagtccttttcacagcaccgttctcagaacacctctgagtaacgtgtttgccagtagctattctcactgatgcactgatggccctgaagaagcggatccagtcacataggaaaggaggctgtgttagtgaaagcacatggaaggtgttgctttagaaaggtagtcaggaaaaacattcaggaatagatttatacaccattattgttttatttttaaattttcattcactcttctgtttggatacttttgctaattaacgtcctatgttaatttccaccaagctataagtccatagtcagtaaaacattccccttgggctgtcatgagctaaaagcagtgtcatctccgcatgttggagcagccaagaaatagtttggtactaccgacattgtctaatccatgtcacatcctcatacaatttaattgctcaaccatgcatttaaaactcctcaagaaaggattggtactgcaactgtaggtaaactgaaaaaaaataagaaagaaagagttggatgaaaatgtgaaagcccaagtttagatgtgcattaagtattaaatagcacagtatcttcttcatggagccttttttcctcccccatcccctgcagctgcctttttttgggggcagggtgggggttgatgttgaactttaagagtttaaaagtttagcttattgagtagttgtcatttaaaatataattgcgaatatcagaaaactcatactggaaaactaaattttttttttctcttgagacggagtctcgctctgttgcccaggctggagtgcagtggcgcgatctcggctcactgcaagctccacctcccgggttcacgccatcctcctgcctcagcctcctgagtagctgggactacaggtgcctgccaccatacccagctaattttttgtgtttagtagagacggggtttcaccgtgttagccaggatggtcttgatctcctgacctcgtgatccacccgcctcagcctcccaaagtgctgggattgcaggcatgagccatgaccccaacccctggaaaactaaattttaagtgcttatttttatagaacgtttgaaaatttaatgcaggcggtgtgtaataatcattttcgactggaccattaaattctgcttcttaaagtcagcactccacttgggcctggttgaaattggaatctatcttggtttgggtaaccaactctggggaagattttggcgtgcacttcctcaattattctcctaaggtttctacctaaaacaaacacgtgggtactggcccactgggcctgcgcaactcggggttggggaacttacaaccgcgggaagagcgccgcgggggagggtgaggccctatgatgccaaaaactggccgggggggagtggggaacgcccagaccggtttttataaaannnnnnn

SEQ ID NO: 24521 - DNA, 557 bp, Homo sapiens; identical to SEQ ID NO: 24516
  misc_feature 552, 553, 554, 555, 556, 557: n = A,T,C or G

SEQ ID NO: 24522 - DNA, 461 bp, Homo sapiens; identical to SEQ ID NO: 22262

SEQ ID NO: 24523 - DNA, 354 bp, Homo sapiens
agtttgatttcttgcagtcctgagcgatggagcccgggggtgcctggttattgtccgctttctctctcagatgcttggcttgtttttcaagagaacctttttcgatattcattgctccatcgattggatccagtccttgttcagaaaattgtttcaaggcacttaaggctgcctgatcatggctggcttcaatggagcttccaatagcatggaaagtcatctgcacaggggctaatgtcagacaggtcacacactctttgccactttgtctatcacagtagtgaacctgaaagccttgaatccttgctaaatattccagttgttttgaaggttgtacctcggccgctctagaac

SEQ ID NO: 24524 - DNA, 2994 bp, Homo sapiens
  misc_feature 1, 2, 3, 4, 5, 6, 7, 2989, 2990, 2991, 2992, 2993, 2994: n = A,T,C or G
nnnnnnncgctctcttcataagtattgatcattccgcagccctgcggaccggacacgtgaggaggtagtgacgccgacactgccagaaccactgctacaaggtcccagatggccacgtctctggattttaaaacttatgtagatcaggcatgtagagctgctgaggagtttgtcaatatttactatgagacaatggataaaagaagacgggcactaaccaggctgtatctggacaaggccaccttaatatggaatggaaatgctgtttcagggctggatgccctaaataatttttttgacacattgccttctagtgagttccaggtcaatatgttagattgccaaccagttcatgagcaagcaactcagtcccaaactacagttcttgttgtgaccagtggaactgtgaagtttgatggaaacaaacaacatttcttcaaccagaacttcctgctgactgctcagtccactcccaacaatactgtgtggaagattgcaagtgattgcttccgttttcaagattggtctagtagttaaaggggcaaaagtccattctcatttggtccattagttccagcaattgaaatttatgtgaattattttgattgtagaagcactataatatgtgctgaaactaaatttctttaatattttctattcctgtcagcaccttttctagcagctgccagtttggagcattgccctctaagagctttaaaactatttttttacatgccttatatacattccactaatgacattcttataataatattaaacacatgatcttggtactaacatactcactgtgaacccagcctattgcaaaaataaaatctttttataatattatctatgggatgtcagcacaatataacactctgggaagaagtggagttttttggttattaggttaattttctagtaaaacacgttgcctgttttcagttaacactggtaatgccattttaatatatggctttttcaaatcagttcagtgaaaatagtacagatttaggtttacataactactctgacatactggaattgcatatagagatgttcagtggtcgtttttcattttaagtaatttttgttttggcatttttttgtgtgaagtaaattaatcaactagagaggtgcaaaacgttctcagttgatatctgagtattgggtgcatttggtggcttaaaagcaaagcttcctaaaaagatttttcttggcagctccaggtctatacatttaggtaatgaatggtagtagaactaatagctttaacaggagaatagggaatgagaaatagaaatccaaggctgaagccaaaagtaaggagggtggccaaatggtaaactattggtacttgttttctacctcctaaaaatgtagcttatttttaggatttaaatcactaagtaaataagtatccttgccaagtgatcatgagtgtcatttttgttctaagactaatatttttagatctttttacttcacctcatacttatcaccaatgtatatctccatttattcaataacttactggggtaaaataacagcaataaacctaaccttttaacagggtctaacatgagagttggagtcaaagccattgttatcttttggtgacacccttaaattttaagtcttccagtcttccatgtgaactttaggcccaaagtttcttatgtatcacacatcccccaaataagtgattttttcccagtgctttgtactgtcaactgcattatctttaattatttaaaggtagaattatttaattttgtgatttgttcttccatatgacattgagcaaatagatctgtttcaaaatatgttcccgctatgtggataactcttctttttaaaaagaaaatagagaatagcaatcttcatgatatcctcaaaagaacagatgttactttatctctaattcaaggtaataacctaggtcggttggttaaccttaatctctcctttaagttgtagcaaataatgctttttgggttccgagtatttctcctatgaacctatggttccccgcagctgtttcgagtaggcgttaacacggtgtcttgtattatgttattttgtggtcaccttcagtatctaatgaatatacaggcacacaacacctcacacatacatgagcgcaatacagaccacaaccggagacatcacagacccgcgaacagagcaggagaggggagagcagaagcagggacgaaggaagcaaaagcgagaagagcgagaagggcgccagagaagcgggggacagccgagcgaggagaacacacagacggacaggaggagaagaaagacagacaccgacaacgaagaaaccgcgcagaccacacagacagcgaaacaacagcacgaaggagcagaggagaaccaaggaggcgcgagggagcgcgacgaaacagagaacgacgaggaagcaagacgagacgcgcgcagcagggggaggcggccaggagaggacaggaagccaaggcagagcgaaagaacgagacacaaagacaggcacgagagagagaagagagcgaggacgagggggcggagcggcacgatagacaagagacagaagggagtggagggagaggaacaagagagcgagagacgcgggaacagcgagcgaaaagagggcgaggggaacagggacaaggaggagtcagagggagcgaggaggagagagggagagcgggcagagaaagagggaggagacagaacggacagagagggaaggggcgaggacaggagaggcgggcagaagagaagcaggacacagaaggagagcagcaacgcagcaaaggaaaagaaggcagagcgcgacgagggaggagagcagacaagagagactaaagcacgagagagggagaagagacggcggagaggcgagaagtacgagaaagacgagagagagaagaagggagaaacgaggaacgagaagaagggaagaagcaaagcagacacgagcagggaggcgagtacnnnnnn

SEQ ID NO: 24525 - DNA, 4512 bp, Homo sapiens
  misc_feature 1, 2, 3, 4506, 4507, 4508, 4509, 4510, 4511, 4512: n = A,T,C or G
nnnatgctttagatggaactaatgttgctattaatattccaaggctcttacttgacaaaattgagaaacaaatgtttcagttgcacataggaaatgtttatgaggctggaaaactgaacctcttaacagttattcagttattaaatgaagtcttgaaggtgatgaaatatgaacgttgtcaggctgatcaagcaagattgacggtagaccttcactaccttgaaaaagagaccaaatttcagaaggaaagattatcagatctgaaacatatgaggtatagaataaaagatgatctcacaactataagacattctgttgttgaaaagcaaggagaatggcataaaaagtggaaagaatttcttggtttgtctcctttcagtctaattaaaggttggactccatctgtagatcttttaccaccaatgtctcccctttcgtttgatcctgcctcagaagaagtgtatgcaaagagtattctttgtcagtatcctgcttcacttccagatgcacataagcaacataaccaagaaaatggttgcagaggagacagtgataccttgggagcgctacatgatctagccaacagccctgcctctttcttgtcgcagtcagtttcatcatcagatagaaacagtgttacagtacttgaaaaggacacaaagatgggaactcccaaagaaaaaaatgaagcaatttctaagaaaataccagaatttgaagtggaaaattctccattatcagatgttgcaaagaatacagagagtagtgcatttggagggtctttgccagctaaaaaaagtgatccatttcaaaaagagcaagatcatctggtagaagaggttgccagagcagttttatctgattcaccacagctctctgaaggaaaagaaataaaattagaggaactaattgactctctgggttctaaccccttcttaacaaggaatcagattccccgtactccagaaaacttgataactgaaattaggagctcatggagaaaagctattgaaatggaagaaaacagaactaaagaaccaattcaaatggatgctgaacatagagaagtattgccagaatcattacctgtgttgcacaatcaaagagaatttagcatggctgattttctcttagaaaccactgtatcagattttggccagtctcatttgactgaagagaaagttatttcagattgcgagtgtgtgcctcagaaacatgtgctgaccagtcacatagatgaaccaccaacacaaaatcagtcagatttgttaaataagaaagtaatttgcaagcaagatttggaatgtttagccttcaccaagctttcagaaactagccgaatggagacattctcccctgctgtcggcaataggatagatgtgatgggtggcagtgaagaggagtttatgaaaatattggaccacttagaagtttcttgtaacaaaccttccacaaataaaactatgttgtggaattcttttcagatatcaagtggaattagttctaagagttttaaagataatgattttggcatattacacgaaactcttccggaagaagttggtcatctaagttttaatagttccagtagttcagaggccaattttaaactggagccaaatagtcctatgcatggtggcactcttctagaagatgttgtgggagggagacagactactccagaatcagactttaatttacaggctcttcgcagtagatacgaggctctgaagaaatctctttccaagaaaagggaagaatcttacctctcgaattcccaaacacccgaaagacacaaaccagaattgagccctactccccaaaatgtacaaacagatgatacgcttaactttttggacacctgtgatttgcatactgagcatataaagccatctttacgcacgtccatcggtgaaagaaaacggtctctttcaccactaattaagttttctccagtggaacaaagattgagaaccacaatagcatgtagtcttggagaactacctaatttaaaggaagaagacattttgaataagagccttgatgcaaaagaaccaccgtctgacttgacaagatgaagacgtacccatttaatataactatgatgcacttaaattgaagctatgccacaggatagaaaatgaattacaacttaaatacatgttggaagtgtaacactgtttttcaaggtttaaaaaaattcctaatgccttttagccttctttaatatttttaggtaaggaaagtatgtttggattttttcctctttgtaggtatatgagattgaaatgtgaagtatttggacaacaaacgtcaagcaatgggaagccattttgatttcttgagtaatcttgtaagcattaagtgaatgacaaagtagtagtgtaacttatttcttatgttataacttcagtcaattaatataaggatagtttttgttgtatgttcactaagtggttaatataatagccattgaatatactaatctttcatcttagagaactatacaacttttattgtttcttaatggaacattctggctaaccagaaaaagtgagaaaagtagtaccttgggatgtgtagtcaagatgacaaattttaagactggaaaagctctaaacaggcttaatgattcttcaggtagaatgatcctgagaagtgatgtttgatggaataaagtgcatgtgatgattaagtgaagactggggcagaatgatttaaaaaaaggaaaaagatggaagatgagtagacacttgcaaggaacactgtcaaactataaatccattcagtgggttgtataacatttatatttagtctaatttagactttgataatttaatgctacttttatattttaacaaaaatataaattaaaattttcattagtctgttttgttgttgggtttttttgtgaggtactccctgttgggggaaaggaacaaggaacaaccatcagaatcccccagtccctacagaatagcctcacagtaacttgagaaaactgaacttggggttaaataacttgtcacacttgcagtctcctgcctcactccttcaggtgccctgcctagaaaaagacttgtgtctagcatccaagtgaacacatactattgccctctgtgaaccaggaggaatggaacaggcaatggaagggtgatagtacctacaataccctttgtagaccccatctcactaccatcaaaatcttgtccactagcccccaaaaaactggcaaggaaagaaggtggagggggaaatttattggaagtagatggcttaatagttatttcttttatcttgggctgcctttctctaagttggttgtcctgtcccagtgtgaagacccatctttttgtgagaaaagacaaaagaaagcacatgtaactaccttctttgcaatggaaaaggagaaagaaaaaatcttctcctaagttgctgttttcttttattagttaataaaacaaatcagggactatgcaggtctatggggaaacctttagtctgctttaagaaaactcagtatctgaaaatcttaacttagcatgtgatactgtcttatcagcatctgcagaagtgccaaagccactgctagacacttaatgtgtattatttcatttaattatattttaaatgtgcttccttggtaattcttaagctcgagaaagagtttgagaactgctgctaggaaatagagattcacatttaaccctgtggtacttttaagaagcaggtacgttgttgcatatatacttgggtagagattggtaactatctgatagggaagctcaagttggccacccaagtctgagaaacccttaattactgagaatcaaaagagcagaatgtctgtagacattttggatttgtaaaaatcacattgttgagttatacctgtgatgggctgaaagtttttggcattctttcctgttcttcatatgccagtaccataaacaaaaagtatctcagatctgtcactttcttctcctaaaccaatgtgattgcagctttttgccttcagccttttccctatccagtatctcctacatagttaccttttgatcttaaggaactgttttgattgggtcacttccttgcctaaaattccattgattgttcattgttaattctaaaatagagttcaaatttaaaggcatgtaagttcccctgtaacggatttcctctatcccccttccgctgtaatctcccatttttttactgaaatgcttcagtgagcatggtctttagaggtcttgatatccaatttttcctggaagccaggaataactttgcttcctctataagtttacacaataacgctctctttttaggctcagaaaaaattgacttcggttgaagtttatacacgcggttaattcagggcgaatcttctctgaaacccagggcactacataaacccgagtttattatttgggggggccatagaaaaaactaattacccatggggggtcaaaacgcggcgctaataagggggccgcacagaactcnnnnnnn

SEQ ID NO: 24526 - DNA, 3167 bp, Homo sapiens
  misc_feature 1, 3160, 3161, 3162, 3163, 3164, 3165, 3166, 3167: n = A,T,C or G
nccagcggtagcaactgcagaactgcaggagactatctttctagacaaggcagttgaggaggagggagcgcttgagggggactggcctggcgtgcactccgcacctcggggacattattgcgcgtggaacggctgcttttggaaggcacaacttcctgaatggaccatgactcccaccaaagatccctgtctctgattcaccaaacagcttcaaccctgaaaccaggacgagaagttgacaacatctgagtggacagctaattgacctaagacttcagaccagactattgcccagaagaaaagatgtttggttttcacaagccaaagatgtaccgaagtatagagggctgctgtatttgcagagctaagtcctccagttctcgattcactgacagtaaacgctatgaaaaggacttccagagctgttttggattgcatgagactcgttcaggagacatctgcaatgcctgtgtcctgcttgtgaaaagatggaagaagttgccagcaggatcaaaaaaaaactggaatcatgtggtagatgcaagggctggacccagtctaaagactacattgaaaccaaagaaagtgaaaactctatctgggaacaggataaaaagcaaccagatcagtaaactgcagaaggaatttaaacgtcataattctgatgctcacagtaccacctcaagtgcctccccagctcaatctccttgttacagtaaccagtcagatgacggctcagatacagagatggcttctggttctaacagaacaccagttttttcctttttagatctcacttactggaaaagacagaagatatgttgtgggatcatctataaaggccgttttggggaagtcctcattgacacacatctcttcaagccttgctgcagcaataagaaagcagctgctgagaagccagaggagcaggggccagagcctctgcccatctccactcaggagtggtgactgaggtttttatgtagaaggggaacaaaaaaaaaaatatctgaattttgaaaaaccacaaagctacaaactgaccctcttttttttttgagacggagttttgctcttgttacccaggctggagtgcagtggcgtgatcttggctcactgcaacttccgtctcccgggttcaagtgattctcctgcctcagcctcccaagtagctgggtttataggtgcccgccaccagacccggctaattttttagttttagtagagacggggtttcaccacgttggccaggctggtcttaaatgaccctcttatttttaacttggatacctgctattctgccaaaagacaatttctagagtagttttgaatgggttgatttcccccactcccacaaactctgaagccagtgtctagcttactaaaaaaagagttgtatataatatttaagatgctgagtatttcataggaaagctgaatgctgctgtaaagtgctctttaagtcttttttttttttaatccccttctaatgaatgaaactaggggaatttcaggggacagagatgggatttgttgtatgataaactgtatgtagtttttagtctttctgttttgagaagcagtggttggggcatttttaagatggctggctactcttgttttccctcatgataataaatttgtcataactcagtaacatgaacttgcccctagaggtagttgttaataattttgaaatattaaggtcttgccaagcttctgatgattcacacctgtactactgattattaagcaggacagactgagctttctgttgcaaataccttggaggagaaagtaatttctaaatatacagagaggtaacttgactatatatgttgcatcctgtgcctcccttcatattaatatttgataaagattttaatttatgtaaaacttctaaagcagaatcaaagctcctcttggggaaatggcaagtctttaggataggcaagaccctgtatgaatagtaccaaagcattaccgcatggtagagaacacactcgattaaaaatgttaagctatctgaaaaataaaatgtgcaagtcttcaggatggcacaaaacaaaggttaatgcttcttggggcacatttcttagagggcttgctgagtgtgtaaatataatcgacttttgtttgtgttacatgacttctgtgacttcattgaaaatctgcacaattcagtttcagctctggattacttcagttgacctttgtgaaggtttttatctgtgtagaatgggtgtttgacttgttttagcctattaaatttttattttctttcactctgtattaaaagtaaaacttactaaaagaaaagaggtttgtgttcacattaaatggttttggtttggcttcttttagtcaggctttctgaacattgagatatcctgaacttagagctcttcaatcctaagattttcatgaaaagcctctcacttgaacccaaaccagagtactcttactgcctcttttctaaatgttcaggaaaagcattgccagttcagtcttttcaaaatgagggagaaacatttgcctgccttgtaataacaagactcagtgcttattttttaaactgcattttaaaaattggatagtataataacaataaggagtaagccaccttttataggcaccctgtagttttatagttcttaatctaaacattttatatttccttcttttggaaaaaacctacatgctacaagccaccatatgcacagactatacagtgagttgagttggctctcccacagtctttgaggtgaattacaaaagtccagccattatcatcctcctgagttatttgaaatgattttttttgtacattttggctgcagtattggtggtagaatatactataatatggatcatctctacttctgtatttatttatttattactagacctcaaccacagtcttctttttccccttccacctctctttgcctgtaggatgtactgtatgtagtcatgcactttgtattaatatattagaaatctacagatctgttttgtactttttatactgttggatacttataatcaaaacttttactagggtattgaataaatctagtcttactagaaaaaaattaaacaaaaagggggggcaaagatccccggggggccaatacgaaccgttgtaaaagggcccaannnnnnnn

SEQ ID NO: 24527 - DNA, 2538 bp, Homo sapiens; identical to SEQ ID NO: 20316
  misc_feature 2538: n = A,T,C or G

SEQ ID NO: 24528 - DNA, 1120 bp, Homo sapiens; identical to SEQ ID NO: 22234
  misc_feature 1, 1119, 1120: n = A,T,C or G

SEQ ID NO: 24529 - DNA, 1162 bp, Homo sapiens; identical to SEQ ID NO: 21517

SEQ ID NO: 24530 - DNA, 585 bp, Homo sapiens
  misc_feature 585: n = A,T,C or G
cgacccacgcgtccgcccccatgcttttttcaaagttgctgaggggcgggaatcttcgttgcgggaagaagaaaaggcaaatccggcctggaagcggggggccctgagctgagagccagagaagggccatttcccttcccctggacctcggaatcgcccagctatctatccctggctcctggagaaacttgagggagggcccttgacccccgaatcggtttttcctgccttccccattggaccaatgatgcccttctttctccccttatcgagtcttgggcaatcagggccctggggtgagacagccaagctgcctggcccatcttccaagcaattccaaaggtgaaaacgcagccaactggctcacggcaaagagtggtcggaagaagcgctgcccctacacgaagcaccagacactggagctggagaaggagtttctgttcaatatgtaccttactcgagagcggcgcctagagattagccgcagcgtccacctcacggacagacaagtgaaaatctggtttcagaaccgcaggatgaaactgaagaaaatgaatcgagaaacccggatccgggagctcacan

SEQ ID NO: 24531 - DNA, 1010 bp, Homo sapiens
  misc_feature 1, 999, 1000, 1001, 1002, 1003, 1004, 1005, 1006, 1007, 1008,1009, 1010: n = A,T,C or G
ncctttccgggagttcttcttaacgggaaaacccctaaagcacacccctttcgcaaataccccaatttgcggaaaatccaccaaaattaatattcgggacgccaaaagtacttaggttctctttcccagatctttttttttcctaaaaccctttaatatttgacccaactgtagagtctaatagctactgtactccgagttcactacagaaatctttgttaagtagtcccaaaaaaatttctcccctccccatcccctcccgaatcttatattgttctttacaaactttggtcaagagtagaaatatatccagccagatgtatatccatacaatagcaagaacagtaaagcccaactaatgattttgagttttaaaaatagaaggcaattaaaatgtactcaaagttacattaagaaaagctttcacgggggtaatattgaaacagtcacaaaggttaagaaaatactgatatcaaagtacaaatgactacaatgttaaaatagacaaaactgctatacaagagcctctttgaaaattaaaaataaagaacacaacacatgagtcaggatgattttcctgttctactcatgaattttagtctttataaggttggttatgttgacatctagaagagtttcttatcacatctgatggtctcattccaacttcgtagggtgggtcttccccaaggaacctctgatcctggtcgcatcttggtcattgtacgatttcaaagtagtgcaatatcgccatgatgtgctggggcatgaagacgtatcctgtgtatagtgccatccccacaatggaaaccagcatggaattgaacaccgtccgctcccagggctccagcatgtagagcgccgtgaccagcaggtactggtagtagaaccaggacatctgcttccaggcccgcgccagcgccatccccgccatgcgcctcccgcgatgcagctcacacgtcagtctgtccggccgattaattctagaagacttccgannnnnnnnnnnn

SEQ ID NO: 24532 - DNA, 772 bp, Homo sapiens
  misc_feature 771, 772: n = A,T,C or G
ataaaatgtcttttgcccattttctaatttgattttttttttctgttaaggtttgagaattccttatatcagaggatatataataatatttgcaaaccatttatacaacaaagtacagtgggcgtagtgctgttattggaacctattttggaacctattccacctttggatgatgttgccagaccagtcaaacccacaggtttctggttagctgacgaagtagcaggtttcccagtattgttttgggttgttgaactcaattttgctgttgagggaccagcagaggaagttttggctgcaaaagctgcccatccagttaagccactagttactgacgaggaaacgctggcactagaagaatttcctgaaataactgtggatgtcttgacttctgttctcttaaacgctagaaaagttgtctcttgtttcagtttagtttctggtttcttaaccaatggatctttgacagctggagttacagaaacaactgcaggggctggtttctgcggtggtttctgagttttttgagcctgcaaaaatcagtggattaaatcagatacaaaatcttaactgaatatacagaaagataataatccctcacaggactcatcactgaaatgaaatacagttgaacattttaaaaaatagtgtgatgataatgaatatatatgctctttgacaaattattatcatattaatggtcttacagattgtattagtttctaaacagtaaagataatattaagctttagaaataatacagaagagggnn

SEQ ID NO: 24533 - DNA, 1162 bp, Homo sapiens; identical to SEQ ID NO: 21517

SEQ ID NO: 24534 - DNA, 3918 bp, Homo sapiens; identical to SEQ ID NO: 22949
  misc_feature 3915, 3916, 3917, 3918: n = A,T,C or G

SEQ ID NO: 24535 - DNA, 1366 bp, Homo sapiens
gcgtccgatttacataccaaacctgccctacgcttcctggaaactttactacttatgagtgtggctcctccttccctttcaatcccttaattaaatagcttcccctctacaggcttttgaagtggtagcagttcctcctaactcctgccagaaacagctctcctcaacatgagagctgcacccctcctcctggccagggcagcaagccttagccttggcttcttgtttctgctttttttctggctagaccgaagtgtactagccaaggagttgaagtttgtgactttggtgtttcggcatggagaccgaagtcccattgacacctttcccactgaccccataaaggaatcctcatggccacaaggatttggccaactcacccagctgggcatggagcagcattatgaacttggagagtatataagaaagagatatagaaaattcttgaatgagtcctataaacatgaacaggtttatattcgaagcacagacgttgaccggactttgatgagtgctatgacaaacctggcagccctgtttcccccagaaggtgtcagcatctggaatcctatcctactctggcagcccatcccggtgcacacagttcctctttctgaagatcagttgctataccctgccctttcagggaacgtggcctcgtttttcaagaacttgagacgtgagactttgaaatccagaggaattccagaaagagggctgcacccttataaggattttataagctaaccttgggaacaccttttcaggattacatgggccaggacatctctgcatggcgacaggatcaaacctatattgtgacggtgccattcattaccctgggctaggtccagccagtcgagcgttgcagtgcactgcttgggtacaacaaaacaacatgtgcccggaaactaccatgggcgcaaaataactctatgttctcgctttgccttcttctcccctcaccacgcgcaagacgagaaaacgaaaaggaagaagaagactgagaaagaaaaagaaagaaagaaagagaagaagaagagagagaagaaaggacgacaacgaagagaaaaaacacaagcaacaagaagagaggaaggagaggcgaagaagagagtaggagaggcgctaggcagagggagcgagagaggcgcgagcaagcagcgcagagagaggaggcagacaggggaagcgagcgcggagtcgggcagcgcagaggccggactagagggagagaaggcgggaggcgcgagagacacgaagaacgagaagagcggggagggccagaagggaggaggagggaagcgagagggagagagcgaggagacgaggcgcagacgaggaacaggaagagcgcaagcgcgcc

SEQ ID NO: 24536 - DNA, 790 bp, Homo sapiens
accctgctgcattggagatgatctcaataagccctcgcaccttggtcttggcgttgaggtgagattttaaaagtcaccagattagtttcaaatgaacagccttgagaatcttagaatatcttgagggtaagttaacgggtgtcattgtaggaggtgatagagaagtaggccaaacccaccaccatgctctgggcctaatacagtcttttcctattgaaaagtgacggttggggaagaaaaaaaatctcggcctgtttctgttactgtagtagctagcacttatgaattggcaaagtttcagagaccctccctcccctatgtcagatactacaataccatacaggattaaaggtgtaatatgcagatcaagacctagagattaaatacagacttcaggtaggctgctgcttggaatacttattatttttatacttattttttaatatatttccaggaagaggaagatcaaaacgttgtgccagaaactacctctgaaggctacactttccaagttcaggatggggctcctgggacctttaacttttagatcatgtagctgagacataaatttgttgtgtactacgtttggtattttgtcttattgtttctctactaagaactctttcttaaatgtggtttgttactgtagcactttttacactgaaactatacttgaacagttccaactgtacatacatactgtatgaagcttgtcctctgactaggtttctaatttctatgtggaatttcctatcttgcagcatcctgtaaataaacattcaagtccacc

SEQ ID NO: 24537 - DNA, 1384 bp, Homo sapiens
  misc_feature 1, 489, 490, 491, 492, 493, 494, 495, 496, 497, 498, 499,500, 501, 502, 503, 504, 505, 506, 507, 508, 509, 510, 511,1383, 1384: n = A,T,C or G
ngtattggtggtgctggcaaaaagaaggtaacatgttttaagaaactatgtagcatagtgtcttaacacctcagtaaagtagcttggcccaccccttgtcagctcacagcacaatctggaggccacattggttcattgatcccagctggtgggcacctttcaagcctatcacaagaagttttaattttactaattggcatagaaccttcaatgcagagcggatcccattccctgtgattctacttattaatatggacactggtttaagaagcagttggatcaatgtggcccgtgttttcctggcacactggaaaggcaactgagatctcaggattgctttcctctccagttggccaagacaagtgattttagcgataagcagctttttaccagctttgctagctgtaaatagttggacattgtaaatcattgaatagaattaaggtgttgggttgttaaattaacaaataatcaagtgttctgtgaacnnnnnnnnnnnnnnnnnnnnnnngcttttcctctctactttcttggatttcttgttcatcagaaatgaagtgtctagcaggtactgagattgtaagcacggtgtggggatgcatcaccttcactgagtttgctttgatgatgctttgcatgttggcctttggacgacagttttatagtatggtcgattataatgccagtgctatttaggctggtgcaaaagtaattgcagtggcaaaaaccacaattacttttgcaccaacctaatatgttttaagatagtatattatgagcaaaggagaaaacgtttaaaatcatgtttattttgtaaactccaaaatgcatgttacatgtgaagtgactcactggaggaaggtgagtactttaccaagtaggcacttgggaaatgctgtgtccacatacttaggaaatggcttcagttaacactgggcttgggaagggctctcttatccaaggagcagtcttctctggagccatgaaaccagcctggcagcactggtaataaactagtctgtgaaatctggcaaagcctctgtcctgtttggatatacgcaaaactgccttttaccatttccattgctttttattacttaatctcccaactttgtgcctggtgtcttttttttttttttaaaatagaaaatttttgaggtaattatgtattcatataaaagtctttggtggatatgctttttcccacaagcacttggttagaatggcccattacctcatttgtttattttttgagacagggtctcttgtcacccaggctggagtacagtggcatgatcatgggttactgtacctcccgggcttgggtgattctcccacctcagcctcccttgtactgcgactaccacgccatgtctcaccagnn

SEQ ID NO: 24538 - DNA, 4830 bp, Homo sapiens
gcgtccggcggatggatggggcttcttcaggcggtggcggcagcagcgaaggtggcggcggcagcagcggcagcggctatggtgtggtcgctcgattctcccagtgcctggctgagtttcggacgtggttaagaaccaactggttgaggttcaatgcagacaagacggatgtgatgctgccatctgttgaatcttcaagtccaggaggttcagcaacatcagatgaccatgaatttgatccatcagctgacatgctggttcatgattttgatgatgaacgaacattagaagaggaagaaatgatggaaggagaaacaaacttcagctctgaaatagaagatcttgcaagggaaggcgacatgccaattcatgaacttctcagcctttatggttatggtagtactgttcgactacctgaagaagatgaggaagaggaagaagaggaagaagaaggtgaagatgatgaagatgctgataatgatgacaacagtggctgtagtggggaaaataaagaggagaatataaaggattcatcaggtcaggaggatgaaactcagtcttccaatgatgatccatcacaatctgttgcttctcaagatgcccaggaaataatccgcccacgtcgatgtaaatattttgatacaaatagtgaagtagaagaagaatctgaagaagatgaagattatattccatcagaagactggaaaaaggagattatggtgggctccatgtttcaagcagaaattccagttggcatttgtagatacaaagaaaatgaaaaagtatatgaaaatgatgatcagctcctgtgggaccctgagtacttaccagaagataaagtgattatatttcttaaagatgcatctagaagaacaggtgatgagaagggtgtagaagcaattcctgaaggatctcacataaaagacaatgaacaggctttatatgaattggttaaatgcaattttgatacagaagaagcattgagaagattaagatttaatgtaaaagcagctagagaggaattatctgtttggacagaggaagagtgtagaaattttgaacaagggctgaaggcctatggaaaggattttcatttgattcaggctaataaagtccgaacaaggtcagttggtgaatgtgtagcattctattacatgtggaaaaaatctgaacgttatgatttctttgctcagcaaacacgatttggaaagaagaaatataatcttcatcctggtgtaacggattacatggatcgtcttctagacgaaagtgaaagtgctgcatctagtcgagcaccatcccctcccccaactgcatcaaacagtagtaacagccagtctgagaaagaagatggcactgtaagcactgctaatcaaaatggagtgtcatctaatggaccaggtgaaatattaaacaaagaggaagtaaaagttgaagggttacacattaatggaccaacaggtggaaataagaaaccacttcatgcagatatggatactaatggttatgaaacagataaccttaccactgacccaaaacttgcccatatgactgcaagaaatgaaaatgattttgatgaaaaaagtgagagacctgccaaaaggcgaagggtaaacagcaatggaaaagaaagtccaggttcttctgaatttttccaagaagcagtctcacatgggaaatttgaagaacttgaaaacacagatgactaaattttagacctattttactttctttggagtaaattctggtgtgactaaaattttcagggttgatgggttaccttaaaaagttgatttccttgaagcagtttgaaaatttgaattgagtcttaactttaggaaatgaggtttcataattctgccttttgcagatttttttactttaaagctgtcagactcttttaagggtattttaaaaattggtaaatttgaatgaactaaagatatatctctaccttctcatttgaatatctttagttcattcagatttactaattttggtaaatctgaatgaactaaagatgtatctgtaccttctcatttgatgtattaatcataaaatttcactacaaggtaatttttgcttagtttgatggatgaatgggaaactcaagtccaaatttctgcttaataccaatttctctgagtttcttgaaatgtctttaaaacagacatttttctcaccaaacagtttgagtatctttattaaggaaacccttacgaatcctgaaaattatgctagcatgatttttttatatatagaagtttaaaaataaaccaggtcaggtttgtatatgtaaaattgttgacatcaatgatgtctttccatattcttatctgggcttaagaaatacattctgtatttttccagattctttgtagcctttgaaagatttttacagtacatatgtcttgactgagctgtcctttcttaatacaaaagcgtgtataattttcttaacttgtacagttggtaaacttttatgagaggaattgttattctgagtctgtcagctttcattttattttgctaaggtttttctaatgaatttttaagtgtttgtgtagtaattaagtcatatttcttatccaggtggttaaagcattcataaaggattatacaattttttttttttttttttttaaatttctacttaagggcaagtaatttgagaattctgaaattaagcatgatgcttagattgcagtttgttttgcatttgctctaattttcaaaattatttttgaagcaagacaaaagtttaatgtcagcttaagtgcttaaatatatcatgctgaccagaatcctgttatttttatatgcatcataaaatttcccatttctgcattaaataaacagaggaggggggtcaagtgatacttagatattggcacacacaaggaacaactgttggcaggcagtatcgattttatgaagagaaagtgaagtttgaaaacttttcaaacttttctagttacaatccaatttttcagatttgataatgcttttccaaagtgaaaataagatacacaataatcattgctctgtgtgattacagataggattatccatctgcatagccttgtaaaagtgccattttatttttagtgctaaattcttgttaaataatgtagttttatatagctgatagaccaacctatatccaaacttttataaaatattaattattcttgtttttctcacacaggcatactccaaatgcttcttccagttcatttttcagccatcagttcaagagccaatgcctttttaaaataaagcttctgtggtcttgtttttaatggctcaactgtctgatgtaattgagtgaaggtttgcactgagaaattagcattcaggccttacccccatgaagtattactgttaacatatgttcggactgcttcccttcaccaatgtgaacaactttttttcccaaacagtgttaaaagccactttgcaacacttgacttcatcttaatgtacattcactgttgttacatacatatctaagtaaatcaaagttttgggtggaagtgttgagaagtatgagttttttgttgtttttgttttacttaaaacttttaatttatccagaatggcagtagctttagcaagcagatggtcacaatctgttttctaaatcattttttattaaatgaatccaaagtatcctagctctttgtcaaagatggtctgtagaaatgtttttaaagattagggatgctgtactttttgaattgttgcagtgttggagatgccattttcacctttttaaaaagatgcattttatttgcaggtttgtgaagttcttgcaaactcttactacagaaatgttttaaatacattctcaggcatgtttgcaaaaatatggcacatgtatacattttaggaaatgttacttttgttaatctttaaaaaatacacctaatgaaagacattccactattatgcgtaatgctcagctttttgtaaagaaatatttaattgtattttgtgtttatacaggtatttcacacaataatttgttcttaatgcagccactataacttgataagtcattgcactatttaaaaagttttagtaatatcatgaatttaatttgcttaagatttagtacatttcagaacttttgaacttttgacaaattgcattgggaaaagaagtctgttaatagtgatttagtctccccgcctcattcccacccccaacaaagcactatcattttcatttggaatgggtatttttctgtttcatgatgtattttcaaatagagttcaggatctgcaattcacttcaacacaagtttgttgagctttaaaatgtatttgaagtaatatttaaataggcatttaaaatttcaaattagatgttaaatttatgcatagtaattttgcactgtaaaataattcccttctcccattccttgtctgccattctgaatatgcttattaaaatatttttttaaacatatttgcctacataatactgtgtgaatattttcattagattaattcactaagattttattagagattgtttgaatgatgcatgttattgacaaggcaaatatatatatatacacagtctgtttcttctattcctagacatattgcactactttttcagtggttcttggtcccctttaccacatcttgggtgatgtatttttgtcttcttcccctttgccacaagagatcctttcagtccctagacctccattcactctgtttctcttctgctggattatataatttaaaaataatgtgttcccgtattttgtagtggagttcatatcacattatgttttgcaaaataaaacttgttttg

SEQ ID NO: 24539 - DNA, 3855 bp, Homo sapiens; identical to SEQ ID NO: 20695
  misc_feature 1, 2, 3854, 3855: n = A,T,C or G

SEQ ID NO: 24540 - DNA, 393 bp, Homo sapiens
  misc_feature 393: n = A,T,C or G
acacagatgaagtagcaccggggcagcaccaccatcttaagatgataaaccaaactgcacatacattaaatgaaaatacatatatgtttaatttggcccaccctgtagccaagaggtgtaaggaaagtacagataccttgtgtgattgtggaacgcagtcaaggtggatgtcagggtcggattgtccacctgagcaattcctttacccagactgtcaattgcaggaagccatttttttcctcctggtagtaaatgtcagagtaagagaaacaaactgtttagaattatcatgtttttaaaacatcatagtaatataaatctgctgttaggagctccagttgctaaaacctcaatttaagtctttaaaaggttgtattttgaatgtaaccaaan

SEQ ID NO: 24541 - DNA, 293 bp, Homo sapiens; identical to SEQ ID NO: 21414

SEQ ID NO: 24542 - DNA, 3855 bp, Homo sapiens; identical to SEQ ID NO: 20695
  misc_feature 1, 2, 3854, 3855: n = A,T,C or G

SEQ ID NO: 24543 - DNA, 1680 bp, Homo sapiens
  misc_feature 1, 2, 3, 4, 1680: n = A,T,C or G
nnnncgcggccgcgtcgacacggctgcgaaagacgacgcagccggagagattgaagatggcggcttctcaggcggtggaggaaatgcggagccgcgtggttctgggggagtttggggttcgcaatgtccatactactgactttcccggtaactattccggttatgatgatgcctgggaccaggaccgcttcgagaagaatttccgtgtggatgtagtacacatggatgaaaactcactggagtttgacatggtgggaattgacgcagccattgccaatgcttttcgacgaattctgctagctgaggtgccaactatggctgtggagaaggtcctggtgtacaataatacatccattgttcaggatgagattcttgctcaccgtctggggctcattcccattcatgctgatccccgtctttttgagtatcggaaccaaggtgagaaaatgaaattttgggagaagtggactatctgggttcaaatcctggttgactgtgatgttgggtaagttacttatctttgtacatcagtgtctttcatctgtgagaacacttgccttgtctcccaagtttgccataattaaatgggaaacacgtaaagcattcagcatagtgctggcactcagacgtgcactagtgcttaggagctccctccattggtgcaggagatgaagaaggcacagagatagatgctctacagtttcgtctccaggtcagatgcactcggaacccccatgctgctaaagattcctctgaccccaacgaactgtacgtgaaccacaaagtgtataccaggcatatgacatggatccccctggggaaccaggctgatctctttccagagggcactatccgaccagtgcatgatgatatcctcatcgctcagctgcggcctggccaagaaattgacctgctcatgcactgtgtcaagggcattggcaaagatcatgccaagttttcaccagtggcaacagccagttacaggctcctgccagacatcaccctgcttgagcccgtggaaggggaggcagctgaggagttgagcaggtgcttctcacctggtgttattgaggtgcaggaagtccaaggtaaaaaggtggccagagttgccaacccccggctggataccttcagcagagaaatcttccggaatgagaagctaaagaaggttgtgaggcttgcccgggttcgagatcattatatcttctctgttgagtcaacgggggtgttgccaccagatgtgctggtgagtgaagccatcaaagtactgatggggaagtgccggcgcttcttggatgaactagatgcggttcagatggactgagcttggatgcttctgaggcaagctgaagctttgggttctgactgacccaccctacaggactgctgaacagagagcccagtgtgactagggatcctgagttttctgggacaattccagctttaatcaatacattttgttaaatgtgccataaaatgagactttttacgcctttataaggccttagatgtaaataaactcacccaagcagagagcaggcacgacacgagagacacgcacgaagacacgccaaaacgcgagataccagcaccgcggacagaaacagaagatcacgcgagggaccccctccaagacaccccgagcgtgaaggcaaggggcgctcagatggggctagacan

SEQ ID NO: 24544 - DNA, 2538 bp, Homo sapiens; identical to SEQ ID NO: 20316
  misc_feature 2538: n = A,T,C or G

SEQ ID NO: 24545 - DNA, 1782 bp, Homo sapiens; identical to SEQ ID NO: 21380
  misc_feature 1766, 1767, 1768, 1769, 1770, 1771, 1772, 1773, 1774, 1775,1776, 1777, 1778, 1779, 1780, 1781, 1782: n = A,T,C or G

SEQ ID NO: 24546 - DNA, 1390 bp, Homo sapiens; identical to SEQ ID NO: 24490
  misc_feature 1, 1385, 1386, 1387, 1388, 1389, 1390: n = A,T,C or G

SEQ ID NO: 24547 - DNA, 1551 bp, Homo sapiens
  misc_feature 1, 1529, 1530, 1531, 1532, 1533, 1534, 1535, 1536, 1537,1538, 1539, 1540, 1541, 1542, 1543, 1544, 1545, 1546, 1547,1548, 1549, 1550, 1551: n = A,T,C or G
nataattgctggcttaggacagagcaatactttacaataaaagctctacacattttcaaggagtatgctggattcatggaactctaattctgtacataaaaattttaaagttatttgtttgctttcaggcaagtctgttcaatgctgtactatgtccttaaagagaatttggtaatttggttgatgtggtaagcagataggtgagttttgtataaatcttttgtgtttgagatcaagctgaaatgaaaacactgaaaaacatggattcatttctataacacatttatttaagtatataacacgttttttggacaagtgaagaatgtttaatcattctgtcatttgttctcaatagatgtaactgttagactacggctatttgaaaaaatgtgcttattgtactatattttgttattccaattatgagcagagaaaggaaatataatgttgaaaataatgttttgaaatcatgacccaaagaatgtattgatttgcactatccttcagaataactgaaggttaattattgtatatttttaaaaattacacttataagagtataatcttgaaatgggtagcagccactgtccattacctatcgtaaacattggggcaatttaataacagcattaaaatagttgtaaactctaatcttatacttattgaagaataaaagatatttttatgatgagagtaacaataaagtattcatgatttttcacatacatgaatgttcatttaaaagtttaatcctttgagtgtctatgctatcaggaaagcacattatttccatatttgggttaattttgcttttattatattggtctaggaggaagggactttggagaatggaactcttgaggactttagccaggtgtatataataaaggtacttttgtgctgcattaaattgcttggaaaatgttaacattatattatataagagtatcctttatgaaattttgaatttgtataacagatacattagatattcattttatataatggccacttaaaataagaacatttaaaatataaactatgaagattgactatcttttcaggaaaaaagctgtatatagcacagggaaccctaatcttgggtaattctagtataaaacaaattatacttttatttaaatttcccttgtagcaaatctaattgccacatggtgccctatatttcatagtatttattctctatagtaactgcttaagtgcagctagcttctagatttagactatatagaatttagatattgtattgttcgtcattataatatgctaccacatgtagcaataattacaatattttattaaaataaatatgtgaaatattgtttcatgaaagacagatttccaaatctctcttctcttctctgtactgtctacctttatgtgaagaaattaattatatgccattgccaggtagaagtttggaataattgtttagtctctcctattagatgtggacatttttgtttttgtttttgttttcagggatgaaataaaatatattatttctaccnnnnnnnnnnnnnnnnnnnnnnn

SEQ ID NO: 24548 - DNA, 850 bp, Homo sapiens
  misc_feature 1, 2, 3, 4, 5, 6, 7, 8, 845, 846, 847, 848, 849, 850: n = A,T,C or G
nnnnnnnnaaaaaaatatatcctaaatacaagtctcttatcagataatatgacttgcagatattttctgtcattctatgtactgtcttttcacattcttgatgatatacttttcagcccaaatgtttttaacttgatggaatacaatttattttttcttttgttgcttgtgctttcagtcatatttgtgaaaactttgcttatcccacattacaaagatttactatttctaagtgatttataattttaccacctacctttaggtctctgatccattttgagttaatttttatgtgcgaggagggagtctaacttgattcttttacatgtggatatttagttgtcccaggaccatttgttgaattaagtgcccagaacaagtacatctatatatagagaaagtagattagtggttgtcagagactgtaagaagtggggaattggagagtgactgcccataggtacaggcatgctttttggcattatgaaaatattctggaattaggtagtggtgatggttgcagaacttttggaatatggtaaaagacactgaaatatatgcttaaaaatggtgatttttgtgatatatgaattatactatagaactaataataacagtaataaagcaaggtgtctttccacatctccatgccttgtattttcattaaaaaaaaaaaaaaaaaaaaaaaggggggggccctaaaattgtttaaaaaaaaaaattttcaaaatttcccttgaacctggaaaaaaaaaaggaggccaatggtggtggaaaactggtttttggccctttatagggggaccaaaaaaagaattgccttccaaattttcaaaaaaaggccnnnnnn

SEQ ID NO: 24549 - DNA, 343 bp, Homo sapiens
  misc_feature 1, 2, 3, 4, 5: n = A,T,C or G
nnnnncaggtacgcggggtgtaaccacctgggaaaacttcacagaaaatgagagtttcagatactgagaatagaaccactaagaagcagaaaagagaagatattctcgtgggggagaacaacggctgggaggggaggaagcatggccaaggcaaagagaactgcttcttgctgccgccatatgaagaaggacgtgttcgcttccccttcctccatgattgaatacaacatgtttaagaccacagaacatctgcataggctgtaaatttcgttgaatgatggatgcaaagatggaagacagatggatagaggaaaagacagaatcagatactggatgagttagt

SEQ ID NO: 24550 - DNA, 739 bp, Homo sapiens; identical to SEQ ID NO: 23296

SEQ ID NO: 24551 - DNA, 1650 bp, Homo sapiens; identical to SEQ ID NO: 23941
  misc_feature 1, 2, 3, 4, 5: n = A,T,C or G

SEQ ID NO: 24552 - DNA, 1938 bp, Homo sapiens
  misc_feature 1, 1937, 1938: n = A,T,C or G
naggattcggcacgagggcggacggggcgcggcgggggacacggcggccgccgcggggctcgatcgggcaacggcggcgacggcggcagcgacggatcctcctcctcccttattcccttgctcctctttcttccttttcttttcctttccggccgggcctcgtccactttccctaacggcggcctcgatcctacgtaaaggcatgacttcctggcaccacagggaaaatcgggtgcaagcccagaaactatttccccaccaccacttgttgaaaaactgatttgaaggcatctccggggttgaacaaacggaaagtgccaggatttgatgcgtctctggtttcgctctggagaccattccctgctaagtatcaagacgaaaaaaactggaaactaatccgaatttctgtggaatgtttaatcttctggatccatgactgtctgatacgttggcaatttaaagtccttttgaaagagagttcatgttacccagctattctctaaaccatatttatttagagtcagaatggagcgatttgtagtaacagcaccacctgctcgaaaccgttctaagactgctttgtatgtgactcccctggatcgagtcactgagtttggaggtgagctgcatgaagatggaggaaaactcttctgcacttcttgcaatgtggttctgaatcatgttcgcaagtctgccattagtgaccacctcaagtcaaagactcataccaagaggaaggcagaatttgaagagcagaatgtgagaaagaagcagaggcccctaactgcatctcttcagtgcaacagtactgcgcaaacagagaaagtcagtgttatccaggactttgtgaaaatgtgcctggaagccaacatcccacttgagaaggctgatcacccagcagtccgtgctttcctatctcgccatgtgaagaatggaggctccatacctaagtcagaccagctacggagggcatatcttcctgatggatatgagaatgagaatcaactcctcaactcacaagattgttgactaggaggttaccaccattgtgatcaagataaatgtggagtattaaagttatgtgttgattgtgtggttcatttttgtatttatttcatttaaaatcatgtgacgcagaatagttttgcaatgtgtatatagttgcaggcaaaaaaaaaaaccacctcactgcaaaacttattgttaattttagtcaccaatggtataaagcaaaacctaggtttagagtgtgctaggatacctgaaacctgatggttatctttaaaattaatggtttttctcctgaaatgtttgtgcatggaagaactgccctgcttttttaccctgttgccatgtatgattattccttgtgagattacttaattacttggattgaagactagcctattgaagctgctgccaggcaacaccacttaacagtaacttaaaggaattattttctttagaggatcctcttcaaaaaggaagggatagtggaaaactgttcttatatcttcagatccctagcagaaatgactgtttatttcaaactatgttttacttgtatatgatgtagtcaccttaactatctttcaattccatacttcccccgcccccattttgaaggcttcttggtgcatgggtgcccgctccagtgaccacacggattaaatctccaatgtctatgtcccaaagccaggcggaattgccacgcataggaattagtccctacaggagtacaaatcgacatgctcaattaaggctaccgtgaatctaactgactagttggcgtaaggactacgatgcgttggcaaccgctcggggattcctatgcgcaaacatacggggacaaactcctcgatacctactctctgtgcagacaaagatcgcgggataagagagagggtggtacacctactactagctttatatcatann

SEQ ID NO: 24553 - DNA, 3106 bp, Homo sapiens; identical to SEQ ID NO: 23742
  misc_feature 3100, 3101, 3102, 3103, 3104, 3105, 3106: n = A,T,C or G

SEQ ID NO: 24554 - DNA, 373 bp, Homo sapiens; identical to SEQ ID NO: 22327

SEQ ID NO: 24555 - DNA, 1214 bp, Homo sapiens; identical to SEQ ID NO: 20119

SEQ ID NO: 24556 - DNA, 1545 bp, Homo sapiens; identical to SEQ ID NO: 23819
  misc_feature 1, 2, 3, 4, 5, 6, 7, 8, 9, 1541, 1542, 1543, 1544, 1545: n = A,T,C or G

SEQ ID NO: 24557 - DNA, 2747 bp, Homo sapiens
ctcaaagtaacctggcggatcgaccttaccacatcggacatactaaggaccttgactgtgtggaagaatagcccagagaaaaatgaacgacacacatgcttagagcccttctgaaaaaagtctcactgtgacgcccaggctggagtgcagtggcacgatctcggctcactgcaacgtctgcctcccaggttcaagtgattctcctgcctctgcttcctgagtagctgggattacaggctggtctcaaactcctggccttgagagattctcctgccttggtcttccaaactgctgggattacaatatccggccctactggaatattttaaagtaaatctcaggtgttacatcattgcacttgtaagtactttaaaatgtatctctagcagataaatctttttaacaaaaccacagcatcattgtcacactcaaaaaattgacaagatttccttaattatcatataatagtctgtattgtttctatctcaaaaatacagttttcttggttgttgaaatctagatccaacattgcatttggttgatgtgtctcctttactctgtaaaatttacccctgcgttttagttcttttcggcttttatttgtcctgtggaatttcctccactcaggatttgactgagagtatccccagagtgtccagttagacctagaagctggatttgatcctggttcatttattttcccccaagaatactccataggtgatgctatacactttctcttacatcatttcaggaggaacatgatgtctgattgttccactttcagtgattttaatattgatcaatgagttctggtggtaccaactactacaaagtttctcatcaatctttcacctgatggttttagcagctattgataattgttgcctggatccattatttcatttcaggggttgtaaaatagtgattttctggttctatcaaacctcttgcatttatcatctatgattcttctttaaggaactttctctaaatctgaatgggaaagatgcgataaatatttatcaaattttagagtgagttagtgccctagcaacctccaaagttgacaaatgagtatttctttaaagcaaggtatggcccaaccaatactttgaaactagcatgtttagaatagagcaggaggaaactatatttgaaaggtcagaagtggaaagactaagagggcctgaacaataagaggacagaaccaagaggagttggcaactaattggatgtggggattaaggaaaggtaagcatcaaagattacctccaagtttgttagaaggttagtagcaggattctgatgccattcaagtaaatacaagtctcagtcagatgaaccccaagagccacatgtatttgaggggtactttgtctcacacttttacctgttacatggttttcagtaatttagaatttaagccagtagtggggcgactgtacatctatcgacatggtgaggtagagcatgtttgggaggaaagacgttgaatcccatttggtgacagtgagcttgaggtgctgccagaacactgcactgaagataggaggagactgtaggaaatacaagataggaaaggtctccactgaaatgttaactctttctctctaaacggccatccaggcctcaatgtctgcagtttctgatctgtgattatgacttatccaaatcttacatttcttaaaaatagtcatagatgaagggaatcacagttgatggttatatggtgacattagtggcttaaattctaaatgactggaaactgtataataggcaaaactgtgaggcaaataaaatgcttctcaaatctgtgtggctcttatggggttgatttgatttggacctgtattaatttcttatggctgctataactaacaaattaccacaaacttggtggtttaaaacaacacacatttattctctttctgttctggaggccagaagtctaaaatgagattcactgggctgcagttcactgggcaaggccatgctcctctggaggcttccatgatgcatcccatattcagtgtttcccgagtaagccccacccatgcaggtctgcagttttacctcaacaggcttttgcactcagtggctctctcctgtggtttctatctgaaattctcttcattttttttttaataactgctttattgagatataattcacatgccacacaattcacctatacagtatacaattcagtagtgtttactatattcagagttgtgcaactatcatttttctcacccccaaaagaaaccctatgcccgttagtattcactctgttttctcacaactctaggtaaccactaatctactctccatctctatagatttgcccatgctagacatttcatataaatggaatcatacatgtggtctttttcactgagtatattttcaaagtgcatcccagctgtggcaatgaatagcatctcattcctttttattgccaaaatatattctatcatatgggatatgtcgcattttatgtatccattcatcagctgatggacatttggggttgtttgtactttttggtaaccatgaataatgctactatgaacttttgtgtccaatcttctgtggacttgtttcatttctctggatgtttattccaggagaatggtggttttacagaactctttctccataattgctatccaaatttttcctttcgaaccacatccgtttttcccaggtcccctttcctcaaagattttcccatcccgttggcc

SEQ ID NO: 24558 - DNA, 1416 bp, Homo sapiens
  misc_feature 1, 2, 3, 4, 1416: n = A,T,C or G
nnnnagaatttgtaaaagttcgtatgctttgcctctcaactgcattaacatgccacaggctcagactgtttttgtgtaaaggatgtcaaagaacggcactttttctaaagagaagtttgatattttgtatgcttgttaagaaagtacagtattggaaattaaaggtggacaactgataattgaggagtatgtcaattaattttttatgtatattacctgtttacttgtacaacttactgtacaaattacatgcagcttcattttcaaatgaatccttaaaataaggaaatctttttaggaaaacatttaatttttgtatttttgattttaaaggcatgagttatgtcaattttcagtgtattaatgaagattttaacttttcatcaggttgagtgttttcttactatattatctgttgtgtatgtagttagcatattgtgtcactgaactgtttaaaaatctagcatgtagagcaagcctgttttgtggaaaatccttattcattaaaaaaataatcatggcagattttctgcaaaaaaaaaacaaaagcatttgcaattcagaatactgatttttttaattttatttaaagaaaggtattttgcttgcaggaaaaaaatactacagattcattttaatgagaatctttgaaatgtatttatctttagggcatctgggcatctttatgctgtttgtcttctgtctttcttgaaataaaatgtacatacgttacctttacatatgctcttgctcaaaattgtgaacctagttacatttctccctgctcccttcctttttatgctcaaacagcgaaacccaaaacttaaaagatctgaactttcagcatgcattctgattgctgaaagatttcctgatttagtgcattctcaaaagggctttcccataatctaaagggaaatgtaagcacctatactcttgtgcctgtgggcacttcaataataaaaaccaactttttaaactaatcatcttttatcaatgataaagttgttttcagtcccacactaggagagttcctttaagtcagctgatcaagcataagatacttccgtaaagaaataaactaagaaaattttttatggcttgagaaaattccttgaggccaaattaatatatttttctttgttattttatttgagtcattttaaatttgttaatacaaaatttaagataatttacagagacattatcagctttcttctacctatacatgttttgcctccattatcctctcttcttatcgtgggagtaacactccttagtaacggcgggggtttttaaatgaaagggccggccctgtctaagggaatacctaaagctgtaatcggggagggcccttgaacgaagcggtcactcacggggaaaaggccagggaggcaacaaaatatgggacgacan

SEQ ID NO: 24559 - DNA, 2538 bp, Homo sapiens; identical to SEQ ID NO: 20316
  misc_feature 2538: n = A,T,C or G

SEQ ID NO: 24560 - DNA, 1002 bp, Homo sapiens
  misc_feature 1, 2, 1000, 1001, 1002: n = A,T,C or G
nncacgaggtttttaaagcagagctgagcacacactggatgcgtttgaatgtgtgggtgtagttgttgtgaaatgttacatttagcaggcagatccagaagcactagtgaactgtcatcttggtggggttggcttaaatttaattgactgtttagattccatttcttaattgatggccagtatgaaaagatgccagtgcaagtaaccatagtatcaaaaaagttaaaaattattcaaagctatagtttatacatcaggtactgccatttactgtaaaccacctgcaagaaagtcaggaacaactaaattcacaagaactgtcctgctaagaagtgtgttaaagatttccatttgttttactaattgggaacatcttaatgtttaatatttaaactattggtatcatttttctaatgtataattgtattactgggatcaagtatgtacagtggtgatgctagtagaagtttaagccttggaaataccactttcatattttcagatgtcatggatttaatgagtaatttatgtttttaaaattcagaatagttaatctctgatctaaaaccatcaatctatgttttttacggtaatcatgtaatattcagtaatataaactgttgaaaaggctgctgcaggtaaaactctatactaagatctggcaacataattacaattcaccagactattttatttaaggggggcgcttattcgggccttaagactggattttgcttaactcatcaatgaggcccacctaacgtgcgcacaacactcccaccccgtggtatactggccgccacacacccggagccactggtcacatcccccgagccaagcacatctgcgcgcaccacaccactggcgcgcatggaccaccacacaccggggcgcgagggcacgccaacacccgggcgcagggcacagccacacggaagacaccacaaaagaggggcgcgcaccgacaaccggagagccgacagaaacaagcagcactcannn

SEQ ID NO: 24561 - DNA, 505 bp, Homo sapiens
  misc_feature 502, 503, 504, 505: n = A,T,C or G
acatatatgtatattataccaatagctagtaatttcaaaaaaaacattgacttgagtgttagataaccattctctaaattcagtttttgatgtttcaagaaacccaaaagcctgtcttttcacctacagaccctttgtgcacgtggcaaatcacctctgaaaggcaaaaactaactggattctcttcatttgttcaaaaaagagaagaaagctttaaagatatgcctataaataaaagaaaattaggttgctatattatgattgtgcaataagtattaatttcattgaagtttgaccctgttccatgtattagatgactaagacatttaactcttagggatgttgaaagcgcaccacaaaacataagtaatcaataaagtaatgtttgaagacttttagtatatgctgcttattcaagtaattaattattttgtaaatactaatagcatatttttccaagaaaaataaaaaagccatgttctaacaaaagtgttcaccacannnn

SEQ ID NO: 24562 - DNA, 669 bp, Homo sapiens
  misc_feature 664, 665, 666, 667, 668, 669: n = A,T,C or G
acacccagtggctcatatttaacttcccccagcttcccaattcaaactggggggaaaaaaactaaatcattgggagttacttgccaacttggaagttgatatttctttactttttccccgcgtactctccttctagtgaaggattgtcacagagtttcactggatgaaactatgacccagtattcttactgtattttacatatgcctgtaaattatttgcaaaaaagaagaagaagaggaagaaagaaaagaaagaaagaaagaaagaaagaaagaaaaagaaagaaagaataaaaaaaatgataacatggcaaccaccaaactcccttaaaaacaaacattggtgacatggccaattaagtatcagtgagcctcctatctgggacttatctgttcctattgtttcaaaaccatttcatgtacactactgaggtaagtaagtttataacttgaaatgtgaacttttttttttttttagtgttaagagccaaccacactatataaatgtgaaaaaaaagtttttagagttctgttttcaaacattgctagtggtttagttaactttagccgctttatatttgaaaagcttttatttagatcttgctccatttacagtacattcttaggatgtatgtcgccaataaacctttctgtaaagcaatcnnnnnn

SEQ ID NO: 24563 - DNA, 1326 bp, Homo sapiens
  misc_feature 1, 2, 1320, 1321, 1322, 1323, 1324, 1325, 1326: n = A,T,C or G
nnccgtctaatgatgtaaagcaaaacagcatcaatatatatgtgaggttgcactaaaacatatttttatatgattaaaactgaacagcttttatgtacagctctgattctgtaatactaatatttatttactttgtttcataaattgtacattttttcttaatgttgtggattgcttttctatgtgaagcatgggatttactgttgcgtaactagaacaaaaatgtacattgtaaacaagatatttaaactagagtatcttattctgcacttatgcattagttaaaaaaagataaaggatgtatcagtcagttcttaactcttgtatatttttttgtctcttgtttgctggattgactataacttaagtgctgattgtgattttaaaatgatagtaccgtaaagcattaaagtaaacaatgtgctattgtgagttttttcaaagctttataaatcagttataaataatattaaaagtatttggtcttatgtgaacatgttgatctatatactcatctaaaaatatgggaaaacattccaccccatgtaaatatgtacaagtgcatcactggtacaattttatgtaactcagttggacactaggttgccacagacctatgctaggtgtctttaaaaaattaaggtgacaaagcacatgggactgtgtagagcttggttatcggccggcccggtggcttggcaggcagtgctgtgcgctgctcatggagaagacctgggcttagcaatctccttagttcttgctacacaggatggtgactggaactaaggctacacagagggtcgcacttggactctgagggttgggtgtggaagggggaaaaggggatggagacctgctccccagctcttcctgtcagccggtttacatgggaacagggttaacatctgtgttaggggaggtcaccttaccctttttcataggggaagagtgtcacactcctggctatctcagggggaatggggaaaagaatctttcaagggcaaagaactcgtgggaggatgtctgttgtatgtaatactcacaatggcttttggttagtgttgaaggtgggaagagcatttgtaggtccagaagagtgaaagagagggaggggtgcagcaacatgtgcacaggcacgcacatgtgtgcacgcacacatacaatctgggttatctttgtgctatatagtggattataattctgtgaaaccaagtttgtatattgaattacattaaggagtgttctttaaaaagagaaataaatatacaattacatgcttaaaaaaaaaattgaggatgatagaccgtaacattcgactannnnnnn

SEQ ID NO: 24564 - DNA, 2886 bp, Homo sapiens
  misc_feature 95, 137: n = A,T,C or G
cgtcatggggacctatggggatctcttgggttctactggtacagcatcagcctcaggtaggatctatatgattggaacctgtgtgtagagcttantgagtattctgactcctgctctcccaaagcagtcaaacttcntcatatctatggcagatattccaaagaagagagccttcccctcctgcagaaagagcggacacttccttattactggtatgaggtcctgaacccagaaggatttgtactccctcctatgaccagacaggcagcgtgtctaactctttctaaggatcagtgggcctttacctagttcctagggatgggaagaagtgtcgttacctcctgccagaagtaaatagatgttgctcctactcctctcccggaagtgatgaaggtgagagaatttgctgactccttccaataaagattttgatttatgagagaaagattcaatgaagtgggtggcgtttcacacctgttgtctattttatataaagtggttttttattaatgaaacatttcattgcattaagggtagaaataaacatgtcaagaaccgcatgaagtgaaccaactgtataagctacatgaagagcattctggtcagtattcttgttaacaggcacaagcaatttagtgataatgtccagagggccaaggatgcggaccaccttttgcagaactcatatctcgagcagtttaaattaaaaattagcctcccttaagttaaaaaccccaataggggttagtcgtgtagtgcttgttccacttgaccattagtgatctttctagaacatgaggaaatcaagtctggttagaaaagcctggagctaaaagtggcaaagcccatttcctgtcctgtgctcaactcctaattttccctgagagaagtgagttaagctctctgtcttggtttcttcctctctaagttgaggatcatggtaccagaagcttgcattctgtgatcatgacagtgcttacaatcacaaagcctttgggggtctttctaagataactgccgcaagaaaatgagcatgagaaataattcatcttcaacttaaagccaaataggtgcattcattcctcttaatctataattttgactgtagtttgtagatctgtctcagacttttcagaaggatagtatcaaatgtgatttaaaccaagtaactattaagaatcataaaacaggccaggcccggtggcttacgcctgtaatcccagcactttgggaggctgaggtgggcagatcgcagggtcaggagattgagaccatcctggccaacatggtgaaaccccgtctccactaaaaatacaaaatttagctgggcgtggtggcacgcacctgtagtcccagctacttgggtggctgaggcaggagaattgcttgaacccgggaggcagaggttgcagtgagccgagatcatgccactgtactccagcctggcgacagagtgagactctctcaaaaaaaaaagaatcatgacacaagtatggaagtaatgtttttggtctccctgccagtgtgcaactcagtctaaatgtgtatatcattaactgttatcatttacagtatttaaaatatcctcctcacagatgattatatcctgataataggactaaaccaataagtatgcactagcattgtcaattttattagtatggataagtacatgcataattaagacatgcccaattatctagttaaatgttgataaattctaaaaatgtagatatttagcattattgaagaccaaatatttttgttagtttttttacattttggtgagttggagtatctaaaggttctatcttgattctatagaaaatttgagagtttaatgaattgcctcttcaagaggggaaatatatcacatattgttttagtgtagaaaaaggaaaaattgtcagtaaaacaatttattacctcaatacagggataagaagctatggaaatgaaatctatatttttttcttcatttgcttacattgaaatccagttttaaacaaaaaaaatccttttgaatggttcagttgttaagaaattctataagcactttgtcagctaaatgtataggcttctcaattcaaaatgaatgctgaactttgagaatcaaagaaaatgcccttaaatatgcttgaattctgaacactgtgacatatgatggctcccaattccctgtcttaggttatgctgaaaccaagaagtcctttgaaaagtggtgtctctgcttctggtcctaacagacctttctttaaagtactttgtgcaatattttaaacatccatcattctgtcagcaaaatgattgtcacaggaagtatagggcacacgtttctctattcagtgagtgacagtgagctacaaaacactggaaagaactgaaactgaggaaggaacttgtaaaaagaacttcaaaattaccaagaagaaggctgtcccagaagaaatatctctttagtctaatcagactttctgaaacttatgtgtaacttaggctgtagatagatggatttcccatattcataattttacaaataatcactcaatattagattaattaatacagtaacatatttggcaagggcgactcaggaagaaaaatcagttactcattacattctctcagaagcatcttttcgtagcatgatcattttgactaaaaaaaaacagttaactatccacaagcatcataactagcaattaattctacatgaaatatctgtactttatcctcaccaacattatttatgcattctcttcgttcacaaaagtacaagttaaaaatccttaggagcttatcactatcaactcatgggtattgccccacccaacccctttcccatttgattctacccagtattttattgcagtggcggacgcgtgg

SEQ ID NO: 24565 - DNA, 689 bp, Homo sapiens; identical to SEQ ID NO: 21367
  misc_feature 1, 2: n = A,T,C or G

SEQ ID NO: 24566 - DNA, 206 bp, Homo sapiens
aggtacgcggggagaagtggtgaaggtaaggcttggattcaattacagtaatctcagaagttcttggtagaagaggggcacagaatcccagcctccattttgcagatcacagaactgtgtggtgcaaagcgggttggttattttggtccaacacagttttacattgccctgaaattaattgctgcagcacaatctggcctcccggt

SEQ ID NO: 24567 - DNA, 2438 bp, Homo sapiens
  misc_feature 1, 2, 3, 4, 5, 6, 7, 2411, 2412, 2413, 2414, 2415, 2416,2417, 2418, 2419, 2420, 2421, 2422, 2423, 2424, 2425, 2426,2427, 2428, 2429, 2430, 2431, 2432, 2433, 2434, 2435, 2436,2437, 2438: n = A,T,C or G
nnnnnnncaggaggacagtttacggaagtgtaacgttgaggcccttcttgtgtatctggagaaaatagaggttctgactcctcaggagcaaaaaacataacctgaagagggaggaagtggatttggggttcaccatttcttggggcacacttgattgaaaactgagacttctgaagagaaggccagaagatacaaagacagaccatcccagttgaatgctgtcttccaagaacagaagaaaatgatccaggcccaggaatccataacactggaggatgtggctgtggacttcacttgggaggagtggcaactcctgggcgctgctcagaaggacctgtaccgggacgtgatgttggagaactacagcaacctggtggcagtggggtatcaagccagcaaaccggatgcactcttcaagttggaacaaggagaacaactgtggacaattgaagatggaatccacagtggagcctgttcagacatatggaaagttgatcatgtgctggagcgcttgcagagtgaaagcctggtgaacagaaggaaaccatgtcatgaacatgatgcatttgaaaatattgttcattgcagcaaaagtcagtttctgttagggcaaaatcatgatatatttgacttacgtggaaaaagtttgaaatccaatttaactttagttaaccagagcaaaggctatgaaataaagaactctgttgagtttactggaaatggggactcctttcttcatgctaaccatgaacgacttcatactgcaattaaattccctgcaagtcaaaaactcatcagcactaagtcccaattcatcagtcccaagcatcagaaaacacgaaaattagagaagcatcatgtgtgcagtgaatgtgggaaagccttcatcaagaagtcttggctaactgatcaccaggtaatgcatacaggagagaaaccccacagatgcagtctatgtgagaaagccttctccagaaagttcatgcttactgaacatcagcgaactcatacaggagaaaaaccttatgaatgccctgaatgtggcaaagcctttctcaagaaatcacggctcaacatacatcagaaaacacataccggagagaaaccctatatatgcagtgaatgtggaaaaggcttcatccagaaaggaaatctcattgtacaccagcgaattcatacaggtgagaaaccttatatatgcaatgaatgtggaaaaggcttcattcagaagacgtgtctcatagcacatcagagatttcacacaggaaagacgccctttgtgtgcagtgaatgtggaaaatcctgttctcagaaatcaggtctcattaaacatcaaagaattcacacaggagagaaaccctttgaatgtagtgaatgtgggaaagcctttagcacaaagcaaaagctcattgtccatcaaaggactcatacaggagagagaccctatggctgtaacgagtgtgggaaagcgtttgcgtatatgtcgtgtctggttaagcataagagaatacacacaagggagaaacaagaggcagccaaggtggaaaatcctcctgcagagaggcacagctcattacacaccagtgatgtcatgcaggagaaaaactctgctaacggggcgactacacaagtgccttctgtggcccctcagacatcattaaacatcagcggcctcctcgcaaacaggaacgtagtccttgtgggacagccagtggtcagatgtgcagcctcaggagataacagaggatttgcacaggacagaaaccttgtgaatgcagtgaatgtggttgtgccttccgtgatcaattatgtcttattttatgttacagaaaacccataggaagaaaactcagatctatgtggaaaagggttgagcaaaaatttgtagttcattatgtggccgaaaagcatacactgagagaacatgtataaggctgagatagcctgataaactcatcctattaaaatgtatgctgtgatacacaggcaaatttgatgttaacctaagcacatacacagcaattgctcgactgtgtcaattaaatgagtaaaggaagcccaagtacttttaagtggaggaaatgaagtactgtgaatttttaaaacagatgagataattggtgttgggagtgttgcagtgactgaaaagcttcataaggggcagttggtgggaaagggctaatactgtaatggtggaatgtgggacacatatgtgtcaattcagtttccttagaccagtgccagtgtggaggattaattgaaaaccaggaccataaactttcagaactttgtattatgcagagggatctgtgaaactagtcaatttgtttcattaaacaaatattttaaaattaacaaaaaaaaaaaaaaaaaaaaaaaaaataaaaaaaacacaaaaaaaaaaaaaacannnnnnnnnnnnnnnnnnnnnnnnnnnn

SEQ ID NO: 24568 - DNA, 1019 bp, Homo sapiens
agggagtcgacccacgcgtccgcttggtaatggcgacgggtttggtaagtaggaaagtttcggttgaggagtaagagctgccgcgggagcagtaacccgcgcgggggaggccgacgtcggtcggagagggggtacgagagctgctggtggtgttgtcgtggccggagcggcccgcgcctgggctgccggcacttcgcggcagtcagagcaccataacatggtgtgggaagtgaagacaaatcagatgcctaatgcagtacagaaactcctgttggtgatggacaagagagcctcaggaatgaatgactcattggagttgctgcagtgtaatgagaatttgccatcttcacctggatataactcctgtgatgaacacatggagcttgatgaccttcctgaacttcaggcagttcaaagtgatcctacccaatctggcatgtaccagctgagttcagatgtttcacatcaagaatacccaagatcatcttggaaccaaaatacctcagacataccagaaactacttaccgtgaaaatgaggtggactggctaacagaatggcaaatatcgcgaccagtccacaaagtccactgatgcagtgctcattttacaatagatcatctcctgtacacatcatagccactagcaaaagtttacattcctatgcacgccctccaccagtgtcctcttcttcgaagagtgaaccagctttcctcatcacatggaatgagggaagacagtagactggaagggaattgtgagtccgaatctggatgtctggatgtctcctgtcgaagatgatagtggggaggggaatgctgggctcatgttgggcggtggtgtgaaaggacgatgggttataggaagcagaggaggggagagtgtaatagagaggagagggatagagagaacattaggggcacgggggcgggagggtgcaaaagtgtgaggagaatgcggtgagagatgagtgactataagatagtgaggtgtgtgttcatatatatattgtgtgtgttat

SEQ ID NO: 24569 - DNA, 4515 bp, Homo sapiens; identical to SEQ ID NO: 20660

SEQ ID NO: 24570 - DNA, 948 bp, Homo sapiens
  misc_feature 1, 2, 604, 654, 936, 937, 938, 939, 940, 941, 942, 943, 944,945, 946, 947, 948: n = A,T,C or G
nnaaatttttaaatttagggaaaacatataacttcaaataacatagcattggattaattattttaaaaataaactatagaggaaataacaattgttggtttctggttggtaacctctattaaaacaagttaactccattggaaaatatcttttttcttaataagaatcaattccatgtttttcaaaatgtaaataatctttcaatgcttatcattacaggtacataatagaattatactatctatagtaaagatttaggttgatattttattctatatgaggatggttgggatttaagtgttaattcctttaaaacaacgtctgtttatttagttgttaattaaaatatgtgagaaatggcccctctctcatagacacattcacaaatgtaagaggaacattttaaacttatccgattctattttgaagcaaataaaaattgagataaataaaatgcattcattaaggtaccagcccggcccgccgcccaaaaatacatggatctggtcatgttgaagaaccagcatcaccactagcagcatatccaagaaactccccccctagaaagaaaccccccagcaagcccttataaataggaagaggncctaaaccccctgtgtgcccctgtcaagtatgaaaaaagatgaagtaggnccttcctcccagcagatggcaaacccaagccttagccctcccatgaagaagaggggtcccagtgggtctgagcaaaagcagggagaaggttttaaggtgaaaacgaagaaagaaatccggcatgtggaaaagaagagccactcgtaacagcgaacggtcagtcaaggatcataagtttttactgccagtattgagaaattcgtggaagaaatgtcagcaggaagtaaaaattcaccgagaagtgtgtgtgtgttcgctgcttccacacattaatggcatgannnnnnnnnnnnn

SEQ ID NO: 24571 - DNA, 859 bp, Homo sapiens; identical to SEQ ID NO: 24383
  misc_feature 1: n = A,T,C or G

SEQ ID NO: 24572 - DNA, 1650 bp, Homo sapiens; identical to SEQ ID NO: 23941
  misc_feature 1, 2, 3, 4, 5: n = A,T,C or G

SEQ ID NO: 24573 - DNA, 2944 bp, Homo sapiens
  misc_feature 1, 2, 3, 2940, 2941, 2942, 2943, 2944: n = A,T,C or G
nnncaaggtgggggcccgcagccggcgcccgccccggacccgattccgactccccgcgcaatcaccgcgggcgccgagcccccggcggggctccgggggccggccaccagggaccaatctcggtccccgtcaccaagtctcaaggccgccaactcttctggggcaagagaagccatctcccaaaactgcgcatgcccacccccacccgtggacgcccgggtagctccagcttacccctggtttatcagcatagcccagcaaagcccttgcttttcctcatctggtgtcataaattttcattcccagtagattacaccagtagttcaaggactttttgaagatcagacactgctagagttacttttaatacaggatctgactgaggcagactgcgattctgcaaatagaacttatatcctcccggggcctcggtttcaaaaacaccttctgcaacttccgtcagtggccactccagcttcctggcgttgctgacagcctggctagaagcgagcgtgattcccataaagtcattgccaagcttgtagtctccgacgccataattgtaagtcagttctgcgacaaatgatcatcctcaggcccaaatcccaccattgttttactccatttcccatcataaggcccattacaggcagctttgcagccttcttcaaattcctcatgccgcagaaccttcatccccaggacgtcccgatagaaacgcgccgtctggaagcggtttcccactttgaatacgaagtgcagagctctgcgagcagccatgattcccgcccctcgctgatcctttttaagaagatttattcctctatgatggagaagtatgaaaaaattgggaaaattggagaaggatcctatggagttgttttcaaatgtagaaacagggacacgggtcagattgtggccatcaagaagtttctggaatcagaagatgaccctgtcataaagaaaattgcccttcgggaaatccgaatgctcaagcaactcaagcatcccaaccttgttaacctcctggaagtcttcaggaggaaacggaggcttcacctggtgtttgaatattgtgaccacacagttctccatgagttggacagataccaaagaggggtaccagaacatctcgtgaagagcataacttggcagacactgcaagctgtaaatttttgccataaacacaattgcatacatagagacgtgaagccagaaaatatcctcatcacgaaacattccgtgattaagctttgtgactttggatttgctcggcttttgactggaccgagtgactactatacagactacgtggctaccaggtggtaccgctcccctgagctgctggtgggggacacgcagtacggccccccggtggatgtttgggcaattggctgtgtctttgctgagctgctgtcaggagtgcctctgtggccaggaaaatcggatgtggatcagctgtatctgattaggaagaccttgggggatctcattcctaggcaccagcaagtgtttagcacgaatcagtacttcagtggagtgaaaattccagaccctgaagatatggaaccacttgaattaaaattcccaaacatctcttatcctgccctggggctcctaaagggctgtctccacatggaccctactgaaaggctgacatgtgaacagctgttgcatcacccatattttgaaaacatcagagaaatagaggatttggcaaaagaacacgacaaaccaacaaggaagaccctaagaaagagccgaaagcaccactgctttacagaaacatccaagttgcagtacctaccccagctaactggcagcagcatccttccagctttggataataagaagtactactgtgataccaagaaacttaactaccgttttccaaacatttaaaggagctaaggagagatgattttaaaaaaggaatcaatagatgctttgaagaaaataaaacttatacagttgattgaaaacaattacaatgttgaaaacacaccaggagaaaacataagcaagaaactgggaggccaactggcaagatatgaagggaaattccagatccagtcttccatgcttgatgatggtgtccagaaaagaaaaaacctgtttggagttgcacttgtatttcagtttatgtaagtagccgaacttatggacagaatatgaactgtcccatacctctggcaaaactagatgatatcaaaaagatttatgcttcagttgtaccacatgccacacaagaaaaatgaaccacaaaatgcccatatatatttcctcggatctctgttgcctgagtcctatctcctgcctctcagattgtttcagcatcatatttaagatagttctatttcttgaaatcaaaatgtttaaaatcccatttcctgcttgctctatttcttgatttttatattttaaaacattttgagggtaacacttaggttcaaaatatttaaaagcatatgaattatcacaaaagcttggtaatttataatttaattatatgtttccacatttcatccttactttatcagtaaaggctacaccttagtcacttttgcaggcaacgtggatttactgtaatctgtctacatttattcacccaattccacttgtaaacaatggcatggagctcggcagctggttaaggcagtcaaagggtagagcaagacctacaggctttgcaggaactgaacctatcagcctgaaaataattagtatttcattctctctggcacagctttgacctggtacatatataggcaaacctgtaattcagtgatctgggtttcagaagaaattacttgtgagcttttacttgagtcatgaaagacattatgttgtaaactgatgttttccctgaaacatctttttgcactatgtttgtatgtgtatgtatgtgtatgtatatatatatatatatatatatgctannnnn

SEQ ID NO: 24574 - DNA, 2159 bp, Homo sapiens
  misc_feature 1, 2, 2153, 2154, 2155, 2156, 2157, 2158, 2159: n = A,T,C or G
nncatacaaacccaacataccaacgtaatcctctaaaatccccaccactaatcagtcccagctaataaatcgcatccacccgcaataggcaccttgtaccctgaagaattatagaataataaagcttctcagaattttatttgtaagatttttgagactgttgaatcatggtgactactagaaagactgtatcaaggtgtagtgacttcaaggacagaaaaaaataaattaagtattgatcataatttcaaaacaatcaatatcccgctaagtatgaaacaaaagagaatgcacattttgtgttaattttcatgataaaagggacacgggtaaaaacctgatatttcacttatattgcataacaagctaaccaaactggacatggtggataaattataaaacaaatcattttacttatttctatgatttttctttcaattaggtctttcaaataggactgaggtatagtacactggcaaaaataaagaggcaaacaagaatagtgccaaagtaacagatacccaaaaccaaataccatgtcagaaaatatcatatagtaaccatttatcagattagagcagcagaagaaagttacttctaaatcataatcattttagtggtatttgtcaacttcgccacggtaacttcataacatcattcttcatttgtgaagtagtaaaattcatgtcaaaaaggaagaggggaatggaggaagtcagttagttcattccaataaattacctctccagttcttataaacatgcccatcagcacaaaatcgagaaataatacctaagactagaagagacttggtttaagttatgaagcaaattaaatggaaaaatacaagaaaatagaaccaatggggttgaaaaagcccctcactgaaaatctgtattaaaaaaaataaaattaataaaaataaaaatagaaacaaaactctactagtacaaactagcctgagtggtttgatggacagagtgattgggtcaattgtcactgtacttccataaacggattttctccattcatgttaaagtagcacatgaatgtaagctctttaaggactattttcataggacccaaatagttactgtatatcctataaataaaaaatattttactttgataactgactgagtatgtggggactccatgtaatccaaccacatggttgtttgctgtatagtcctgtgcaaatataaaaaaaaattttttttgctataaggctttgaccctacagttttcacagcaacataactactatccagcatgtaccatattttgcaagccttcaagttcaacaatccaaattgtcgattcatattaggtccaaatgcagcatccttgaggagtatagtaggtcagttaatcatctagagacatacaaacttctcctgattcatcccatcgagagggatcattctgatcttctccatcatcaactagctcttcatcagcttctcctacttcattctcctcgtattcttcatcccgagggaattctgtatcctgtccctgatctacaccttcttgccctcctggctgtgatttatctgcacagtctacacaaacaccataacgtcgagatccatgtcttattccaacactggctgctaacatgaagatcttcttacacaccatacatttgtattttttatcctttttatgcaccagggaatgtctttttacatgttctcttcgagtaaacagttttccacaaatatcacagctaaatgatctcactcctgtgtgaatgagcaagtgcctttttagtgttcgtctgtatttggctacatagctacaatgagggcattttaacttgttcatgattagagatgattcaccattttcccaggtttcttgttttggccaagattctggcaataatccatacttgaaatcatttgaagcaccaggcatcaaaccatacttgaaatcatgtgaagtaccagcatcacctccatcttgactagtgccagcttcagccaataaatttgcattcacattcctatcaccatctggccccgagagtagagcaccatctaaatctggttcttccttgatgagtagtgtattttcttctggataggcaacaggtggctgcattactgagcaatcttctaaattcgtttcattattaggtggaatannnnnnn

SEQ ID NO: 24575 - DNA, 237 bp, Homo sapiens
actgcatgtgtaaccctccaaaacgtctcaaatccatccctgtgactgacttctgtcctagttcagaccctcatctcttcacatcattactggactccttcactccagttttaatctctttggatccatctcccatgccgctgccagatcaacgtatcaagaagcatgtttcttagcaatagttaagtcagccggtctataatttctgtataataaatgtatcaggagctgagaggt

SEQ ID NO: 24576 - DNA, 816 bp, Homo sapiens; identical to SEQ ID NO: 21390

SEQ ID NO: 24577 - DNA, 498 bp, Homo sapiens; identical to SEQ ID NO: 21110

SEQ ID NO: 24578 - DNA, 318 bp, Homo sapiens
  misc_feature 315, 316, 317, 318: n = A,T,C or G
acagatgtccagtagacctactggatatgcaggcctgcagctcaggggagagctgggttaagaaccgtcaaggcagtaatcatctgcatttagatggcgagtgaagccatgacaggggctgaaatggcccagcaagaataaatcaaaccatgagaaacacatacatttaagaataaggagatgtggtcaggcgcggtggctcacacctgtaatcccagcactttgggaggccgaggcgggtcgagcggccgcccgggcaggtactcattagccagctcctcggactccccagcagcattgatgtcgttcttcacnnnn

SEQ ID NO: 24579 - DNA, 2224 bp, Homo sapiens; identical to SEQ ID NO: 21832
  misc_feature 1, 2, 3, 4, 5, 6, 2220, 2221, 2222, 2223, 2224: n = A,T,C or G

SEQ ID NO: 24580 - DNA, 296 bp, Homo sapiens
actgcggcgggtaggcctaggattgtgggggcaatgaatgaagcgaacagattttcgttcattttggttctcagggtttgttataattttttatttttatcccgcgtacaataaagcctgaaatagccaactaattgaatgttattcttaatcctttacactggcactaaaaatagttcatctgtaataagcatgaatacgaccatgtaataattaatggcactaattgaaaaggaataaaaaaatctaaccaccatagcaaaataaggggtttaagtattattaatagccctggt

SEQ ID NO: 24581 - DNA, 1120 bp, Homo sapiens; identical to SEQ ID NO: 22234
  misc_feature 1, 1119, 1120: n = A,T,C or G

SEQ ID NO: 24582 - DNA, 3918 bp, Homo sapiens; identical to SEQ ID NO: 22949
  misc_feature 3915, 3916, 3917, 3918: n = A,T,C or G

SEQ ID NO: 24583 - DNA, 2841 bp, Homo sapiens; identical to SEQ ID NO: 21617

SEQ ID NO: 24584 - DNA, 611 bp, Homo sapiens
  misc_feature 596, 597, 598, 599, 600, 601, 602, 603, 604, 605, 606, 607,608, 609, 610, 611: n = A,T,C or G
acagaaagatttatcacccacaagcattgtgaatgcacctgggattcaaaactaattttgacgaaagccccatggcctgttagatctgcttcatatacaagacatagaaggcagcgtgatgcatacagtgcatttatggatcgtgtgggagaaaaagtttacaaagatatgcaagagcagatagctgagggaccaaaacagcatagggcttcctgaactctggcctgaatgttcatctcccgtgcatttcccagtgagaacattgatgaattctggcaccttcctggattctacagaaatctgcactctcccagaggcatgagaaagtgctaaaacaacaaatgaaagttgcataatttgaaattcccttgttaccacagggatcagaatccaatcataaggcttttgatttagtttgtgaaagttagatcttgcaactatgagtggaaatgctgataatgtgctttctgttaatgtctaaagttaaagatgctctagtctcagttttttctaatacactttaagaagcttctctgagacactcaagtttatcaaaagagagaagatctccaagtaacagaaataataaatgtccnnnnnnnnnnnnnnnn

SEQ ID NO: 24585 - DNA, 508 bp, Homo sapiens; identical to SEQ ID NO: 21293
  misc_feature 502, 503, 504, 505, 506, 507, 508: n = A,T,C or G

SEQ ID NO: 24586 - DNA, 1326 bp, Homo sapiens
  misc_feature 1, 2, 3, 1299, 1325, 1326: n = A,T,C or G
nnnctggaactccgggtctcgtcttcactgctctgtgtcctctgctcctagaggcccagcctctggtcctgtgacctgcaggtattgggaatccacagctaagacgccgggacaccctggaagcctagaaatggacaacctgaggtatggagtgtatcctgtcaagggggcagtggataccctggggctgagaggaatcttctggagtactcttatttgaaaaggggccgttgacatttagggatgtggtcatagaattctctcaggaggagtggcaatgcctggacactgctcagcaagatttgtataggaaagtgatgttagagaacttcagaaacctggtgttcttgggtatgatgtctctaagccagatctgatcacctgtctggagcaaggaaagagatccctggaatatgaagagacacagtatggtagccacacccccaggcatattcttggtggtacgtggggggattacataaaacctttaagagatacaatgtatttcagtctagttaaaaatgaactttgtgttgcatgcaaaaattttttctcattacatatggtcctcagattggttcttgatgttgctaattatatttgtatatgtatatttattaaccatgtttaataatgatttctatgcctttatctttcaaattttggggattaattaaaaatttcttctgtgccattatgataatgctaagaaatgtatttttgtgtatgtgcgtatctttcccagaaaataatgtgttttaatatgattttgtgttgctttgttaaatcatcttattttcattggaagcaactgttttcagcaccttttatatgtaaggaagtaccaatataactttttaaatatttggttattttttgaagtttgttttctttttatttagcaggacagatttggtgatggtattatactcacttgataactattttcttcagatttcactatatcacacagttttcttctgtcctgaaaaatttttgttgagaatccactggctatctcataagagtattcttgcaaataatatcactttttttttttttttttttgagatggagtttcactgttgttccccacgccggagtgaaatggcgcgatttcacctcgctgtgtcccaggttcaagcagttctcctacctcagcctcccgagtagctgggattaccggcatatgccaccacacccagctaagtttgtatttttagtagagacagggtttctccatgttggtcaggctagtctcgatctcctgacctcaggtgattcacccacctcagcttnccaaagtgccgggatacaagcttgann

SEQ ID NO: 24587 - DNA, 196 bp, Homo sapiens
agtgtttctggggactactctggcaccttgaggaggagccaatctgacaggaccgaatacaaccagaaattacaagtgaatcaatttagtgaatccaaatgactttgtccaggtcacagaggaagtgggtgtcattgccagaactgaactctatgcctccatgtccaaaaaaattccactacatagaacatgatgt

SEQ ID NO: 24588 - DNA, 1425 bp, Homo sapiens; identical to SEQ ID NO: 22240
  misc_feature 1, 1425: n = A,T,C or G

SEQ ID NO: 24589 - DNA, 354 bp, Homo sapiens; identical to SEQ ID NO: 24523

SEQ ID NO: 24590 - DNA, 2224 bp, Homo sapiens; identical to SEQ ID NO: 21832
  misc_feature 1, 2, 3, 4, 5, 6, 2220, 2221, 2222, 2223, 2224: n = A,T,C or G

SEQ ID NO: 24591 - DNA, 1120 bp, Homo sapiens; identical to SEQ ID NO: 22234
  misc_feature 1, 1119, 1120: n = A,T,C or G

SEQ ID NO: 24592 - DNA, 3092 bp, Homo sapiens
  misc_feature 3043, 3067, 3085, 3086, 3087, 3088, 3089, 3090, 3091, 3092: n = A,T,C or G
atacgactcactatagggaatttggccctcgaggccaagaattcggcacgagagcaataaactcaccaactacgtgtggtattttgaaggaatctgtttctcaggcatcttgatgcttatagtagcaacagttcttctggtactggagaatactcacaactataaatgttgccagagtgaaaactgaagcaaaaaatatgtgaacactgctgtcaattatcttttcttccctcggaatttgctttttctggatactgcctggtcatctctgccttgggttcttgtccaggggccattatgcccgcacccttgatggctgggagtatgcttttgaaggcactgctggacgtttccttacagattctagcatatggatgcagtgcctggaacctgcacatgttgtggagtggaacatcattttattttccattctcataaccctcagtgggcttcaagtgatcatctgcctcatcagagtagtcatgcaactatccaagatactgtgtggaagctattcagtgatcttccagcctggaatcatttgaataaggacaaaatgttttccattatcaagacatggccatctatctaaatattatatcaactgtgtagacttgagggcaatattgaaatgatggtgctttctgcatttggtgtttatttgtaaaaaatttgcagtcctcactgcacatgcaagtataccacccttccatttagtatgttttttaagtaatatgcatcagaaacttcagaaatacttctgccctttgatcaaacaaatccatttccaagaatctgtactagggaagtaaataagaatatgagagaaacctttatgcaaatatgtatattgcaacattatttaatattctggaaaattggaaacaccccaaaattctaaactcagaggaaggattaagtaaagagtggtacatactgtaaatgttttctgatattaaaaaaaaaattaaataaaaaataaagagtactacatggttgtaaaattacagtcattacaaatgatgtttttaaaattatgaataatgctacatcaaaaagcaggttacaaattcatgtttactatataactatttaaagcaaatgaaacactaatagtcaaagtttaggatgaaaactaaatctaaaaggaaatataacaaaatgccaattatgcttggtttggggcattgatgacccttcttcccacttttctatattttccaagatttctttattgaatatgttttactataaatattttctaaactcatattttcactattaaaatttttttatttttccaaactttaaggcatatgctctttccacattcctcaacattatttgcaaacatcatgaaatgacacttccatcaacattcaatgaggaaagtagcgctatagatgagccacaaagagttttatataaacttatacaatctaaactctggctcttcctttctgactcctgagggtgagtgtgatggactagaagaggtagccttaaaataagtgagcagctagggaacatgctcaatgggcaagagaaaatgaccactgaccagtcaatacctgtgtcagggggagttaccactacctatatttatttttaaagtaattaaaaagtagaacacttacaaattttccacctatacatgccatgtcttcctcggggacagtagccacatcttatatatttcccaccatgcataggacccagcacacagtgaagccagtaggcactcagtgttgaatgctcataccaggttttctgcttcctgtagttaccctgctgagcactgcttccatcacaggtgcactgggcctcaacacttctgccatttccccatttgtctcctccatggacactgtcaacaatggtctgtcaacacctgctctgtgccaaagccagggagtaggctggggggatacggaagagaatatctttctccttgatgcctgctgtgccaacagccccctttaagccttgttcacagcctttgctgaaacaagcatcttgaaagcaagccatgttatacaccgcatgaccttcatgctctgggcccagctgactgaactggggcaggccccagagtcatgggcagcctattgtcttgctaatggcctctgacttagcctggagtaaaacactgtccaaacaagactggtggttattcaagcataagaatttgaactaggaagccaagaatgaagcaaccggaccattaccatcaaaaaatgattaaaggatgaagaaggaagccaacattcagagagtatctggttcatgttaataatggtatcatattaaaaggaagatacatgaacttctactccaaaagctcctaaaactgcctttgcccacaatgaacagtgtaccctaggcctggtttctgttcttggattcctagatagtctttcttctttgtcactgtgctgatcatttcagtaaaccccccactaaatcagtgcagctctgtttattgcaactaaaacgatccaaatgaagtctcccttttctagatgttgggttggagggatgctaagacaaagatgcttaggctccagagttttacagagcttcattcaataacactctactttccaaagaacttaaatatgaggtctgaaggacttggaccaagaggcaaacccaagctacagacaccatgttgtactcagagtgacctctcccctctgacagcccaggatttctctatcaagtccataagctagtcatatctaggaccatcttgttaaaaattctctcaaagtctcctcagccctcttgtaaacagacttctggaaggtccacttcatcagtttgttatatactttcagactgtctatctcttgtttagattcagcatggcaccgtacgttgaatggactgttaatagatgtttgctgaatgactccaccacagcattggacacatcaggggtacagccaaatgcagcatgatacctctatcaggaaaattaaattttaacacagccaccaaatattctatatttgaagagtatatgctaatcatgcaattntaagtaaaaaaaagctgaatacanaaaaagctgaatatgtgnnnnnnnn

SEQ ID NO: 24593 - DNA, 1086 bp, Homo sapiens
  misc_feature 1043, 1048, 1062: n = A,T,C or G
gcccagagtttatttccaaatgagacactaaatttaaatagttttgagatttgatttcagcagaggcacacaaactcttaaaaacgagttattgtctgacattttgttttttctctaacttgaaaaataggtcacggtctagatcacattctcgatccagaggaaggcgatactctcgctcacgcagcaggagcaggggacgaaggtcaaggtcagcatctcctcgacgatcaagatctatctctcttcgtagatcaagatcagcttcactcagaagatctaggtctggttctataaaaggatcgaggtatttccagtatgtaacactttttttccttacttgtgtttggattgttcacatcttatcagtagagtgtcttaaggacataattcaaatggattgcttcagggaatatttgagatgtaaaagtttggaatttatgtgtaacttgtaacataaatattaacctagttttacagatgaagaaaagggctactagagattttaaggcttgttaggccgtgtggtagacaagggtcccaagcaatacagttctactcaacactctgggtaggcatgttgctataaacttttctggcttcagattggatgatactagctctgaaagatggtaattgattttcccgacaaaaaggcctattagcaccaggaaaagagatcagaagcaagtagaaacatttctcatttttggaatgatggggttgatttgagacactggaaagttgactagggcagtagtgtgtacacagaaatgaatgtggattattttttttagaccgtttcagacctgaaaaaactaaagaaccagagctttactatttgtagaaggccttaaaaggagatagaatggaaaaaattgtaaaataagtattgcaacatgtaattaacaatattgttatctgtaccaacgataaaaccgtggtacggcaatgctactgggagttaaagtgctggctaataggcacaaaacctttaaatgcagggaattctggaatcttgtggggctatttgggggaagctntgggnccatctctttaggntaaattttaaaagggtagggtatg

SEQ ID NO: 24594 - DNA, 1321 bp, Homo sapiens; identical to SEQ ID NO: 24513
  misc_feature 339, 340, 341, 342, 343, 344, 345, 461, 462, 463, 464, 465,466, 467, 468, 469, 470, 471, 472, 473, 474, 475, 476, 477,478, 479, 480, 481, 482, 483, 484, 485, 486, 487, 488, 489,490, 491, 492, 493, 494, 495, 496, 1217, 1218, 1219: n = A,T,C or G
  misc_feature 1220, 1221, 1222, 1223, 1224, 1225, 1226, 1227, 1228, 1229,1230, 1231, 1232, 1233, 1234, 1235, 1236, 1237, 1238, 1239,1240, 1241, 1242, 1243, 1244, 1245, 1246, 1247, 1248, 1249,1250, 1251, 1252, 1253, 1254, 1255, 1256, 1257, 1258: n = A,T,C or G
  misc_feature 1259, 1260, 1261, 1262, 1263, 1264, 1265, 1321: n = A,T,C or G

SEQ ID NO: 24595 - DNA, 420 bp, Homo sapiens; identical to SEQ ID NO: 21659
  misc_feature 1, 2, 3, 4: n = A,T,C or G

SEQ ID NO: 24596 - DNA, 2139 bp, Homo sapiens
  misc_feature 1, 2, 3, 4, 5, 6, 226, 227, 228, 229, 230, 231, 232, 233,234, 235, 236, 237, 238, 239, 240, 241, 242, 243, 244, 245,246, 2134, 2135, 2136, 2137, 2138, 2139: n = A,T,C or G
nnnnnncccccccttttaaaaaccctttttgggtttgggccacccccccttaaaagccggggaaaaaaagggttttttttggaaaattgggagccaaatccttttttggggccccttttaaaggccaaaaaccaggtttcccccccccatgggcttttttttttttttccggttcaaggggaatgtgggggggttttttttttaaaaaatttaaagggcccccccnnnnnnnnnnnnnnnnnnnnntttttttttttttttttttttttttttttttttttttttttttttttccaggctggtctctgtggtttttattagtgtttcctgggacccatcaaacaaataaacatattttgaaaaatataattctttgacaaaacaggaatagcaggaatagtttgaatttaacatagcttaaagggaaagatttctgattttttttaaatagtagcaatagagttgtttccacaaattgtcaacccaggagccagatggaaagaaaaacaagaattatgcagataactacagaaagattaatcccaatttagttaaacttgtgaaggcttgtacgtttcagaggttcataagacacagtctcaacaggagttttttttaataaatgctctatctctagttccagaaactgaattccaagaagctacactgaggataattcagctctgatattgtgattactgtgatgttctttcattcatacagtaagtatctgcccaatacgtaactaccgagatctattgcttcctacataattagacaagctcctcacacatatgggcccatgccgtgcacatagcaggcactcaacaagtgtttgcttaactacagaagaataatataattgccttccttcttaactgttttacctttttctatacttgatatatttgaaaaacaacatgcttgcaaaactaaaatctaacatgcattactaactttatcaaaagatccctcagtatttttcaaaaaggaaaaaaataataaaaaccaatcccccaaatactaaaacttagaactgctttacacttaaatagcaatttacatcatattaacatattcataatcttcattggttaaaacaggtcaaaggtttattactggcttctcataccagataagtctcacagttcccaataaggcaacagaatcctcatccaacatatattgacttgtggaacccaacggcctgttttggtttcatttcagcgcaagtagaaggcaaaataaagagtctcacagtaaaatgttcatagtagataatatgtccttgaaggttgtgccgttgtgctcttattccactgaagaaatgattcacatcccaattatagatatggtctcccaatcagaggagtcttttagaagacattcattcattcattgaacaaatatgtgttgtgtacttgtcccatgctaggtaacaggaaaataatagtgattgataagacatagtccctgtcctcaaagagctaacagtctagcaaggcaggaactttgagaaaagaccaatgtgttcaaaggaaaactcacaacctgggtctcccttctcagatggcacattcaagaaactgttgcttatgcccctgggagccagagccttacttaagtcttaccaagtcaaatatctatcagcctcagatgatttgagcctggtaaagtcttagcaatagatttgctgcctcatgttcccatgaaaacctaataagagagagccctttcaactcaggcatacggggggtttaaggataacatgtttagtgaccatgtggacattcagcacaggtgagcttctcaagtgagagccatgtgtccccaaaagaaaggagggtttatccataagactttgctctccctttcaacactgtggtgggaagtactctgttaccaccccaagttggcatagctcgattactttaagttctccaagtcacgaacagcacatagaaaatgcagcaaactcaagtcaagacaatagagagatatgctgagaacttaatactcaagccttaatcaggcaccagatgccaagaaaccttcactctcaacaaacaacacaatccactaattatctgtagaattgttgtagttggtactcttcacattcacttactcctannnnnn

SEQ ID NO: 24597 - DNA, 398 bp, Homo sapiens
  misc_feature 398: n = A,T,C or G
ggccttgcctgcaactggcttcttcctgatgccccacctattcctcgcaaagcaaccttggaggcagtaatgcctggcacccagctcttcacagccatgtcagcgtcaggagtgacctcaaaggctctagagacggaatctcaccaggtgccggcaatggatacagatggaagcatccacagagcggccatccagacagtggaggaaaatctggatggattcctttctggtttgggagcggggaaggcttcctgagcaccatgcaaagccaagatcattgctctcactacttacaaactgaaatcttgtcgcttcctccgttcttcgttgcactggccaacgggacgcttagtctttcggcaacggggtgaaacctacattgtgcctgaaaaaacggn

SEQ ID NO: 24598 - DNA, 2538 bp, Homo sapiens; identical to SEQ ID NO: 20316
  misc_feature 2538: n = A,T,C or G

SEQ ID NO: 24599 - DNA, 1120 bp, Homo sapiens; identical to SEQ ID NO: 22234
  misc_feature 1, 1119, 1120: n = A,T,C or G

SEQ ID NO: 24600 - DNA, 1344 bp, Homo sapiens; identical to SEQ ID NO: 21726
  misc_feature 1: n = A,T,C or G

SEQ ID NO: 24601 - DNA, 2809 bp, Homo sapiens
  misc_feature 1, 55, 56, 57, 58, 59, 60, 61, 62, 63, 64, 65, 66, 67, 68,69, 70, 71, 72, 73, 74, 75, 76, 77, 78, 79, 80, 81, 82,83, 84, 85, 86, 87, 88, 89, 90, 91, 2781, 2782, 2783, 2784,2785, 2786, 2787, 2788, 2789, 2790, 2791, 2792, 2793, 2794: n = A,T,C or G
  misc_feature 2795, 2796, 2797, 2798, 2799, 2800, 2801, 2802, 2803, 2804,2805, 2806, 2807, 2808, 2809: n = A,T,C or G
nagggagtcgcccacgcgtccggacaatacagtatttttctaacaaggaaaagannnnnnnnnnnnnnnnnnnnnnnnnnnnnnnnnnnnncgtatttatatatacaaatttgtatatatgtaatgtatgtgtgtgtgtatacatataatttctccttttttttttttttgtaagaattgagacagggtgtcactatgttgtgtgggctggtctcaaaacacctgcctcaagtgatcctcccaccttggcctcccaaagtgctaggatttacaatgagccactgtgccagcttccaacaagaaaaatattaaataccacgcgtccgcacagtgaaacttaattcagtttagttgaaccatatatgtgtgtgtatggcatatataagatgaaaaaaggagaaaaagtaacaataataatgatggttgccatcattcattgaacacctataatgttttaggcattatactagctgatttacaaatattgtctcatttgatgctacgtttatatttctatgaggcagatgttgatttctctttgactgctgaagaaactgaaggtcggtcaggtcaggtgatttgcccaaagtccacactgtcactaaatgaacatagattggtatgactcccaagcctgtgagtttttgaccgtcatattctgcctcactatgaagttttttttcaatttttttttaatcaaaagaagtagtatatggagagagaggtgaaaatccatgtttgctctctgcagtttccaaaccattcatgacgtgttatttttgtactggatatagtcattttttaaaatgctacaaactgttcaaaagagcatgaacaacatgataactccttataattttgttgtaagataaatgactaaaattatgtgggatatttaatttggataagtggaaattctatcacttgataagctctcttgaagaataattatttgaaagattggacttaattctgtattgcctgaagtgtaaatcagaggtcaacaattagattgcaaatcatgaaaagcataacttctaattgtttagtctttttagggaaacaagcccagaaaaaaagtaagattctcattcattggagataagatttctatttatcaaagatactacacaagagttagatagcaagtagttcaaatgtcttttaaaggtatctgacatctttaaagctctgtaatttttaaattctaaattttgttacagctaatttttaaaaattaattgctaagtcatggtcaagtatttctgatgacttacatgctgtctttggtatattttaagtttctaaaccaaaactactatttgactctattacaccctgttttagaaaaacatttgagttatacaacttactaaaatgtattttagcggtgatgttttggagcactggtaatatagtgtttaacttattttctattttttatccctctatattcgtgaaattacttctatttgaaaagttttccgccagtgataaaaaaaggctgagcactatctgtaaaaatttttaaggtgtccactaggtggagatattgtgctacatttccaagtgttgtagttaaacttttattagtctgaattaaactcttttatagtgttttattgttttaaaccacaaagatttataatcatttatatctatttatctaatgttattcaaatgttttctgcattgtatgaagctaagataaatgtaaaaaaaacaaacaaaaaaaacctcactttgtgttttgtaatcattagacgatttaacctaatatatcttcccatatgatatgatctttgcatatggcatacttcattcatatgacatagttagaatcttttcccacaaacaatgagtgatgatatctcatttgaaaactcgtgtaacattgtatcagccactgttataaagtgatttacccatgttagtctcataacaactctatgagatcagtaccgtacacatggggaaacttagtatagagaggtgaagtattttttccaagattacaaaataactgtctgagctgggattcgtaaccaggcagcctgactccaaaatcaatattcttaactctattgttatgatggagaaaggcatgaagtctaccttcaaattcatggcattttagaaggaaaaattgtcgcaagtaatgtgattatacttcctagttttataggtcagaaaaatgaggtccacactaattttgcctcttccacagggagatagattctcatctaccattgtgtcttttgtttctgtttttgtcatgatacctcaaattgatatatgttgtaattatgaatttaaggaagtaaaaaacaaaataactcagggctggagccttcagccatattaacatacattgacataaagacctttgttttaatatgaatgattccagttaacaaatggagaaatagttgtttgaaaattaatatttagcttctcaaaagagactcctgtttggaagcaaattgttggtttaacaggacatactttagatatttgaaaaaattctctgtggaatcacaatctcttatttttaagaatgtaggaatatgtgttctatatgcttttaagttatgtattacatactattctctaaaatggaaatgtttatttggcttctaaaagtcatttgtgagttgatgttatttaaaactgcttttcagtcaacttattctttataaaaaagtttgttcaaatagcatgtttttattttgtttctaaataaattcatgtttgataatattttaaaaaaaaaaaaaaaannnnnnnnnnnnnnnnnnnnnnnnnnnnn

SEQ ID NO: 24602 - DNA, 1120 bp, Homo sapiens; identical to SEQ ID NO: 22234
  misc_feature 1, 1119, 1120: n = A,T,C or G

SEQ ID NO: 24603 - DNA, 810 bp, Homo sapiens
  misc_feature 1, 2, 3, 4, 5, 808, 809, 810: n = A,T,C or G
nnnnncaatataaagtgttttctttaaaagtcatattggttcgtggcctagtgccttggattttacatatttttctttttaaatgcaaaaccttttcagccctagtaaaagagaagactgatttaatgtggtgtgattattctgaagataaatgtctggctacagggaatattttgtactaaaaaatgattacacatatggctgtgtgtgtttgagtctgtgtctgtgagagagccagagagagtgagagagattgacagagaaagggagagacacacacacgccccttgaattgctttaactcctaagtgtttcagtcctcattccggtaaactccccatgctgattctttgttttaaactgaaccataggtacagtttcctttttgccaaatgtcaaaacaggtacaaattttaaaatgtaatgctttttaaatagaaaaatgtataaaattagaagtgcccacatataaaaaatacttgagatgaagattatctttagtgaatatcatctgcatatctctgtaagttcaattgtgtttcttacagtccctgtcatattaccaacagaggcaataaaagctgcagtgaaattgccatgactaaatcttttcacatatttcagtgtattttttttatagatttaaaatatacctgaaaacttttctaggaagaataattattcatggaaagagcattgtaatggcatgttttggggagaaaagacatgccaagtcttgtttactacatttaagatgtttacaactatactgggctgctttattaacaatactgtacttgcgtaatannn

SEQ ID NO: 24604 - DNA, 2329 bp, Homo sapiens
agtcgactcacgcgtccgggaagcggggtgggaagaagggaggggatggggttgaccgagctggagaaagccttgaactctatcatcgacgtctaccaccagtactccctgataaaggggaatttccatgccgtctacagggatgacctgaagaaattgctagagaccgagtgtcctcagtatatcaggaaaaagggtgcagacgtctggttcaaagagttggatatcaacactgatggtgcagttaacttcctggagttcctcattctggtgataaagatgggcgtggcagcccacaaaaaaagccatgaagaaagccacaaagagtagctgagttactgggcccagaggctgggcccctggacatgtacagactctcattttatgacgtatcctactgcatcaggacatttgtgtcaatgtcaggtgacgaggggaaatgaaagtgatgagacgatgagaggagtgaaataccaaggacgccatactaggaaacccaggtctatttgttatcagagtaaggatcaagccagatagcctgttatgtaatttctccgataaaagattttgaaagcaggtgctgtgggcatctgtatggggaatcgcactcatagaattattttcatttgtaaatatttggtatcaggccaagcaagggaaagaagctttactgtattaccatctttcctggaaaagattgatttttctctctcccttaggggatatgaggtatgatacctgcaaccaaaataagctggctgttaagtgctctctccttaactattgtccaagcaatgtacatcactcttgcctagatgagtgaccatacttttttctttgctgcttggtttttctatcactaaaaagcaaatttaggtggaagatggatgggtaagtcctttgtccttgtcaaaagaatttagaaagggtaaaggtggtgggatttgaattcttttaaacggtttattcattggaaaggcaagtgagtggcagttgactgtagaatcttgggaatttttgaaggaatttaagagctgtacttattttaaataatgaggaaacaatcagagagacttaaccagggtggcaactatggaagagtgggggtagaatccaagtctacagttctacggcactgctttgtttattttttcaatcaagcacacatgagggattgcttaataaattcaagagttttctatatagtttgggattactacagacacaggtactctagccatgtgactatttcagattagtgttcccattgctctccatcctatttttcatatctaaatgtgtcatgattttagaatctctttgtaaagaaaaccaaaaagagccatgcccaaaagaatgagcatgaaatgaagcaattcaagtatttagaatttcttcttcttttttttttttttttccaaaattctgagttaagaaagttcattgccaacagttgaggataaatagctctattgatttaggcaaatgaatgagaagatttaaacatcatcaagactcccaaagttggtgtaataaaagttgagatgttttgctagatgctgagagaaaaggcataaataggccatttgtgctcctgtaaacaaatgaaattttgtaatgatcaagagacagcatgatattataaaacacactttggactcatcgagacctggctcagagttgtacctaatttgcttatcagcatttggttagaccttagacaaattttataacctctctaagcccattttctttatctgtaaataaaggaaaaagatctgtttggatttgggacaggagagttgtctgttttatagggtaatgtttatgaaaataatttatcacctaggtacttagtaaataccagtttctgtctctgtttttcttcaaagctttgttgacaatgtaggatattgccaactaatcctttgacttgagcgcttagccatgccccaatccaggcagcatgaagaatgatcaagaaggggacacctagtggcagttgacctttgaggatctatctaggatcaggttactgatttgggacctctgaatcagtacatcataacatcgagagtgatctctgccaaaattaaaattctgtcagaacagtataagcagaaggaagacattaggtctttctgaaatatggagctgataacttctatcagttctgaattctgtactgtcccacccccaaatcatctatattgttgcatgtgcttagctttgtgccttgaattgctatttcctttttatcttgcactcagatggtatttttagagatgtttcttcaatcaaaacaagataaagttaaaaaaaaaaaaaa

SEQ ID NO: 24605 - DNA, 1120 bp, Homo sapiens; identical to SEQ ID NO: 22234
  misc_feature 1, 1119, 1120: n = A,T,C or G

SEQ ID NO: 24606 - DNA, 822 bp, Homo sapiens
  misc_feature 1, 807, 808, 809, 810, 811, 812, 813, 814, 815, 816, 817,818, 819, 820, 821, 822: n = A,T,C or G
natgtgctatattcctgcaagctcaagagattaatatacaatcattattatgaattattatgttgcattgaagttaatgtcggtcttttgttctaattaaagtacaaacgtggcatctgaatagaagcttagctagagaagtggagttagagtccctattttaatgaactacatatatttttcaatcaaaatgtgtaattatttaattatctagcctgctcagtaatcataactctccaacttcttcaaagggcctttattcaatatgttaccactcatatggtcattacttggtaagtgttttatattttgaatttcttagatgctttcagtgtatgtgctagtgttttattaatattaaaaatttttgtttacttatatatcaagctgctgcaaatggactaccttattttaaaagttagaataaaatgctattactctctaaacagaactttagcatatctgtttgataagaaatacacaaacaaaatatttttctatgctattgcaaattgtccgcaggaagcaaaatgccagatggttaagtgtagctcacataattatattccaaaggtgttataaacaattctatttagcatctgagataggtctatattaggcaatttcatgtttacatttctaacagaaaggtttaatggcaaatattccttatattctaacttgctacttggagaatatggatattctgaaaagaaaaaccctttctagaacactgtgcaggactaatttttttttaatagacatccagaaaatagcctgggcaacaaagtgagaccctgtctctcnnnnnnnnnnnnnnnn

SEQ ID NO: 24607 - DNA, 1120 bp, Homo sapiens; identical to SEQ ID NO: 22234
  misc_feature 1, 1119, 1120: n = A,T,C or G

SEQ ID NO: 24608 - DNA, 1214 bp, Homo sapiens; identical to SEQ ID NO: 20119

SEQ ID NO: 24609 - DNA, 2143 bp, Homo sapiens; identical to SEQ ID NO: 24464
  misc_feature 1, 2, 2062, 2083, 2129, 2130, 2131, 2132, 2133, 2134, 2135,2136, 2137, 2138, 2139, 2140, 2141, 2142, 2143: n = A,T,C or G

SEQ ID NO: 24610 - DNA, 1120 bp, Homo sapiens; identical to SEQ ID NO: 22234
  misc_feature 1, 1119, 1120: n = A,T,C or G

SEQ ID NO: 24611 - DNA, 2249 bp, Homo sapiens
  misc_feature 1, 2, 3, 4: n = A,T,C or G
nnnnccgctcagcctctgccatggccggctctggcgcgtggaagcgcctcaaatctatgctaaggaaggatgatgcgccgctgtttttaaatgacaccagcgcctttgacttctcggatgaggcgggggacgaggggctttctcggttcaacaaacttcgagttgtggtggccgatgacggttccgaagccccggaaaggcctgttaacggggcgcacccgaccctccaggccgacgatgattccttactggaccaagacttacctttgaccaacagtcagctgagtttgaaggtggactcctgtgacaactgcagcaaacagagagagatactgaagcagagaaaggtgaaagccaggttgaccattgctgccgttctgtacttgcttttcatgattggagaacttgtaaggtggatacattgcaaatagcctagcaatcatgacagatgcacttcatatgttaactgacctaagcgccatcatactcaccctgcttgctttgtggctatcatcaaaatcaccaaccaaaagattcacctttggaggagaacttgtagaggttttgtcagctatgattagtgtgctgttggtgtatatacttatgggattcctcttatatgaagctgtgcaaagaactatccatatgaactatgaaataaatggagatataatgctcatcaccgcagctgttggagttgcagttaatgtaataatggggtttctgttgaaccagtctggtcaccgtcactcccattcccactccctgccttcaaattcccctaccagaggttctgggtgtgaacgtaaccatgggcaggatagcctggcagtgagagctgcatttgtacatgctttgggagatctggtacagagtgttggtgtgctaatagctgcatacatcatacgattcaagccagaatacaagattgctgaccccatctgtacatacgtattttcattacttgtggcttttacaacatttcgaatcatatgggatacagtagttataatactagaaggtgtgccaagccatttgaatgtagactatatcaaagaagccttgatgaaaatagaagatgtatattcagtcgaagatttaaatatctggtctctcacttcaggaaaatctactgccatagttcacatacagctaattcctggaagttcatctaaatgggaggaagtacagtccaaagcaaaccatttattattgaacacatttggcatgtatagatgtactattcagcttcagagttacaggcaagaagtggacagaacttgtgcaaattgtcagagttctagtccctaattttatgtattgttttagcattgctgaattcactttatttatcctgcagtcacagacttgagagcaataaatgcaaacctaaatgagaaaatggaatccctgacagctgtgtccgtatcaagcatcagtctctcaaacagttgccccagcctgacagtgctagtctctgtttaatggtaaaaggagactttgccataattttcagatgaagatgtttcccaaacactgtttacagaatgagatgtgactcctacagatacctcatagaagacaatccaagatcatacttcattaacttgacagagtacgtgtcttaaaggaagcatcaagaattcaatatttgcatttaaaaatactttttaaggccattttatattaagccagtgctggacaactgacttctcttttattatgtataataagtctcgacacccagcttctggaaccgctgccttctttttacacaaattaccacccaacagatttcaggaagtactagtagttatcccaaaagtggaataagcatgtattcctaagtgtttcagaaatgttttatttcacacataagtcttaatgttattgttatgattatactttataaacaaccttttccagatgctacagggttttgaatctcaaagttaacatttttcattatttgtaatcttagaaccaaatctttatttattgtggtcactgttattaaatgatttaggaaatactttcaatattattctgaatggctgaagttagtcttaaactcaaattactatatgatgatttaaaacaaaataaaagagcgaggatgggggttggagtttcaggtttatgtcttcccgacatcacttttatcattcatgaaattgtcttaaaaaagcaagagactgcaaaatgtaaacagtaatcttctgtccctttaagaactgccaacaatttgt

SEQ ID NO: 24612 - DNA, 2538 bp, Homo sapiens; identical to SEQ ID NO: 20316
  misc_feature 2538: n = A,T,C or G

SEQ ID NO: 24613 - DNA, 381 bp, Homo sapiens
tctccacctggtggtgatttttctgatccagttacatctgccactcttggtatcgttcaggtgttctggggcttagataagaaactagctcaacgtaagcatttcccctctgtcaattggctcatcagctacagcaagtatatgcgtgccttggatgaatactatgacaaacacttcacagagttcgttcctctgaggacgaaagctaaggaaattctgcaggaagaagaagacccggccagaaattgtacgcgggctcataaggaaaggttaaaaaaagtaaaaggaactcggcaaatcttaccccgcctgtttaccaaaaacatcacctctagcatcaccagtattagaggcaccgcctgcccagtgacacatgtttaa

SEQ ID NO: 24614 - DNA, 335 bp, Homo sapiens
  misc_feature 332, 333, 334, 335: n = A,T,C or G
acaacagtggtagcagtggatagggaaagcctggcagagtattgtcagctgagaaacagaaaagtagcaacagccatcttatttttgctccactgagcacatttcaccactcagaccatggtgatgagagtcacatttctgatgggaggaggaggaagaaccaatagctggctccctggctctgaccccttgagttgagacacatccttatttactccaggctattcatgcttcagattcaaacaattccttcccaaaagcttttccaagtgtggcctgtggcccatgggtgaaaagagaagttctgatctagaaaaatcatgtccattcannnn

SEQ ID NO: 24615 - DNA, 1214 bp, Homo sapiens; identical to SEQ ID NO: 20119

SEQ ID NO: 24616 - DNA, 365 bp, Homo sapiens; identical to SEQ ID NO: 21784

SEQ ID NO: 24617 - DNA, 2887 bp, Homo sapiens
  misc_feature 1, 2, 2885, 2886, 2887: n = A,T,C or G
nncagtccccgcgcttttcggaggctgccagcgtcccacaccagccgcaggtgaaaaccggcagaaagacattaagagattttcctgcagtcactgctggcagatgatagagccaggatttgaaagcaggcagcctggctccagaccctgtgctcttaactcccgttttgcatcaagaacagaatcctatgaaaggcttgtacagtgcttggatagcagcatcaaggagcattgtgtacatgcagaagtgcacagtacctggagtgaaactgcttgtgttcgatttctgataccattcataactggctgtgtgatctcaaaacctctaaaatgcagacctccagctctagatctgtgcacctgagtgaatggcagaagaattacttcgcaattacatctggcatatgtaccggaccgaaggcagatgcataccgtgcacagatattacgcattcagtatgcatgggcaaactctgagatttcccaggtctgtgctaccaaactgttcaaaaaatatgcagagaaatattctgcaattattgattctgacaatgttgaatctgggttgaataattatgcagaaaacattttaactttggcaggatctcaacaaacagatagtgacaagtggcagtctggattgtcaataaataatgttttcaaaatgagtagtgtacagaagatgatgcaagctggcaaaaaattcaaagactctctgttggaacctgctcttgcatcagtggtaatccataaggaggccactgtctttgatcttcctaaatttagtgtttgtggtagttctcaagagagtgactcattacctaactcagctcatgatcgagaccggacccaagacttcccggagagcaatcgtttgaaactccttcagaatgcccagccacctatggtgactaacactgctaggacttgtcctacattctcagcacctgtaggtgagtcagctactgcaaaattccatgtcacaccattgtttggaaatgtcaaaaaggaaaatcacagctctgcaaaagaaaacataggacttaatgtgttcttatctaaccagtcttgttttcctgctgcctgtgaaaatccacagaggaagtctttttatggttctggcaccattgatgcactttccaatccaatactgaataaggcttgtagtaaaacagaagataatggcccaaaggaggatagcagcctgcctacatttaaaactgcaaaagaacaattatgggtagatcagcaaaaaaagtaccaccaacctcagcgtgcatcagggtcttcatatggtggtgtaaaaaagtctctaggagctagtagatcccgagggatacttggaaagtttgttcctcctatacccaagcaagatgggggagagcagaatggaggaatgcaatgtaagccttatggggcaggacctacagaaccagcacatccagttgatgagcgtctgaagaacttggagccaaagatgattgaacttattatgaatgagattatggatcatggacctccagtaaattgggaagatattgcaggagtagaatttgctaaagccaccataaaggaaatagttgtgtggcccatgttgaggccagacatctttactggtttaaggggaccccctaaaggaattttgctctttggtcctcctgggactggtaaaactctaattggcaagtgcattgctagtcagtctggggcaacattctttagcatctctgcttcatccttaacttctaaatgggtaggtgagggggagaaaatggtccgtgcattgtttgctgttgcaaggtgtcagcaaccagctgtgatatttattgacgaaattgattccttgttatctcaacggggagatggtgagcatgaatcttctagaaggataaaaacagaatttttagttcaattagatggagcaacaacatcttctgaagatcgtatcctagtggtgggagcaacaaatcggccacaagaaattgatgaggctgcccggagaagattggtgaaaaggctttatattcccctcccagaagcttcagccaggaaacagatagtaattaatctaatgtccaaagagcagtgttgcctcagtgaagaagaaattgaacagattgtacagcagtctgatgcgttttcaggagcagacatgacacagctttgcagggaggcttctcttggtcctattcgcagtttacaaactgctgacattgctaccataacaccggatcaagttcgacccatagcttacattgattttgaaaatgcttttagaactgtgcgacctagtgtttctccaaaagatttagagctttatgaaaactggaacaaaacttttggttgtggaaagtaagtgggatacttggaatcaaggcatctctgtattacagtcttctttattttttagcatagaaagttggggatgtgttaattgtatttttaagaatatattctaaattctgtacttcaaataatagcacagattttacatctgattgacatagtgtatgttaatgtaagttttgctttccagtgattacctgatacgtaagcctatttgaacaaagtgagaatgaacttttgtttctaagaagtctttatcttgaagctatataacatgaaaagtgagctcaaattttttttagttgaagattacatataaagttgagtcagattaatattcagtcctttcatctgagacaggggcctattcggagggccacataatactaaggtcgctagaataaaggggtacattgggccaaagaatgggaaacggtcataaagggaatctaaaactcaaggctacaaagtgccaatttttactttcttcagccaatttgttacctctttatggtttttaatttttatcaggactaacannn

SEQ ID NO: 24618 - DNA, 4414 bp, Homo sapiens
  misc_feature 1, 2, 3, 4386, 4387, 4388, 4389, 4390, 4391, 4392, 4393,4394, 4395, 4396, 4397, 4398, 4399, 4400, 4401, 4402, 4403,4404, 4405, 4406, 4407, 4408, 4409, 4410, 4411, 4412, 4413,4414: n = A,T,C or G
nnngagtcgacccacgcgtccgccgggtcctgggcgagcgggcgccgtgcgcgtgtcccgcggccgagctgctaataaagttgcagcgaggagaagcgcagcgacggcgtcgggagagcgcgcctagccggctcgcgaaaaggaagctgttgaagttattgaagtacctgttgctatattctaagaaattaaaatgtccagaaatctgcctctgacttgacccaatgaaagaagcatatggcacttgtgaagataaatgttactcctccctttttaattggaacttctgcttaggacctgtgtatgacgtttcacctgtgatctgttctttcggtagccactgactttgagttacaggaaggtctccgaagatttgtgtcaaatgacgtcaatggccagcttgttttcttttactagtccagcagtaaagcgattgttgggctggaaacaaggtgatgaggaggagaaatgggcagaaaaggcagttgatgctttggtgaagaaactaaaaaagaaaaagggtgccatggaggaactggagaaagccttgagcagtccaggacagccgagtaaatgtgtcactattcccagatctttagatggacgcctgcaggtttctcacagaaaaggcttaccccatgttatatattgtcgtgtttggcgctggccggatttgcagagtcatcatgagctaaagccgttggatatttgtgaatttccttttggatctaagcaaaaagaagtttgtatcaacccataccactataagagagtggagagtccagtcttacctccagtattagtgcctcgtcataatgaattcaatccacaacacagccttctggttcagtttaggaacctgagccacaatgaaccacacatgccacaaaatgccacgtttccagattctttccaccagcccaacaacactccttttcccttatctccaaacagcccttatcccccttctcctgctagcagcacatatcccaactccccagcaagttctggaccaggaagtccatttcagctcccagctgatacgcctcctcctgcctatatgccacctgatgatcagatgggtcaagataattcccagcctatggatacaagcaataatatgattcctcagattatgcccagtatatccagcagggatgttcagcctgttgcctatgaagagcctaaacattggtgttcaatagtctactatgaattaaacaatcgtgttggagaagcttttcatgcatcttctactagtgtgttagtagatggattcacagatccttcaaataacaaaagtagattctgcttgggtttgttgtcaaatgttaatcgtaattcgacaattgaaaacactaggcgacatattggaaaaggtgttcatctgtactatgttggtggagaggtgtatgcggaatgcctcagtgacagcagcatatttgtacagagtaggaactgcaactttcatcatggctttcatcccaccactgtctgtaagattcccagcagctgcagcctcaaaatttttaacaatcaggagtttgctcagcttctggctcaatctgtcaaccatgggtttgaggcagtatatgagctcaccaaaatgtgtaccattcggatgagttttgtcaagggttggggagcagaatatcaccggcaggatgtaaccagcaccccatgttggattgagattcatcttcatgggcctcttcagtggctggataaagtccttactcagatgggctcccctctgaaccccatatcttctgtttcataatgcagaagtattcttttcaattatattgttagtggacttgttttaattttagagaaactttgagtacagatactgtgagcttacattgaaaacagatattacagcttatttttttctacataattgtgaccaatacatttgtattttgtgatgaatctacatttgtttgtattcatgttcatgtgattaactcttagaagtgttgtaaaagatgcagagtaagtattatgccccagttcagaaatttggcattgatcttaaactggaacatgcttttactttattgccctaacaattttttattaaatttatttgaaaatgcatcacatgatgaaaaattatagtagcttataagagggcatatacagtgaagagtaagttttccctcctactctcgatcttccagaagctgtacttttaccagtttctttgtcccaccaacttaaaaaaaaaaagtacaattcattgttttgcaaaagtgtatggtaggggcttaaaagaaactataaagttttatttgaatgaacactatgcactgctgtaactggtagtgttcagtaaaagcaaaatgatagttttctagatgacataaaatttacatttaatacagataagtgttcttcagtgtaatgtgacttcatgctatatatcttttgtaagacatttccttttttaaaaaaatttttgcaaataactgatctcaagtatatgtcatttactcaaaatctgtcataagcattactttatagctagtgacagtgcatgcacagccttgttcaactatgtttgctgcttttggacaatgttgcaagaactctatttttgacatgcattaatcttttattttgcacttttatgggtgacagtttttagcataacctttgataaaatacactcaagtgacttggacttagatgcttatccttacgtccttggtaccttttttgtattaacaaacactgcaatttatagattacatttgtaggaagttatgcttttttctggtttttgttttactttcaacctaggttataagactgttattctgtagctccaacttaaggtgcctttttaattccctacagttttatgggtgttatcagtgctggagaatcatgtagttaatcccattgctcttacaagtgtcagcttacttgtatcagcctccctacgcaaggacctatgcactggagccgtaggaggctcttcagttgggccccaaggataaggctactgatttgatactaaatgaatcagcagtggatgtagggatagctgattttaaaacactcggctgggcacagtggctcacacctgtaatcccagcactttgggaggctgaggcaggcagatcatgatgtcaggagtttgagaccagcctggccaatatggtgaaaccctgtctctacaaaaaatacaaaaattagctgggcatggtggtgcgtgcctgaagtcccagctactcgggaagctgaggcagaagaatcacttgaacctgggaggcggaggttgtggtgagccgagatcgcaccactgcactccagcctgggcgacagagcgagactctgcctcaaaaaacaaaacaaaacaaaacactcacccatcaacgaatatagactcttctctcatttatcgatgatcctctttttccattttttaagtacttatgtggaagctagtctcccaaaacacaatctttagagagaaaagacatgaacgaactccaaaatatccatttaatcaatcatgtttttggctttggataaagaactttgaaccagtttttttctcaggagctgtcaaatggacacttaattatgacatgagaatgaagaaattattttggaaaaaaaaaatgacctaatttacctatcagtgaaagctttattttctggtgccttttgaaagtatatggagtcatatcattcttctgtttaaaatgttagtttggtttgactttccactttgtcctttctgctcttgtgaagaaaaaaaaaaagcattttcgaggaaagaattatgcaatttctttatggtttctgtgtcattatttattgctttttcaatgtgcagccagtggatggttatagttctttacagattgaacgtgccatttggtgtttcagatcacagttctttagcttgggtacaaagaaatactttctgacagtcacctgagccttaaatgtacgtattacattggactgcaattctggaaccttacaaaagatctggtatggcaaacgcaaggagaatataggattacatagatagacacattgagattaataaaacacatctgtaaactaagccagagttatgggaatgaatttggggaaccaatttggtacgaaaacatatatccattgaatgcactaatgtaataaaacaacaatcaatgaggtgtcatacacagtggacactaccacaaggagaaaacaggagcaccaacggagacaaaatacaacggaacaacagcagagccaagacacaaagaagaaaacaacaaaaagaagcgaaaaagccacacagaaggagacccaacagaaaaacaaattaaagaaacaaaacaaaacaagaacaaaaacaccacaaaaaaaaaaaannnnnnnnnnnnnnnnnnnnnnnnnnnnn

SEQ ID NO: 24619 - DNA, 3252 bp, Homo sapiens
  misc_feature 1, 3241, 3242, 3243, 3244, 3245, 3246, 3247, 3248, 3249,3250, 3251, 3252: n = A,T,C or G
naggcgtacagctacgcgtccgcggcgcgtgaggaacctaccggtaccggccgcgcgctggtagtcgccggtgtggctgcacctcaccaatcccgtgcgccgcggctgggccgtcggagagtgcgtgtgcttctctcctgcacgcggtgcttgggctcggccaggcggggtccgccgccagggtttgaggatgggggagtagctacaggaagcgaccccgcgatggcaaggtatatttttgtggaatgaaaaggaagtattagaaatgagctgaagaccattcacagattaatatttttggggacagatttgtgatgcttgattcacccttgaagtaatgtagacagaagttctcaaatttgcatattacatcaactggaaccagcagtgaatcttaatgttcacttaaatcagaacttgcataagaaagagaatgggagtctggttaaataaagatgactatatcagagacttgaaaaggatcattctctgttttctgatagtgtatatggccattttagtgggcacagatcaggatttttacagtttacttggagtgtccaaaactgcaagcagtagagaaataagacaagctttcaagaaattggcattgaagttacatcctgataaaaacccgaataacccaaatgcacatggcaattttttaaaaataaatagagcatatgaagtactcaaagatgaagatctacggaaaaagtatgacaaatatggagaaaagggacttgaggataatcaaggtggccagtatgaaagctggaactattatcgttatgattttggtatttatgatgatgatcctgaaatcataacattggaaagaagagaatttgatgctgctgttaattctggagaactgtggtttgtaaatttttactccccaggctgttcacactgccatgatttagctcccacatggagagactttgctaaagaagtggatgggttacttcgaattggagctgttaactgtggtgatgatagaatgctttgccgaatgaaaggagtcaacagctatcccagcctcttcatttttcggtctggaatggccccagtgaaatatcatggagacagatcaaaggagagtttagtgagttttgcaatgcagcatgttagaagtacagtgacagaactttggacaggaaattttgtcaactccatacaaactgcttttgctgctggtattggctggctgatcactttttgttcaaaaggaggagattgtttgacttcacagacacgactcaggcttagtggcatgttggatggtcttgttaatgtaggatggatggactgtgccacccaggataacctttgtaaaagcttagatattacaacaagtactactgcttattttcctcctggagccactttaaataacaaagagaaaaacagtattttgctgcttcattgagagaatcagaccagcagagagagagagttatatgacaaaatatgctgaggataaaatattgacaaataaagaagatttgttagaagggccttttatactcgtttgtgttttaaataagagactcgggccgaaaacaagtttaagataagatctgtatcattgtattttactctaaaaactcctaagtggtttggtttttagatgaaaacctctataatgagcaaaagtccattccaattttccacttctaagttcctcttaattaatcttaattattggttggggaatgaagtgtctttgatagtctattattcttccttctagtgttataaaaattcttaagtgaatgtgtaaaacattggcattctgtaaaacatgattagcattaaaattaagctaaagataatgtggtttttcttgatgattgggaggtcactcaggatttttctgagcatttttatagaatacccatcatagttaattaaaaattccagttaatgcaacatcttataatggaatttattgtatatcactatttaagaaacagcttagttatataatatttttgataattgccaaaatacactttttttgaaaaaagacatttggaattgtttgaaaaactatttaccttctataatcattttcctaaaaatactacattggaaattgaaaaaacaaaagatatcaaatataatgaatatttattcaaaaagattacaatgtgattttctttttctagtttctcaactcattggatgctaaagaaatatatttggaagtaatacataatcttccagattttgaactactttcggcaaacacactagaggatcgtttggctcatcatcggtggctgttattttttcattttggaaaaaatgaaaattcaaatgatcctgagctgaaaaaactaaaaactctacttaaaaatgatcatattcaagttggcaggtttgactgttcctctgcaccagacatctgtagtaatctgtatgtttttcagccgtctctagcagtatttaaaggacaaggaaccaaagaatatgaaattcatcatggaaagaagattctatatgatatacttgcctttgccaaagaaagtgtgaattctcatgttaccacgcttggacctcaaaattttcctgccaatgacaaagaaccatggcttgttgatttctttgccccctggtgtccaccatgtcgagctttactaccagagttacgaagagcatcaaatcttctttatggtcagcttaagtttggtacactagattgtacagttcatgagggactctgtaacatgtataacattcaggcttatccaacaacagtggtattcaaccagtccaacattcatgagtatgaaggacatcactctgctgaacaaatcttggagttcatagaggatcttatgaatccttcagtggtctcccttacacccaccaccttcaacgaactagttacacaaagaaaacacaacgaagtctggatggttgatttctattctccgtggtgtcatccttgccaagtcttaatgccagaatggaaaagaatggcccggacattaactggactgatcaacgtgggcagtatagatgtggcaacagtatcattcttttttgtgcccagggaaaacgttcaaagatacctggggataagatttttttcccccaaaatcaaataaagcttatcattatcacaggttccaagggtgggatagggatggtattcccggaaactggggctaggatttactccaggttccccgatttaacccgaattcgtggaaatctcccgggaaacacnnnnnnnnnnnn

SEQ ID NO: 24620 - DNA, 2452 bp, Homo sapiens; identical to SEQ ID NO: 22637

SEQ ID NO: 24621 - DNA, 943 bp, Homo sapiens
  misc_feature 1, 2: n = A,T,C or G
nncggcacgtagggagagattccaaaggcctgaggacttggcacaaaatgaagaggcagaggatgtggacacaaacttacagactgggactccaaggatcagccagatgaaatgctatgtgcagagtcttcatttcccagctcagtggtggacagcagaggactctaagaatcacctcataaatgaactaccttgacatgccctgacccaggctctttatttggaaacccaggctaggacaggaatgaagagaagccagaccttctgactcgaagatccagccacctcttgggatgcacacgtttctcttcaactgcgtgatgtgaactgcgtcacatggtcaaattataatgaagaaaggaacctctcttgagtacaaagagctacctacggtggtctggagccggaggaccacagcatcaaaggatataagatgcatagccaactgaggaacctgagcaattaaagagatccacagttaagccacacttaactggcacttgtggaagccccgcaaggcctgaaggagagctgacataggcaccccagagagtcagaatctggatcccatcttaataaggccatgaacaccagtggagaagaggcagaaacaccaatggataaggaacattcacatctttcttcccacgtgcctctaagtgccagtgcaggccccacaggccaagctacagggagaaaggagatgacgcaaaggaacctaactggactttaatcactagaagtgagaagagaaatctattggaacctcccaagataatgccaagggtcaaagggtgcgcagatacataagaccgtggaaataatatcagacaaaaagcagattagagcaattttctttttcgagttcaaaatgggttataaagcagcggagacaaaccgcaacatcaccaacgcctttggcccaggaactgctaatgaaggt

SEQ ID NO: 24622 - DNA, 2851 bp, Homo sapiens
  misc_feature 1, 2761, 2849, 2850, 2851: n = A,T,C or G
naattccgtaaagctagaccgatctccggggagccccgagtaggcgagcggccgccagctagttgagcgcaccccccgcccgccccagcggcgccgcggcgggcggcgtccaggcggcatggagaaggacggcctgtgccgcgctgaccagcagtacgaatgcgtggcggagatcggggagggcgcctatgggaaggtgttcaaggcccgcgacttgaagaacggaggccgtttcgtggcgttgaagcgcgtgcgggtgcagaccggcgaggagggcatgccgctctccaccatccgcgaggtggcggtgctgaggcacctggagaccttcgagcaccccaacgtggtcaggttgtttgatgtgtgcacagtgtcacgaacagacagagaaaccaaactaactttagtgtttgaacatgtcgatcaagacttgaccacttacttggataaagttccagagcctggagtgcccactgaaaccataaaggatatgatgtttcagcttctccgaggtctggactttcttcattcacaccgagtagtgcatcgcgatctaaaaccacagaacattctggtgaccagcagcggacaaataaaactcgctgacttcggccttgcccgcatctatagtttccagatggctctaacctcagtggtcgtcacgctgtggtacagagcacccgaagtcttgctccagtccagctacgccacccccgtggatctctggagtgttggctgcatatttgcagaaatgtttcgtagaaagcctctttttcgtggaagttcagatgttgatcaactaggaaaaatcttggacgtgattggactcccaggagaagaagactggcctagagatgttgcccttcccaggcaggcttttcattcaaaatctgcccaaccaattgagaagtttgtaacagatatcgatgaactaggcaaagacctacttctgaagtgtttgacatttaacccagccaaaagaatatctgcctacagtgccctgtctcacccatacttccaggacctggaaaggtgcaaagaaaacctggattcccacctgccgcccagccagaacacctcggagctgaatacagcctgaggcctcagcagccgccttaagctgatcctgcggagaacacccttggtggcttatgggtccccctcagcaagccctacagagctgtggaggattgctatctggaggccttccagctgctgtcttctggacaggctctgcttctccaaggaaaccgcctagtttactgttttgaaatcaatgcaagagtgattgcagctttatgttcatttgtttgtttgtttgtctgtttgtttcaagaacctggaaaaattccagaagaagagaagctgctgaccaattgtgctgccatttgatttttctaaccttgaatgctgccagtgtggagtgggtaatccaggcacagctgagttatgatgtaatctctctgcagctgcctggcctgatttggtacttttgagtgtgtgtgtgcatgtgtgtgtgtgtgtgtgtgtgtgtgtgtgtgtatgtgagagattctgtgatcttttaaagtgttactttttgtaaacgacaagaataattcaattttaaagactcaaggtggtcagtaaataacaggcatttgttcactgaaggtgattcaccaaaatagtcttctcaaattagaaagttaaccccatgtcctcagcatttcttttctggccaaaagcagtaaatttgctagcagtaaaagatgaagttttatacacacagcaaaaagaaaaaaaaaaaaagtatattttaagagatgtgcatgcattctatttagtcttcaaaatgctgaatttacttgttgtaagtctattttaaccttctgtatgatatcatgctttatcatttcttttggaaaatagcctgtaagctttttattacttgctataggtttagggagtgtacctcagatagattttaaaaaaaagaatagaaagcctttatttcctggtttgaaattcctttcttccctttttttgttgttgttattgttgtttgttgttgttattttgtttttgtttttaggaatttgtcagaaactctttcctgttttggtttggagagtagttctctctaactagagacaggagtggccttgaaattttcctcatctattacactgtactttctgccacacactgccttgttggcaaagtatccatcttgtctatctcccggcacttctgaaatatattgctaccattgtataactaataacagattgcttaagctgttcccatgcaccacctgtttgcttgctttcaatgaacctttcataaattcgcagtctcagcttatggtttatggcctcgattctgcaaacctaacagggtcacatatgttctctaatgcagtccttctacctggtgtttacttttgttacctaaataatgagtaggatcttgttttgttttatcaccagcacacagattgctataaactgttactttgtgaattacatttttatagaagatattttcagtgtctttacctgagggtatgtctttagctatgttttagggccatacatttactctatcaaatgaacttttctccatcccccacgctgtgcttatttctagtgccttgtgctcactcctgctctctacagagccagcctggcctgggcattgtaaacagcttttcctttgtctcttactggtttctctacagtcctttatatttcataccatctctgccttataagtggtntagtgctcagttggctctagtaaccagaggacacagaaagtatcttttggaaagtttagccacctgtgctttctgactcagagtgcannn

SEQ ID NO: 24623 - DNA, 573 bp, Homo sapiens
  misc_feature 569, 570, 571, 572, 573: n = A,T,C or G
ggcctccttgtgccaccgtctgttatgatttctctccattgcagcagaaagccgttcttctaagcagacagcaggtgatgatggcaaaataggccacactcttgaggagcaggaggaggtacagattatgcttacctcaggtttctttagtgtgcttgaatgcccttctttccatataacacttatcttcttcttaattcggcaatggaatatcttttaagttttaaaaaaactggaataattatatctatcttttttgccgtttatatttaggggtttttgttgataaaatcaagtcttggttgtggcttgctgaattaaatatttatgagtggtgcatttttaagtatagtgaacaagacaccatattaagtaccttcccggagatttcctcaaagctgggcagttgttagcgagaatgaccaatttcgctttgccttgtctgatcatcttcagagtctgcttgtagttccactcaggcagtgcttcaccccttatcataacgggtaggagcacaggatgatcgctaccacgctctctctcgtcttccttgcgaccaccttcctccnnnnn

SEQ ID NO: 24624 - DNA, 264 bp, Homo sapiens
  misc_feature 262, 263, 264: n = A,T,C or G
acaaatacaagctcctgccacggtcttgaagttctgttcttatgctctctgctcactggttttcaataccaccaagaggaaaatattgacaagtttaaaggctgtgtcattgggccatgtttaagtgtacttttcaggtatcagagacttagtgctttaagtagcaaattacctaaattatgaacacatatttccaaaaacaaaatcaagctcataattaccaagtatatatgtacctcggcagcacgcggtggagctcaannn

SEQ ID NO: 24625 - DNA, 579 bp, Homo sapiens; identical to SEQ ID NO: 22581
  misc_feature 578, 579: n = A,T,C or G

SEQ ID NO: 24626 - DNA, 221 bp, Homo sapiens
  misc_feature 125, 126, 127, 128, 129, 130, 131, 132, 133, 134, 135, 136,137, 138, 139, 140, 141, 142, 143, 144, 145, 146, 147, 148,149, 150, 151, 152, 153, 154, 155, 156: n = A,T,C or G
acgcgggaattggaaaaatctggatttctgatgccaaagggttaaagcttcttggatttcatttcattgatatacagccactattttatttttgatcagtggcctttgggccactgttcagggtnnnnnnnnnnnnnnnnnnnnnnnnnnnnnnnntaataagatttaattttccagtagcctgcatgaattgttccccacataaaactgtacctgcccgg

SEQ ID NO: 24627 - DNA, 1214 bp, Homo sapiens; identical to SEQ ID NO: 20119

SEQ ID NO: 24628 - DNA, 1120 bp, Homo sapiens; identical to SEQ ID NO: 22234
  misc_feature 1, 1119, 1120: n = A,T,C or G

SEQ ID NO: 24629 - DNA, 1120 bp, Homo sapiens; identical to SEQ ID NO: 22234
  misc_feature 1, 1119, 1120: n = A,T,C or G

SEQ ID NO: 24630 - DNA, 2670 bp, Homo sapiens; identical to SEQ ID NO: 24256
  misc_feature 1, 2, 3, 4, 5, 6, 7, 8, 9, 10, 11, 12, 13, 14, 15, 16, 17,18, 19, 20, 21, 22, 23, 24, 2643, 2659, 2660, 2661, 2662,2663, 2664, 2665, 2666, 2667, 2668, 2669, 2670: n = A,T,C or G

SEQ ID NO: 24631 - DNA, 1120 bp, Homo sapiens; identical to SEQ ID NO: 22234
  misc_feature 1, 1119, 1120: n = A,T,C or G

SEQ ID NO: 24632 - DNA, 497 bp, Homo sapiens
  misc_feature 493, 494, 495, 496, 497: n = A,T,C or G
actcaaattcctctggccattaatggtattgatgtcaagctgaaccatcgtaggaagttgaaagccttagaaagaggacttggtaaagtttttggattatcttgaaactctggcaagatggccaagtatggagaacatgaagccagtcctgacaatgggcagaacgaattcagtgatatcattaagtccagatctgagtgggaaaccacccatcaatgatatgttcacagacctcaaagatggaaggaagctattggatcttctagaaggcctcacaggaacatcactgccaaaggaacgtggttccacaagggtacttttttttcccttctttttttttttttctttggtcaagtagggattaatgccataggtttagagagaaggattgttttcagtttttaagagaattttttaaaaatacattttatggttctcttaaagaattaatattcacttctgaaggaactacttgtaatatataatttatcannnnn

SEQ ID NO: 24633 - DNA, 2883 bp, Homo sapiens; identical to SEQ ID NO: 23230

SEQ ID NO: 24634 - DNA, 2003 bp, Homo sapiens
  misc_feature 486, 487, 488, 489, 490, 491, 492, 493, 494, 495, 496, 497,498, 499, 500, 501, 502, 503, 504, 505, 506, 507, 508, 509,510, 511, 512, 513, 514, 515, 516, 517, 518, 519, 520, 521,522, 523, 524, 525, 526, 527, 528, 529, 530, 531, 532: n = A,T,C or G
  misc_feature 533, 534, 535, 536, 537, 538, 539, 540, 541, 542, 543, 544,545, 546, 547, 548, 549, 550, 551, 552, 553, 554, 555, 556,557, 558, 559, 560, 561, 562, 563, 564, 565, 566, 567, 568,569, 570, 571, 572, 573, 574, 575, 576, 577, 578, 579: n = A,T,C or G
  misc_feature 580, 581, 1923, 1932, 1999: n = A,T,C or G
gagaacctgccgaaatgggcttccaggagctgcaggagaaaggggtgcccctgggttccgaggacctgctggaccaaatggcatcccaggagaaaagggtcctgctggagagcgtggtgctccaggccctgcagggcccagaggagctgctggagaacctggcacagatggcgtcctactggtcctattggtcctcctggcccagctggccagcctggagataagggtgaaggtggtgcccccggacttccaggtatagctggacctcgtggtagccctggtgagagaggtgaaactggccctccaggacctgctggtttccctggtgctcctggacagaatggtgaacctggtggtaaaggagaaagaggggctccgggtgagaaaggtgaaggaggccctcctggagttgcaggaccccctggaggttctggacctgctggtcctgtcggtccagctggaaagagtggtgacagaggagaaagnnnnnnnnnnnnnnnnnnnnnnnnnnnnnnnnnnnnnnnnnnnnnnnnnnnnnnnnnnnnnnnnnnnnnnnnnnnnnnnnnnnnnnnnnnnnnnnnacgtggagctgctggcatcaaaggacatcgaggattccctggtaatccaggtgccccaggttctccaggccctgctggtcagcagggtgcaatcggcagtccaggacctgcaggccccagaggacctgttggacccagtggacctcctggcaaagatggaaccagtggacatccaggtcccattggaccaccagggcctcgaggtaacagaggtgaaagaggatctgagggctccccaggccacccagggcaaccaggccctcctggacctcctggtgcccctggtccttgctgtggtggtgttggagccgctgccattgctgggattggaggtgaaaaagctggcggttttgccccgtattatggagatgaaccaatggatttcaaaatcaacaccgatgagattatgacttcactcaagtctgttaatggacaaatagaaagcctcattagtcctgatggttctcgtaaaaaccccgctagaaactgcagagacctgaaattctgccatcctgaactcaagagtggagaatactgggttgaccctaaccaaggatgcaaattggatgctatcaaggtattctgtaatatggaaactggggaaacatgcataagtgccaatcctttgaatgttccacggaaacactggtggacagattctagtgctgagaagaaacacgtttggtttggagagtccatggatggtggttttcagtttagctacggcaatcctgaacttcctgaagatgtccttgatgtgcagctggcattccttcgacttctctccagccgagcttcccagaacatcacatatcactgcaaaaatagcattgcatacatggatcaggccagtggaaatgtaaagaaggccctgaagctgatggggtcaaatgaaggtgaattcaaggctgaaggaaatagcaaattcacctacacagttctggaggatggttgcacgaaacacactggggaatggagcaaaacagtctttgaatatcgaacacgcaaggctgtgagactacctattgtagatattgcaccctatgacattggtggtcctgatcaagaatttggtgtggacgttggccctgtttgctttttataaaccaaactctatctgaaatcccaacaaaaaaaatttaactccgtatgtgttcctcttgttctaatcttgtcaaccagtgcaagtgaccgacaaaattccagttatttatttccaaaatgtttggaaacagtataatttgacaaagaaaaatgatacttctctttttttgctgttccaccaaatacaattcaaatgctttttggtttatttttttacccaattccaatttcaaaatgnctcaatggngcttttaataaataaactttaacactctttatgataccaccctgggtaaattcttttggaatcctanccca

SEQ ID NO: 24635 - DNA, 1747 bp, Homo sapiens
taagcttgcggccgcttaacgagcggccgcccttttttttttttttttttaaagaaaaatttaaaagtttattgttcaaacaagaagtacagaccacaatctagaagactcaaatcaagtggtaagaaattaatcttacagcagttacaacacagtttataatgcataaagggggggaatattttgaccttttttataattggctgttatacattctttttagggcaagttgagctgtttaagcttgttggtctatagctgattggtttaatttcagtgaatcatgctggcaaggatgtaaagcttacattttgcatttcatttatgatcagagacagcatttcaggaaaatcagaatgattagttttggttacacggttgcgggtagtcagccttagggtatttctaaactggggcttccatttttatttttcgttaataatacctgcatgagatgggcagctcaggtcttaaggtcacatacagtgcttcagtggtcaagtgttctgtttaaattagagtccaatagcaggctagtagctgccattcaaagggaatgtatatggcaaccatcttgggtaatttatatgtccaaaacccaagggcctggtgcatcctgatagcagtctcttgttgccgcagtatccaatctgtatgggtaagagtcaatgagacctgtagttccatgggcctacattaatgtcaggcccatgttaatgcatagtaggcctctcgagtctgctgttgttgagggccccattcagaggtggctgtgttgtgggtaattttaactaaaggaggcaaaataatactcagatgtgatacatgttatctccaatagacaaacaggcataccagctattgagcttcttttaggtgggggctgccaaggacaatatttgactttatcaggaatactcctctaattactggaccaggtagctccagggactgcacttgttgggcaagtcttgggatcttatcagggctgacaactcaacctgcatgtgtcatattatctatgaccttatgtatggagtggtcaacttgtttcataggctggcaatgagcatgttattaatatagtggatgacaagtacttttcgaagtaactggacatgttgcaggtcaggggaatggaagtattgctatggactgaactgtgcccccaaaattcatatgttgaagccctgagctctgacatgattgtatctgaagtcctaaagccaggaatgaggaaggctgtgaatgtccattgttccatacaagaatgactcttctcttggctatttagagatcatgagggatactgccccagtttccacaggccagatggtctccaacaaaagccacgggggagtcacccctgcctggcagatctatcgggtcaggaccaccgcccagggggtcctggagaggacagtataggaccaaagaggattattcatgagcctaagatctcatgaaacgtgccttgctaagttttagacttgcataggaccatcatccccctgctcccccatccttttttattttttattgatagggtttcactctgtcatccaggctggagtgcagtacgatcacaactcactgtagcctcgaactcccatgctcaagccaccatgcccaactaattatctttattatttttgtagaaataaggtctccctatgttgcccaggctggtctcgaactcctggactcaagcaatcctcccacctcagcctcccaaagtgccggacgc

SEQ ID NO: 24636 - DNA, 943 bp, Homo sapiens; identical to SEQ ID NO: 24621
  misc_feature 1, 2: n = A,T,C or G

SEQ ID NO: 24637 - DNA, 1385 bp, Homo sapiens
  misc_feature 1372, 1373, 1374, 1375, 1376, 1377, 1378, 1379, 1380, 1381,1382, 1383, 1384, 1385: n = A,T,C or G
cctgccaccatgctcagttaatttttgtatttttagtagagatggggtttcaccatgttggtcaggttggcctcgaactcctgatctcaggtgatccacctgcctcggcttctcaaagtgctgggattccaggcatgagccaccatgcctggccgcatgtgtcattttcttgggtgttatactgatcgtatatttgcaggtttgcttttgtgacagacttcttctgggggaaaaaaagtatccttctatctttttacttttgtccagttccaggtatccctgtttttttcttcactcttccttccttgttcatgggagtttttcttgaggacttcaagcccagcttcggagaatcctggttgtgtcatctcatctcctttctgctctcttctctacctagcctttccaccctcacacctcccggggtctgaaaatggaaagataagggtgtttccctgaaagttgctcttctgtgtggggatgacaggttctaaagactcttttctggtccctgccctcattgccatgattaatcagttaagtggcccgaggttttataacagcacagtcttaaaatgcttctcccaagtttaatttctctccatttgaccttttaaggatgtgaattggctttaagcagtagactccctttagtacggcgctgtgagcctctcagtgaatctgctacatccattccacccacgggtctggaaacttgtctgtttacctttccctaaaaacctaagatatatttttaagaagtgccttgtaacttttcatatagcctttcccctactttgggtagactgtttcttacaggaatttggtagatctttccaaagagaattctgtatctgtatttttaaagcataaatcctgtcaactttggaggagaactgatttggcttgagttttctcagacatgggaacttttgacctaagtttgtattttacattgttgaaagggaactccgggatcccagaaaacatatggactgcaattgggtaaagtttctgttccagaaatgcctcttctggacatttcatacaaatggaaacatgcagcatgtagtaatttatgacagcttctttcacttagcatgaggttttcaaagttcattgatgtggtagcattgtcagtactctgtggcttattatggctggatatatttatcactatgggtttcccccatttcatcctttattatcctcatcagtcggtgagatgggggcgctacctgggcttttcacaatctcggtgaactctggtgatgtggggacgcatcttcaatttggggtttccggggaagggggggggggggaccagagggagggggggggatcccgggggaaccccccccaaggggttacnnnnnnnnnnnnnn

SEQ ID NO: 24638 - DNA, 1067 bp, Homo sapiens; identical to SEQ ID NO: 22309
  misc_feature 1, 2, 3, 4, 5, 6: n = A,T,C or G

SEQ ID NO: 24639 - DNA, 293 bp, Homo sapiens; identical to SEQ ID NO: 21414

SEQ ID NO: 24640 - DNA, 3483 bp, Homo sapiens; identical to SEQ ID NO: 21739

SEQ ID NO: 24641 - DNA, 4345 bp, Homo sapiens; identical to SEQ ID NO: 21910
  misc_feature 1, 2, 3, 4, 5, 6, 7, 8, 9, 10, 11, 12, 13, 14, 15, 16, 17,18, 19, 20, 21, 22, 23, 24, 25, 26, 27, 28, 29, 30: n = A,T,C or G

SEQ ID NO: 24642 - DNA, 1426 bp, Homo sapiens; identical to SEQ ID NO: 24420
  misc_feature 1317, 1426: n = A,T,C or G

SEQ ID NO: 24643 - DNA, 936 bp, Homo sapiens
  misc_feature 936: n = A,T,C or G
ggccccctgttgtgttgctgcggagaggcgcagtcatgcaggaaaacctcagatttgcttcatcaggagatgatattaaaatatgggatgcttcatctatgacattggtggataaattcaacccacacacatcaccacatggaatcagctcaatatgttggagcagcaataataactttttagtaacagcatcttccagtggcgacaaaatagttgtctcaagttgcaaatgtaaacctgttccacttttagagcttgctgaagggcaaaagcagacatgtgtcaatttaaattctacatctatgtatttggtaagcggaggcctaaataacactgttaatatttgggatttaaaatcaaaaagagttcatcgatctcttaaggatcataaagatcaagtaacttgtgtaacatacaattggaatgattgctacattgcttctggatctcttagtggtgaaattattttacacagtgtaaccactaatttatctagtactccttttggccatggtagtaaccagtctgttcggcacttgaagtactccttgtttaagaaatcactactgggcagtgtttcggataatggaatagtaactctctgggatgtaaatagtcagagtccataccataactttgacagtgtacacaaagctccagcgtcaggcatctgtttttctcctgtcaatgaattgctctttgtaaccataggcttggataaaagaatcatcctctatgacacttcaagtaagaagctagtgaaaactttagtggctgacactcctctaactgcggtagatttcatgcctgatggagccactttggctattggatcttcccgggggaaaatatatcaatatgatttaagaatgttggtatcgccagttaagaccatcagtgctcgcaaagtatttgttcagtgaatagcatttcagn

SEQ ID NO: 24644 - DNA, 371 bp, Homo sapiens
  misc_feature 1, 2, 370, 371: n = A,T,C or G
nnatcttgtttggatcaccacggagtataggtgtaggaccgcaggataaggctggacatctgctcgtatgtcatacattctgcggagggatgtagagatggcatactgcctggcctctaagatggttgagggatgctttgtgcatggccaaagaaccttggtacggatcaggagggagggtataactttggttttcttaaaagcttacagtgtttggctaattctcctcccctttttacaagacgggggccggagggtggacactggtggcaggttaagggatactgtcactttaagaagcctgcagatagaagtggaaacatggagaaattaggggctgattttttaaactgtgtgagatattaaccann

SEQ ID NO: 24645 - DNA, 589 bp, Homo sapiens
  misc_feature 1, 2, 3, 4, 588, 589: n = A,T,C or G
nnnnccgggtacatacgctaggcttttctgtagctatgtttatggctttacagcagattttatggagctgcaattactttgatcatgagggactgatgctagtggatttacttcaccaaatggaactcactttgtggcttctgaagaaggacctttgtggactgtcatggagtagttaagagtgcaggctctgatttagtgatcagagtctgcattgtcaggaatgggacaaagtgaagttatgtggcacttgataggatgccctgagaagattgcaacatcacccctgtgatattcctgctgaagatccataacctggatgtaatcatgaggatatatcagacaaacccacgtaaagagacatgctgtatacaaaactgtaatcttagaaagtgccaaggtcatgaaaatcaaagatagaccctggaactgttccaaactggaggggaccaaagaggcatgacaactaaacacaacacgtgattctgaactggatctttttgcttgaaaggaagttacagggacagttggaaaagtttaaatggggcctacaatgccgtggtaatgatgtgtccgtgttaatttccnn

SEQ ID NO: 24646 - DNA, 431 bp, Homo sapiens
  misc_feature 429, 430, 431: n = A,T,C or G
acgcggggagcctcaaaaactcacaccagctcctgcaaggaatgtgaatcttggagctcccagctattctgttcctgtttctgtcagctccttccctgaaaactcagaggtgctcagcatgccatgctaaaaggcaaaataaaaagatcttggagacatctcagctttaatgaggactttccaacattccagactgccgtcctgcaatgaagctctgagtcacggtctgtgaggctaaggtactggcaacggtgtgaaccccaggacaactaacctcactaaccttcactctaagcagaagcccaaagtgagtctggcctgaaatcagagcaagcactacagaaagacatctttgttaatggaaaagaggaaagaagaaaagaattttccaataaatttacaacaaacttttttaccattctaaagaannn

SEQ ID NO: 24647 - DNA, 1003 bp, Homo sapiens
  misc_feature 1, 1003: n = A,T,C or G
nccacagacggttggtgaacctacaccgcgccccccccgttgtgtccgcgggcccctcgggtgtcccccccgcgggcgtcccccctccccacggtgtgtcctcccgggggccccatcatcaccggcggaatcctccggccgggtctgttccccttggtttttttccccgttaccattaaactgccgcccacgcgccctcttctcacaatacgatgctgatcgccagatcgcccatccatgccatgtctattgtcttatgcttccacacgcctcctgcttcatgcttctagtctgaggacttggcttaatatgcttctgattgccactccctcttgttgacgattcttctttttattttgggagacggagttgctcttgtcacccaggctggagtgcagcgagactgcccatccacagatgaagggataaagtaactgtggtggacatacacaaagagaatagtcttcagccagaaaatcagaatgaaatttcatcctttggagccatactgttgaacctggaggacagcatggtaaatgacctgttcaaacacagctgcagggatgaggaaactgctgtacagatacaccacggaatatgtttcagccagaaacctttgggaaatcctgccatctgcagccacatgaagaaaccagaggctgctggggaagtggaggcagtctcagaaggaatcagtgatgggtacaaagttactctcagatgagactgatcaattctggccttctattccacagcagggtgactagcctgttcatccacagataaagagatcaagaaactctcatatacatacactaggaaatattctccagccatcaaaataatgaaacagtgtcatttagagcaacacagatgaaccgcggagacctgcctcctactccaccatcacatggaacccaccactgcttctccgaagctcgctctgaccacgccgctgctgctgcaggggcctcgcaggaagtgcagtctcccccgcgtaccn

SEQ ID NO: 24648 - DNA, 816 bp, Homo sapiens; identical to SEQ ID NO: 21390

SEQ ID NO: 24649 - DNA, 701 bp, Homo sapiens
  misc_feature 1, 683, 684, 685, 686, 687, 688, 689, 690, 691, 692, 693,694, 695, 696, 697, 698, 699, 700, 701: n = A,T,C or G
naggaattggcacgaggcaattcgaaaggcatgtattagcttggaagaagattaccggccaggaataacttatattgtggtgcaaaaaagacatcacacacgactcttctgtgcagataaaacagaaagggtagggtctgagtttgacttttacctctgtagtcatgcaggaattcagggaaccagccgtccctcacattaccaggtcttgtgggatgacaactgcttcactgcagatgaactccagctactgacttaccagctgtgtcacacctatgtgaggtgcactcgctcagtctctattccagcccctgcatattatgcccggcttgtagcatttagggcaaggtatcatctggtggataaagatcatgacagtgcggaaggcagtcatgtgtcaggacagagcaacggccgggatcctcaggccttggctaaggctgtgcaaatccaccatgatacccagcacacgatgtattttgcctgagagtctcagaaaaagaactcaaccaatttggcaccccatgcagcctcaaaatgtttcaaatgcctaccgcctctagatcgagccacgttgacttcagttggtgtcctgtcactttgttttaaaataagctagaaccaggatgcttccttattggaaaggctttgccagtccttaaggtagcatcctggttctaccnnnnnnnnnnnnnnnnnnn

SEQ ID NO: 24650 - DNA, 6132 bp, Homo sapiens
ataggcagtcgacccacgcgtccgaagcgcgcggctcctccgccttgccagccactgcgcccgagctggcctgcgagttcagggctcctgccgctctccaggagcaacctctactccggacgcacaggcattccccgcgcccctccagccctcgccgccctcgccaccgctcccggccgccgcgctccggtacacacaggatccctgctgggcaccaacagctccaccatggggctggcctggggactaggcgtcctgttcctgatgcatgtgtgtggcaccaaccgcattccagagtctggcggagacaacagcgtgtttgacatctttgaactcaccggggccgcccgcaaggggtctgggcgccgactggtgaagggccccgacccttccagcccagctttccgcatcgaggatgccaacctgatcccccctgtgcctgatgacaagttccaagacctggtggatgctgtgcgggcagaaaagggtttcctccttctggcatccctgaggcagatgaagaagacccggggcacgctgctggccctggagcggaaagaccactctggccaggtcttcagcgtggtgtccaatggcaaggcgggcaccctggacctcagcctgaccgtccaaggaaagcagcacgtggtgtctgtggaagaagctctcctggcaaccggccagtggaagagcatcaccctgtttgtgcaggaagacagggcccagctgtacatcgactgtgaaaagatggagaatgctgagttggacgtccccatccaaagcgtcttcaccagagacctggccagcatcgccagactccgcatcgcaaaggggggcgtcaatgacaatttccagggggtgctgcagaatgtgaggtttgtctttggaaccacaccagaagacatcctcaggaacaaaggctgctccagctctaccagtgtcctcctcacccttgacaacaacgtggtgaatggttccagccctgccatccgcactaactacattggccacaagacaaaggacttgcaagccatctgcggcatctcctgtgatgagctgtccagcatggtcctggaactcaggggcctgcgcaccattgtgaccacgctgcaggacagcatccgcaaagtgactgaagagaacaaagagttggccaatgagctgaggcggcctcccctatgctatcacaacggagttcagtacagaaataacgaggaatggactgttgatagctgcactgagtgtcactgtcagaactcagttaccatctgcaaaaaggtgtcctgccccatcatgccctgctccaatgccacagttcctgatggagaatgctgtcctcgctgttggcccagcgactctgcggacgatggctggtctccatggtccgagtggacctcctgttctacgagctgtggcaatggaattcagcagcgcggccgctcctgcgatagcctcaacaaccgatgtgagggctcctcggtccagacacggacctgccacattcaggagtgtgacaaaagatttaaacaggatggtggctggagccactggtccccgtggtcatcttgttctgtgacatgtggtgatggtgtgatcacaaggatccggctctgcaactctcccagcccccagatgaatgggaaaccctgtgaaggcgaagcgcgggagaccaaagcctgcaagaaagacgcctgccccatcaatggaggctggggtccttggtcaccatgggacatctgttctgtcacctgtggaggaggggtacagaaacgtagtcgtctctgcaacaaccccacaccccagtttggaggcaaggactgcgttggtgatgtaacagaaaaccagatctgcaacaagcaggactgtccaattgatggatgcctgtccaatccctgctttgccggcgtgaagtgtactagctaccctgatggcagctggaaatgtggtgcttgtccccctggttacagtggaaatggcatccagtgcacagatgttgatgagtgcaaagaagtgcctgatgcctgcttcaaccacaatggagagcaccggtgtgagaacacggaccccggctacaactgcctgccctgccccccacgcttcaccggctcacagcccttcggccagggtgtcgaacatgccacggccaacaaacaggtgtgcaagccccgtaacccctgcacggatgggacccacgactgcaacaagaacgccaagtgcaactacctgggccactatagcgaccccatgtaccgctgcgagtgcaagcctggctacgctggcaatggcatcatctgcggggaggacacagacctggatggctggcccaatgagaacctggtgtgcgtggccaatgcgacttaccactgcaaaaaggataattgccccaaccttcccaactcagggcaggaagactatgacaaggatggaattggtgatgcctgtgatgatgacgatgacaatgataaaattccagatgacagggacaactgtccattccattacaacccagctcagtatgactatgacagagatgatgtgggagaccgctgtgacaactgtccctacaaccacaacccagatcaggcagacacagacaacaatggggaaggagacgcctgtgctgcagacattgatggagacggtatcctcaatgaacgggacaactgccagtacgtctacaatgtggaccagagagacactgatatggatggggttggagatcagtgtgacaattgccccttggaacacaatccggatcagctggactctgactcagaccgcattggagatacctgtgacaacaatcaggatattgatgaagatggccaccagaacaatctggacaactgtccctatgtgcccaatgccaaccaggctgaccatgacaaagatggcaagggagatgcctgtgaccacgatgatgacaacgatggcattcctgatgacaaggacaactgcagactcgtgcccaatcccgaccagaaggactctgacggcgatggtcgaggtgatgcctgcaaagatgattttgaccatgacagtgtgccagacatcgatgacatctgtcctgagaatgttgacatcagtgagaccgatttccgccgattccagatgattcctctggaccccaaagggacatcccaaaatgaccctaactgggttgtacgccatcagggtaaagaactcgtccagactgtcaactgtgatcctggactcgctgtaggttatgatgagtttaatgctgtggacttcagtggcaccttcttcatcaacaccgaaagggacgatgactatgctggatttgtctttggctaccagtccagcagccgcttttatgttgtgatgtggaagcaagtcacccagtcctactgggacaccaaccccacgagggctcagggatactcgggcctttctgtgaaagttgtaaactccaccacagggcctggcgagcacctgcggaacgccctgtggcacacaggaaacacccctggccaggtgcgcaccctgtggcatgaccctcgtcacataggctggaaagatttcaccgcctacagatggcgtctcagccacaggccaaagacgggtttcattagagtggtgatgtatgaagggaagaaaatcatggctgactcaggacccatctatgataaaacctatgctggtggtagactagggttgtttgtcttctctcaagaaatggtgttcttctctgacctgaaatacgaatgtagagatccctaatcatcaaattgttgattgaaagactgatcataaaccaatgctggtattgcaccttctggaactatgggcttgagaaaacccccaggatcacttctccttggcttccttcttttctgtgcttgcatcagtgtggactcctagaacgtgcgacctgcctcaagaaaatgcagttttcaaaaacagactcagcattcagcctccaatgaataagacatcttccaagcatataaacaattgctttggtttccttttgaaaaagcatctacttgcttcagttgggaaggtgcccattccactctgcctttgtcacagagcagggtgctattgtgaggccatctctgaagcagtggactcaaaagcattttcaggcatgtcagagaagggaggactcactagaattagcaaacaaaaccaccctgacatcctccttcaggaacacggggagcagaggccaaagcactaaggggagggcgcatacccgagacgattgtatgaagaaaatatggaggaactgttacatgttcggtactaagtcattttcaggggattgaaagactattgctggatttcatgatgctgactggcgttagctgattaacccatgtaaataggcacttaaatagaagcaggaaagggagacaaagactggcttctggacttcctccctgatccccacccttactcatcacctgcagtggccagaattagggaatcagaatcaaaccagtgtaaggcagtgctggctgccattgcctggtcacattgaaattggtggcttcattctagatgtagcttgtgcagatgtagcaggaaaataggaaaacctaccatctcagtgagcaccagctgcctcccaaaggaggggcagccgtgcttatatttttatggttacaatggcacaaaattattatcaacctaactaaaacattccttttctcttttttcctgaattatcatggagttttctaattctctcttttggaatgtagattttttttaaatgctttacgatgtaaaatatttattttttacttattctggaagatctggctgaaggattattcatggaacaggaagaagcgtaaagactatccatgtcatctttgttgagagtcttcgtgactgtaagattgtaaatacagattatttattaactctgttctgcctggaaatttaggcttcatacggaaagtgtttgagagcaagtagttgacatttatcagcaaatctcttgcaagaacagcacaaggaaaatcagtctaataagctgctctgccccttgtgctcagagtggatgttatgggattctttttttctctgttttatcttttcaagtggaattagttggttatccatttgcaaatgttttaaattgcaaagaaagccatgaggtcttcaatactgttttaccccatcccttgtgcatatttccagggagaaggaaagcatatacacttttttctttcatttttccaaaagagaaaaaaatgacaaaaggtgaaacttacatacaaatattacctcatttgttgtgtgactgagtaaagaatttttggatcaagcggaaagagtttaagtgtctaacaaacttaaagctactgtagtacctaaaaagtcagtgttgtacatagcataaaaactctgcagagaagtattcccaataaggaaatagcattgaaatgttaaatacaatttctgaaagttatgtttttttttctatcatctggtataccattgctttatttttataaattattttctcattgccattggaatagatatctcagattgtgtagatatgctatttaaataatttatcaggaaatactgcctgtagagttagtatttctatttttatataatgtttgcacactgaattgaagaattgttggttttttctttttttctctgttttatcttttcaagtggaattagttggttatccatttgcaaatgttttaaattgcaaagaaagccatgaggtcttcaatactgttttaccccatcccttgtgcatatttccagggagaaggaaagcatatacacttttttctttcatttttccaaaagagaaaaaaatgacaaaaggtgaaacttacatacaaatattacctcatttgttgtgtgactgagtaaagaatttttggatcaagcggaaagagtttaagtgtctaacaaacttaaagctactgtagtacctaaaaagtcagtgttgtacatagcataaaaactctgcagagaagtattcccaataaggaaatagcattgaaatgttaaatacaatttctgaaagttatgttttttttctatcatctggtataccattgctttatttttataaattattttctcattgccattggaatagatatctaaattgtgtagatatgc

SEQ ID NO: 24651 - DNA, 1380 bp, Homo sapiens; identical to SEQ ID NO: 20118
  misc_feature 1380: n = A,T,C or G

SEQ ID NO: 24652 - DNA, 1118 bp, Homo sapiens
  misc_feature 1117, 1118: n = A,T,C or G
acgcggggggagctgaggggaggatcttactgaaagcaccctggggagattgattgtccttaaacctaagccccacaaacttgacacctgatcaggtctgggagctacaaaatttcatttttctcctcactgcccttcttctgagtggcattggcctgaatcaaggaaagccaggccttgtgggccccccctttctttcggctttctgccctaaagcaacacctccagcagagattcccttaagtgactccaggttttccaccatccttcagcgtgaattaatttttaatcagtttgctttctccagagaaattttaaaataatagaagaaatagaaattttgaatgtataaaagaaaaagatcaagttgtcattttagaacagagggaactttgggagaaagcagcccaagtaggttatttgtacagtcagagggcaacaggaagatgcaggccttcaagggcaaggagaggccacaaggaatatgggtgggagtaaaagcaacatcgtctgcttcatactttttcctaggcttggcactgccttttcctttctcaggccaatggcaactgccatttgagtccggtgagggatcagccaacctcttctctatggctcaccttatttggagtgagaaatcaaggagacagagctgactgcatgatgagtctgaaggcatttgcaggatgagcctgaactggttgtgcagaacaaacaaggcattcatgggaattgttgtattccttctgcagccctccttctgggcactaagaaggtctatgaattaaatgcctatctaaaattctgatttattcctacattttctgttttctaatttgaccctaaaatctatgtgttttagacttagactttttattgcccccccccccctttttttttttgagacggagtctcgctccagcctgggggacagagtgaagcggctccgatctctgctcactgaaagctccgcctcccgggttcacgccattctcctgcctcagcctcctgggtagctgggactgcaggcgcccaccaccacgcccgggtaattttttgtgtttttaatagagacggggtttcactgtgttggccaggatggtctcgatctcctgann

SEQ ID NO: 24653 - DNA, 328 bp, Homo sapiens
aatgacagtcttatatttaaggcaccagtcattgtttccattttttttttaattcttcccttggattaatattttctactgaaaaggaatgaaatctcagttccactatgataaaagaaacgaatcaccagtgtctgtcagtgcccccactgctcctcctcataccagcattgacactggtagctgaggaaggggactgctcaatttctaatgtgatctattcaagaagccacatataaaaaggcattgagggctcactgtccagagaattgcttttgtaaatgctccacaacgtatgggcaaaagtttaaggactactgcctgatgt

SEQ ID NO: 24654 - DNA, 1574 bp, Homo sapiens
  misc_feature 1574: n = A,T,C or G
accacaagaccacccaagtgtaaggagcaatgcagtcgaccaccaacttgtcatcatacaagtcaagaaaaacatcgctgtcactttggttcttgtccaccatgtcatcaaccttgccaaaaagttttggagaaatgtggtcacttgtgtcctgctccgtgtcatgatcaagcgttaataaagcagactggcaggcaccagcctacaggcccttgggaacagccttctgagccagcatttattcagactgcattaccgtgtcctccatgtcaagttcctattcctatggaatgtcttgggaaacatgaggtgagtccactaccatgccatgctgtaggaccctactcttgtaaaagagtttgtggaagaatcttggattgtcagaatcacacatgtatgaaagaatgccacaaagtaaccaaaactgatggctgcactggaaaaaacaaggctggcccagaatgccttcattgtgaggaagggtgctccaagtcacggccactaggttgtcttcacccatgtattttgcgatgtcaccctggagaatgtccaccttgtgttcagatgcttagaataaaatgtcactgtaagatcacaagcctgtatgtggaatgtagaaaaataaccacagctgatgtaaatgaaaagaacctcctcagttgttgcaaaaatcagtgccctaaagagcttccttgtggtcatagatgcaaagagatgtgtcatcctggtgaatgtccctttaactgcaaccagaaggtaaaacttagatgtccttgtaaaagaataaaaaaggaattgcagtgcaacaaagtacgtgaaaatcaggtttcaatagaatgtgacacaacgtgcaaggaaatgaagcggaaagcatctgagataaaagaagcagaagccaaagctgctcttgaagaagaaaaacgaagacaacaggctgaactagaagcttttgaaaacagactgaagggtcgtcggaagaagaacaggaaaagagatgaagtggcagttgagctatcactatggcaaaaacataaatattatctcatttcagtgtgtggagttgtggttgtagtgtttgcctggtacatcacccatgatgtcaattaaaaaaagttttgatcttttaatgtaactcagattggatttagataagttgttaaatttgaaatattagaaaatgtatattatagaacatgatatatatttacattcatctctgtattctctcagctgttgttagaaggacagaatgttaaactttatcttaattagtatactagaaagggcagtataatactgtttaaagtgaaggcatgactgaaactaaaatatttcataaggcttagctagaggcagagtaacgtgttttgtcatttgggttcctgtacttaggtttctcattaataattcaaaccaccactttaaaaaataattcgatgagatgagcaatttggggagaggaaaattcctaatgtggtactagaagagagatttgactgacttggcttaaaagttttagacctatggacgggtttttatcacaggttagggaattacaaaggtgggggtccaan

SEQ ID NO: 24655 - DNA, 1782 bp, Homo sapiens; identical to SEQ ID NO: 21380
  misc_feature 1766, 1767, 1768, 1769, 1770, 1771, 1772, 1773, 1774, 1775,1776, 1777, 1778, 1779, 1780, 1781, 1782: n = A,T,C or G

SEQ ID NO: 24656 - DNA, 1648 bp, Homo sapiens; identical to SEQ ID NO: 20874
  misc_feature 1, 2: n = A,T,C or G

SEQ ID NO: 24657 - DNA, 893 bp, Homo sapiens
  misc_feature 883, 884, 885, 886, 887, 888, 889, 890, 891, 892, 893: n = A,T,C or G
acttctagaattaattaacgcgggggggcgactgcgcacgcgcggctggttataaacaacttgtgaaatgagtgatttggaagatgatgagacaccccagctttctgcccatgccttagcagctctccaggaattttatgctgagcaaaagcaacaaattgagccaggcgaggatgataaatataacattggaataatagaagagaattggcaactgagccagttttggtatagtcaggaaactgctctgcagctggcacaggaggcaattgcagctgtaggagaaggtggcagaatcgcatgtgtgagtgcccctagtgtttaccagaaactcagagagctgtgcagagaaaacttttcgatatacatctttgaatatgacaaaagatttgccatgtatggagaggagtttattttctatgattacaataatccattggacttacccgaaagaattgctgcacatagttttgacatcgtaatagcagatcctccctatctttcggaggaatgtctcagaaaaacatcggaaaccgtcaagtacctgacgcggggcaagattctgctgtgcacaggtgccatcatggaagaacaggcagcagaactccttggagtgaagatgtgcacgtttgttccaagacacacccggaacttggcaaatgagtttcgctgttatgtgaattatgattctgggctggactgtgggatctgattacagacggtgacataacacaggaaggaaccctgtcacattcctctttttgtattttcgtagtagatttaaaagttataatctcttcccctccccccaaactggagctgtccctggcctggttttcaaaataaagtgtgcgatctttcataaaaaaaaattgacacgccnnnnnnnnnnn

SEQ ID NO: 24658 - DNA, 4995 bp, Homo sapiens
  misc_feature 1, 2, 3, 4, 5, 4989, 4990, 4991, 4992, 4993, 4994, 4995: n = A,T,C or G
nnnnnaaggggataagcttgcggccgccgtggccctcacagtcggcgtttcgccgcctgcccgcggtgcccgcgcacgccggccgccatcgccttcgcgcctggctggcgggggcgctgtcctcccaggccgtccgcgccgctccctggagctcggcggagcgcggcagccagggccggcggaggcgcgaggagccgggcgccaccgccgccgccgccgccgccgccgcgggggccatgaccgtggagcagaacgtgctgcagcagagcgcggcgcagaagcaccagcagacgtttttgaatcaactgagagaaattacggggattaatgacacccagatactacagcaagccttgaaggatagtaatggaaacttggaattagcagtggctttccttactgcgaagaatgctaagacccctcagcaggaggagacaacttactaccaaacagcacttcctggcaatgatagatacatcagtgtgggaagccaagcagatacaaatgtgattgatctcactggagatgataaagatgatcttcagagagcaattgccttgagtttggccgaatcaaacagggcattcagggagactggaataactgatgaggaacaagccattagcagagttcttgaagccagcatagcagagaataaagcatgtttgaagaggacacctacagaagtttggagggattctcgaaacccttatgatagaaaaagacaggacaaagctcccgttgggctaaagaatgttggcaatacttgttggtttagtgctgttattcagtcattatttaatcttttggaatttagaagattagttctgaattacaagcctccatcaaatgctcaagatttaccccgaaaccaaaaggaacatcggaatttgccttttatgcgtgagctgaggtatctatttgcacttcttgttggtaccaaaaggaagtatgttgatccatcaagagcagttgaaattcttaaggatgctttcaaatcaaatgactcacagcagcaagatgtgagtgagtttacacacaaattattagattggttagaagatgccttccaaatgaaagctgaagaggagacggatgaagagaagccaaagaaccccatggtagagttgttctatggcagattcctggctgtgggagtacttgaaggtaaaaaatttgaaaacactgaaatgtttggtcagtacccacttcaggtcaatgggttcaaagatctgcatgagtgcctagaagctgcaatgattgaaggagaaattgagtctttacattcagagaattcaggaaaatcaggccaagagcattggtttactgaattaccacctgtgttaacatttgaattgtcaagatttgaatttaatcaggcattgggaagaccagaaaaaattcacaacaaattagaatttccccaagttttatatttggacagatacatgcacagaaacagagaaataacaagaattaagagggaagagatcaagagactgaaagattacctcacggtattacaacaaaggctagaaagatatttaagctatggttccggtcccaaacgattccccttggtagatgttcttcagtatgcattggaatttgcctcaagtaaacctgtttgcacttctcctgttgacgatattgacgctagttccccacctagtggttccataccatcacagacattaccaagcacaacagaacaacagggagccctatcttcagaactgccaagcacatcaccttcatcagttgctgccatttcatcgagatcagtaatacacaaaccatttactcagtcccggatacctccagatttgcccatgcatccggcaccaaggcacataacggaggaagaactttctgtgctggaaagttgtttacatcgctggaggacagaaatagaaaatgacaccagagatttgcaggaaagcatatccagaatccatcgaacaattgaattaatgtactctgacaaatctatgatacaagttccttatcgattacatgccgttttagttcacgaaggccaagctaatgctgggcactactgggcatatatttttgatcatcgtgaaagcagatggatgaagtacaatgatattgctgtgacaaaatcatcatgggaagagctagtgagggactcttttggtggttatagaaatgccagtgcatactgtttaatgtacataaatgataaggcacagttcctaatacaagaggagtttaataaagaaactgggcagccccttgttggtatagaaacattaccaccggatttgagagattttgttgaggaagacaaccaacgatttgaaaaagaactagaagaatgggatgcacaacttgcccagaaagctttgcaggaaaagcttttagcgtctcagaaattgagagagtcagagacttctgtgacaacagcacaagcagcaggagacccagaatatctagagcagccatcaagaagtgatttctcaaagcacttgaaagaagaaactattcaaataattaccaaggcatcacatgagcatgaagataaaagtcctgaaacagttttgcagtcggcaattaagttggaatatgcaaggttggttaagttggcccaagaagacaccccaccagaaaccgattatcgtttacatcatgtagtggtctactttatccagaaccaggcaccaaagaaaattattgagaaaacattactagaacaatttggagatagaaatttgagttttgatgaaaggtgtcacaacataatgaaagttgctcaagccaaactggaaatgataaaacctgaagaagtaaacttggaggaatatgaggagtggcatcaggattataggaaattcagggaaacaactatgtatctcataattgggctagaaaattttcaaagagaaagttatatagattccttgctgttcctcatctgtgcttatcagaataacaaagaactcttgtctaaaggcttatacagaggacatgatgaagaattgatatcacattatagaagagaatgtttgctaaaattaaatgagcaagccgcagaactcttcgaatctggagaggatcgagaagtaaacaatggtttgattatcatgaatgagtttattgtcccatttttgccattattactggtggatgaaatggaagaaaaggatatactagctgtagaagatatgagaaatcgatggtgttcctaccttggtcaagaaatggaaccacacctccaagaaaagctgacagattttttgccaaaactgcttgattgttctatggagattaaaagtttccatgagccaccgaagttaccttcatattccacgcatgaactctgtgagcgatttgcccgaatcatgttgtccctcagtcgaactcctgctgatggaagataaactgcacactttccctgaacacactgtataaactctttttagttcttaacccttgccttcctgtcacagggtttgcttgttgctgctatagtttttaacttttttttattttaataactgcaaaagacaaaatgactatacagactttagtcagactgcagacaataaagctgaaaatcgcatggcgctcagacattttaaccggaactgatgtataatcacaaatctaattgattttattatggcaaaactatgcttttgccaccttcctgttgcagtattactttgcttttatcttttctttctcaacagctttccattcagtctggatccttccatgactacagccatttaagtgttcagcactgtgtacgatacataatatttggtagcttgtaaatgaaataaagaataaagttttatttatggctacctatgtgtttgtaagcaggtatattgtatattagtgtattagtaatactagataaatgaattttgtctggggattaagattggatagttaatagattaatacaatcttttaattctgctctaatgctagcaaattggaaaatgtttaagtctttgacacttaaatttatctatatttttaacaaagttcttgaacttagtatggcaccggaacctgttttgaattcagtcaggtttttactcaagtaagtggttgattttttttaagtcaaactacactgaaacttttatccttttcttagattaatcttactttttaaatgtatttacaatatacagcaaggtgattatttcaagagaatcccaaagtacttgaataagggctattgtaaaatttaaaagaaatatttatatatacacatatatacacatacacacatgtatatatatattcttcataatggaggacaatgttttgcaatatataaatcattctatttttgtaaattgtatatcactttaattgaaaatgttctctactaattaatactgtgaaacaaaattgatgttgtttaactagaagttatgagtatcttaactgcctttattccttttcaaaaaggaaaaagctgtagaacattttgtagatgaaactactgtttaagattaatgaattaatattgtgaatgaaaatcaaaatccatactttaaaggtaatcatgttactaacaacctatttttgaattcataaaaatttctttataaatgatgttttgtgaacatagtaaaatagaccattatactatgtgtatgtttgatacagcgtcgccaaaactagtgttctttattagtgcctctcacaaaagatcctggatggaggagtaagatgaaatattatgctattatatgatgctgtttgtaaaggtattaatgtactagtaaggtgttaatgacaaggaattagtactattcctgttgtaaagttagattttgcatattgtatctatcaaaatatgtttgggtttagattttaagttgtctactgagcagatttctgcattggttttccagtcctgttaaaagtttagaaacttcatatgtgtcatcacagcttttgtaaagaaagtatccttaatattttatgacattctannnnnnn

SEQ ID NO: 24659 - DNA, 3169 bp, Homo sapiens
  misc_feature 1, 3167, 3168, 3169: n = A,T,C or G
nacaggtctagacatgaaggtaagggttccacaaagttaacttttaataaataaaaacttgaataatatattgatatattttacctttaatattgaacattgtgttttcattttagcacaaaccttttatagtgaactgttttctaatttttctttagtttcacattattcaatgtggctcttggtgagttgggctcattgctgttctttagtgaaatctagccttgctgatagcgatcatttacaagattggctaaagaaattgactctccttattcctgagactgcagttcgtcatgaatcatgcagtggtctctataagttatccctgtcagggctggatggaggagactcaatcaatcgttcttttctgctattggctgcctcaacattattgaaatttcttcctgatgctcaagcactcaaacctattaggatagatgattatgaggaagaaccaatattaaaaccaggatgtaaagagtatttttggttgttatgcaaattagttgacaacatacatataaaggacgctagtcagacaacgctcctcgacttagatgccttggcaagacatttggctgactgtattcgaagtagggagatccttgatcatcaggatggtaatgtagaagatgatgggcttacaggactcctaaggcttgcaacaagtgttgttaaacacaaaccaccctttaaattttcaagggaaggacaggaatttttgagagatatcttcaatctcctgtttttgttgccaagtctaaaggaccgacaacagccaaagtgcaaatcacattcttcaagagctgccgcttacgatttgttagtagagatggtaaaggggtctgttgagaactacaggctaatacacaactgggttatggcacaacacatgcagtcccatgcaccttataaatgggattactggcctcatgaagatgtccgtgctgaatgtagatttgttggccttactaaccttggagctacttgttacttagcttctactattcagcaactttatatgatacctgaggcaagacaggctgtcttcactgccaagtattcagaggatatgaagcacaagaccactcttctggagcttcagaaaatgtttacatatttaatggagagtgaatgcaaagcatataatcctagacctttctgtaaaacatacaccatggataagcagcctctgaatactggggaacagaaagatatgacagagttttttactgatctaattaccaaaatcgaagaaatgtctcccgaactgaaaaataccgtcaaaagtttatttggaggtgtaattacaaacaatgttgtatccttggattgtgaacatgttagtcaaactgctgaagagttttatactgtgaggtgccaagtggctgatatgaagaacatttatgaatctcttgatgaagttactataaaagacactttggaaggtgataacatgtatacttgttctcattgtgggaagaaagtacgagctgaaaaaagggcatgttttaagaaattgcctcgcattttgagtttcaatactatgagatacacatttaatatggtcacgatgatgaaagagaaagtgaatacacacttttccttcccattacgtttggacatgacgccctatacagaagattttcttatgggaaagagtgagaggaaagaaggttttaaagaagtcagtgatcattcaaaagactcagagagctatgaatatgacttgataggagtgactgttcacacaggaacggcagatggtggacactattatagctttatcagagatatagtaaatccccatgcttataaaaacaataaatggtatctttttaatgatgctgaggtaaaaccttttgattctgctcaacttgcatctgaatgttttggtggagagatgacgaccaagacctatgattctgttacagataaatttatggacttctcttttgaaaagacacacagtgcatatatgctgttttacaaacgcatggaaccagaggaagaaaatggcagagaatacaaatttgatgtttcgtcagagttactagagtggatttggcatgataacatgcagtttcttcaagacaaaaacatttttgaacatacatattttggatttatgtggcaattgtgtagttgtattcccagtacattaccagatcctaaagctgtgtccttaatgacagcaaagttaagcacttcctttgtcctagagacatttattcattctaaagaaaagcccacgatgcttcagtggattgaactgttgacgaaacagtttaataatagtcaggcagcttgtgagtggtttttagatcgtatggctgatgacgactggtggccaatgcagatactaattaagtgccctaatcaaattgtgagacagatgtttcagcgtttgtgtatccatgtgattcagaggctgagacctgtgcatgctcatctctatttgcagccaggaatggaagatgggtcagatgatatggatacctcagtagaagatattggtggtcgttcatgtgtcactcgctttgtgagaaccctgttattaattatggaacatggtgtaaaacctcacagtaaacatcttacagagtattttgccttcctttacgaatttgcaaaaatgggtgaagaagagagccaatttttgctttcattgcaagctatatctacaatggtacatttttacatgggaacaaaaggacctgaaaatcctcaagttgaagtgttatcagaggaagaaggggaagaagaagaggaggaagaagatatcctctctctggcagaagaaaaatacaggccagctgcccttgaaaagatgatagctttagttgctcttttggttgaacagtctcgatcagaaaggtgaaatgtttcgaatttaaaatgtttaaagcatgtttggttttattatttttacataattgtttaccactagtttttccactagctttttattatatatgtttaattatgtaattgttattcactagcttttattatataaatccttttaaataatactactattcatcaactcttgtggcataagaatttcagttttttctaccaaacttttacttcatctatgagtcgtgttagaaatagtcattgaaaaaatatacagtaaaatatctaaaaaaaaaaaaaannn

SEQ ID NO: 24660 - DNA, 607 bp, Homo sapiens; identical to SEQ ID NO: 21409
  misc_feature 1, 2, 3, 4, 5, 606, 607: n = A,T,C or G

SEQ ID NO: 24661 - DNA, 936 bp, Homo sapiens; identical to SEQ ID NO: 24643
  misc_feature 936: n = A,T,C or G

SEQ ID NO: 24662 - DNA, 3645 bp, Homo sapiens; identical to SEQ ID NO: 22685

SEQ ID NO: 24663 - DNA, 2931 bp, Homo sapiens
  misc_feature 1, 2, 3, 4, 2929, 2930, 2931: n = A,T,C or G
nnnncgtccgccggagtggccccggtcgctctgtcggggtcccctccatctcgctgctgctgaaggccgcgagggcggcggcgatggcggaggcggcgctgttgctgctgcctgaggcggcggcggagcgggacgctagggaaaagctggctctctgggatcggagaccggacacgacggcgccgctgaccgacaggcagacggactcggtattggagctgaaggcggcggcagagaacttgccggtgccagctgagcttccaattgaagacttgtgcagtttaacatcccagtcactgcccattgaactgacttcagtagtgcctgaatctacagaagacattctcttgaagggcttcacttccttaggaatggaagaagaaagaattgaaaccgcacagcagtttttctcatggtttgcaaagctgcaaactcagatggatcaagatgaaggaactaaatatagacagatgagggattacttgtctgggtttcaggagcagtgtgatgctatattgaatgatgtaaacagtgctcttcagcatctggagtctttgcagaaacagtatctttttgtgtccaataagacaggaaccctacatgaagcctgtgaacagctcctaaaagaacagtcggaacttgttgatctggctgaaaacattcaacaaaagctttcctattttaacgaattggaaactattaacacaaaattgaattcccctacattgtcggtgaatagtgacggatttatacctatgctggccaagttagatgattgtataacatatatctcatctcatcctaattttaaagattatcccatatatttgctgaagtttaaacagtgtctttctaaagctttgcacctcatgaagacatatactgtgaacacactacagaccctcacaagtcagttactgaaaagggatccttcatctgtacctaatgcagacaatgccttcacattattttatgtgaaatttcgagctgctgcccccaaagtcagaactcttattgaacaaatagaactgcggtctgaaaaaatacctgaataccaacaactgctaaatgatatccaccagtgttaccttgatcagcgggagctccttttgggccctagtattgcttgcactgttgcagagttaaccagccaaaataatagagatcactgtgccttggttcgtagtggctgtgccttcatggttcatgtctgccaggatgaacaccaactttacaatgaatttttcacaaaaccaacatcaaaattagatgagcttttggagaaactgtgtgtgtcattgtatgatgtcttcaggccattgatcattcatgttattcacttagagactctgtcggaactttgtgggattcttaaaaatgaggtgcttgaagatcatgtgcagaacaatgctgagcaactgggggcatttgcagctggagtcaagcagatgttagaagatgtacaggagcggctcgtctaccgaacccacatctatattcagacggacatcacgggctataaaccagctcctggagatctggcatatcccgataagttagtcatgatggagcaaattgcacagagtttgaaagatgaacagaagaaggtaccttcagaagcttcattttcagatgttcacttagaagaaggagagtctaacagtctgacaaaatctggttcaacagaatccctcaatcctagaccacagaccacaatttctccagcagatcttcatggaatgtggtatcctacggttcgaagaactcttgtctgtctctccaaattatacagatgcatagatagggcagtgttccaaggattatcacaggaagcattgtctgcctgcattcagtccttacttggagcgtcagagtctatcagcaaaaacaagactcagattgatggacaacttttcttaattaagcaccttttgatacttcgtgaacaaattgctccatttcacactgaattcaccattaaggaaatttccctggacctcaagaaaactagagatgcagcatttaaaatcctgaaccctatgactgtcccaagattttttaggctgaatagcaacaatgccttgatagagttcttgttggagggtactcctgagataagagaacattatcttgactctaaaaaagacgtagaccgtcatctgaaatcggcctgtgagcagtttattcagcagcagaccaagctgttgtagaacagctggaggagttcatgacaaaggtttcagcgttaaaaacaatggccagtcagggaggccccaagtatactctctcacagcagccttgggcacaaccagcaaaggtcaatgaccttgcggcaactgcatataagacaataaaaacaaagctgcctgtgacattgagaagtatgtccttgtacctatccaataaagataccgagttcatcttgtttaaacctgtgaggaataatattcagcaagtcttccagaagttccacgctctgttaaaggaagagttcagccctgaagacatccagatcattgcctgtccatctatggaacagctgagccttctgctgtcggtttattaaataagcaggccagcgggctgtgcacctaaatgtctgcctgggaggagcacgctgagaagtctgcagactgcaggacaccgaggcatccgtatgtgggaacgtcccgaagaaccaaacgaagggtctgtcagtgctgacttgcgagaaataggacgcagggttccggctcggtctctttaaacgtcaatgcagaaaacttggatggaacacgcccgtacaatgggcatagactgaacagtatggcacagcaacgggtgccaggcgcaacacacaagtgtggaattcgacaaaaataggacagtcaagcacgactacgcagagtcttatcggtcataagagtgcaccggccctcacccccgtccnnn

SEQ ID NO: 24664 - DNA, 1648 bp, Homo sapiens; identical to SEQ ID NO: 20874
  misc_feature 1, 2: n = A,T,C or G

SEQ ID NO: 24665 - DNA, 2538 bp, Homo sapiens; identical to SEQ ID NO: 20316
  misc_feature 2538: n = A,T,C or G

SEQ ID NO: 24666 - DNA, 3014 bp, Homo sapiens
  misc_feature 109, 110, 111, 112, 113, 114, 115, 116, 117, 118, 119, 120,121, 122, 123, 124, 125, 126, 127, 128, 129, 130, 131, 132,133, 134, 135, 136, 137, 138, 139, 140, 141, 142, 143, 144,145, 146, 147, 148, 149, 150, 151, 152, 153, 154, 155: n = A,T,C or G
  misc_feature 156, 3014: n = A,T,C or G
acgcctaaccgctaacattactgcaggccacctactcatgcacctaattggaagcgccaccctagcaatatcaaccattaaccttccctctacacttatcatcttcacnnnnnnnnnnnnnnnnnnnnnnnnnnnnnnnnnnnnnnnnnnnnnnnnacaatccagaaaattaagaaggaagggaagatgtctgagtgcttgttaaaagccatgctgaattgtaaaacttttgaagaactagaacacgtgtctgctccatataaaactggaagcaaagggactaaagcccagagagcaagacagttgggcttagaaggagcagccagggcactgcttgagaaaccaggggagctcagtctgctatcgtacattaggcctgacgttaaagggctttcaacgcttcaggatattgaaataggagtgcagcatattttagcagatatgattgctaaagacaaagacacgcttgacttcattcggaacttgtgccagaagagacatgtttgtatccagtcatctctggcaaaagtatcctcaaaaaaggtaaatgagaaagatgttgataagtttctgctctaccagcatttttcctgcaacataagaaacattcaccatcatcagattctggcaattaaccgtggagaaaatttgaaggtactgacggttaaggtcaatatttctgatggagtgaaggatgaattctgtaggtggtgcatccaaaacaggtggagaccacgtagctttgcaaggccagagttaatgaagatcttatataattcactgaatgattcctttaaacgccttatttatcctcttctctgtagagaattcagagccaaactaacatcagatgcagagaaggaatcagtaatgatgtttggacggaaccttcgtcagctccttttaacaagccctgttccagggcgcaccttaatgggagtggatcctggttataaacatggttgcaaattagctataatttctcctactagtcagatacttcatactgatgtggtttacttgcattgtggacaaggcttccgagaggcggagaaaataaagacacttttgctgaatttcaactgcagcacagtagtgattggaaatggaactgcctgcagggaaacagaagcttactttgctgacctgataatgaagaattattttgcaccactggatgttgtttactgtatcgtcagtgaagcaggagcatcaatctacagtgtcagccctgaagctaacaaagagatgccagggctggaccctaatttgagaagtgcagtttccatagcaaggcgtgtacaagatccattagctgagctagtgaaaattgagccaaagcacattggagttggaatgtatcagcatgacgtatcccagactttactcaaggcaacactggacagtgttgtagaagaatgtgtcagctttgtgggagtggatattaacatctgttcagaagttttgttaaggcatattgcaggactcaatgccaacagggccaaaaatattattgaatggcgagagaaaaatggaccctttatcaaccgagaacagctgaagaaagtgaaagggctgggcccaaaatccttccaacagtgtgctggcttcatcagaatcaaccaggattatatccgaacgttttgcagtcagcaaactgaaacttcaggccaaattcaaggagttgctgtgacatcttcagcagacgttgaggtcacaaatgagaagcagggcaaaaagaagagcaaaactgcagtgaatgttttactgaagccaaatcctttggaccaaacttgtattcatccagaatcatatgacatagcaatgaggtttttgtcatccattggagggacactgtatgaggttggaaagcctgaaatgcaacaaaaaataaattcattccttgaaaaggaaggaatggagaaaattgcagaaagattgcaaacaacagtacacaccttacaggtcatcatagatggtctcagccagcctgaaagctttgactttcgaacagattttgataaacctgatttcaagagaagcatagtatgcctggaagatctgcagattgggacagttcttacaggcaaagttgagaatgccactctctttggaatttttgtggatataggagtggggaaatctgggctgattcccatacgaaatgtaacagaagcaaaactttcaaaaacaaagaagagaagaagccttggactgggccccggagaaagagtggaagtccaagtactcaacattgacatcccccgatctaggattactctggacctcattcgggtgttatgagtatcccacgaaggccagacgctgattttattttctcatttccacagattgacaaggataagtcagttgtttgtaaactctaggtagcagatgagaaataattcacttaatatcagaaatattttccaaacactttcctttattttttcttctgaataaatagaaaaccaacagtttgatttccttttcccttaaaggaaacaactaatacacattcttatatggctttatgtagtaatagttttctgactaaaattttgttttttattttttgtaatttatctttaactccttttgcattttgtataacagattgcttaacttctacttgccaacatctgccttgctggacttgtatgggattgtcttcttgatttgaattgtaccgtctttgttgacacagtagggctgggcagtgtttaatccttccattttatagatttttttttaatcaggccttttggacttcattcataattttgcaataatctcttttcccttgtcatgcaagccaaaaatataccagtaaaacagattctgacgtgtttgtagttatcaaatgaatggctcgaaacacttctcaaaaggatatacgtattgaccccaacaataaatgtttgtggctagtgaaaaataaaataaaaggttgattcagtgaatgacctagaagtcagtcttgatgaaaaaagatatggtttatgcaacctttn

SEQ ID NO: 24667 - DNA, 365 bp, Homo sapiens; identical to SEQ ID NO: 21784

SEQ ID NO: 24668 - DNA, 1265 bp, Homo sapiens; identical to SEQ ID NO: 21987
  misc_feature 717, 718, 719, 720, 721, 722, 723, 724, 725, 726, 727, 728,729, 730, 731, 732, 733, 734, 735, 736, 737, 738, 739: n = A,T,C or G

SEQ ID NO: 24669 - DNA, 1167 bp, Homo sapiens
cgcccgggaggttcctgttttcctgtacccaaccaagagccaatgaagaagtaaagaggagcaaacacgcccgcccactcccaatttcctttgctctgctgtctgccaaccgcaaagccgaccgagacggagccgctgtcaactctccaactcagctcagctgatcggttgccgccgccgccgccgccagattctggaggcgaagaacgcaaagctgagaacatggacgttaatatcgccccactccgcgcctgggacgatttcttcccgggttccgatcgctttgcccggccggacttcagggacatttccaaatggaacaaccgcgtagtgagcaacctgctctattaccagaccaactacctggtggtggctgccatgatgatttccattgtggggtttctgagtcccttcaacatgatcctgggaggaatcgtggtggtgctggtgttcacagggtttgtgtgggcagcccacaataaagacgtccttcgccggatgaagaagcgctaccccacgacgttcgttatggtggtcatgttggcgagctatttccttatctccatgtttggaggagtcatggtctttgtgtttggcattacttttcctttgctgttgatgtttatccatgcatcgttgagacttcggaacctcaagaacaaactggagaataaaatggaaggaataggtttgaagaggacaccgatgggcattgtcctgggatgccctagaaacagcaggaagaaaggcatcaacagactcactgactatatcagcaagtgaaggaattaacataacttacctgagctagggttgcaggcagaaatggagtggcagtggcctggccagactatttctggtgcgattgaacagggtgccgtaccaccaattctaggggaagctggttaggcgacgatatcagcgaggtcagacgagactagaacggagaaaacacacctctatgggtggaagtgcagggggaggaaactaagggaaaggctaacgaagtgtggggatgaaaatgagggtgggttaagagaaaattatgggaaacaattgtgatgcatgtgaaagggtggacagagtgacgacacctaaggtgcaagaatagaacgacacaggtgtaggacagtactgtgtggttctttatgtttaattttatgtcac

SEQ ID NO: 24670 - DNA, 1048 bp, Homo sapiens
  misc_feature 1, 1044, 1045, 1046, 1047, 1048: n = A,T,C or G
nagaaagaatttccaaggtgcacaatggtccaagtccttgtttgaagaaatcacaagagagagagcatcaatttggacaatttttccttgcacaaggtaacttggtgctcgaattggggcaaagataacgtcttagctatggttaagatgatggaattgtccatctttggcctgcaggtactgcattcggttcctgccattgttgccattttcacttgtttgttcttgcttgcccccagaaaattttggacttgctggtgaatgtgcttggcctcgcgaagttgtcttctgccactgacgcaggttcttgaatctcaggatcacagcgaaccacacaggctctccagaaggattgaatgtagagggctgcttcctcttctgtcagcaggagcgagagtgggattggcggccgtgggtgttgctttagccgctcctccacaaatggaatggagaaaaattctgtgaatggctcccctgccctctttggattttggttgtataaccactcagtcagaaaatcacaggcaatgaatttggttcttttcctctcaaaacatttttctttcttcgcttggtgaagcaggctagccattccgggaagcagaacaggaaagatgaaagtttccaaatattctttgggagaacatgtttttgggttgattgtttccgatttatcttgaggacagggtgtacgtgagatcatggtgaaatgggaaaccggaaaatagtgctctgcactgaagccatgaaaaagcatttcctctactggcgcaaccgtaatcacaggctcctgtttgactttatatccttctggaaagggaggctgctcagcttcatactccttgcagatctgctcccacagattcttgcttgacggctcggtgacctgccacgacgagacaggcagctcgcgggacgcgagagacacggtgggcaccggcgtccgggtgaacgacgagtctgtagagcagctgggcttgaggcgcactatgtggctggggatttgccgcggtgccgccatggccgcgcggacgcgtgggtgannnnn

SEQ ID NO: 24671 - DNA, 1896 bp, Homo sapiens; identical to SEQ ID NO: 21007
  misc_feature 1, 2: n = A,T,C or G

SEQ ID NO: 24672 - DNA, 1114 bp, Homo sapiens
  misc_feature 1, 2, 1111, 1112, 1113, 1114: n = A,T,C or G
nnagtcgaccacgcgtccgcatatttctaatgggcagtacagggaaaaaaggaaaggaaatgaaggagcagaaaaatattctaagaaataatggctgtaaatacccccgatttgatgagagacattaacctatacatcccagaagaaaaagaaattacagacagatacatcataagaaaaatgctaaaacccaaaaacgaaaagaaaatcttaacagcaatacgagaaaaatgagccatcacttaccaaggaacccaaataaaattagtagttgacttcccctcagaaacaatggcagtggcagtggaataacacattcaaagtgttcaaagaaaataactgtcaaccaataatcctatatacaataaaactatttttcaaaaatgaacgtgaaataaaacatctcacataatcaaaaaccaagagaatttgttgctggcagacctgacttgctggaaatacaaaaggaagttcttcagcctgaaagcaagtgaccacagacagtaatctgaatctacacacatgcagaaaaagagcacaggcaaaaataattatgtaattatcagaaacaatctatgcatttttcttttttctcttaactaatgtaaaacacagttgtataaaacaatatgtatatagttgcatcgtttggcctataacgtataaaatataatatatttgccgataacaggttgaagaagctgagtggaagcaaaactgtcttgtactaaagaactgactccagatggtaagacaaatccacaggaacaaatggagagaacgtgaaataggaaataagtttaatataaaaaaactataaacatatacttactcttctctcagcttcttttaaagatgtaaaattatattaagtaattataataatgtgtgttgggtttgtaatgtataggattaacatatataaccattaataccacaaagcgggggatggggtttatatagggaatagggttgttacttgggaattaagtttagtgtttatccggaagccgattctgtttagttaagttgtgtatggtaagccctaggggaacccctgaggaaataacttttaaaaaatcaaaaatatgattaaatgtaaatatcacannnn

SEQ ID NO: 24673 - DNA, 2192 bp, Homo sapiens
gcgtagcccagggtgttcattttgccgagaataacgtagcatagtgtttacaattacgtgggtgtaatttctagctttgtgatcctgagagactgccttatcctccatatgcctcagttttctcatgtgtaaaaagggggtaataataatacctgacagggatgttgagaaatccatgtaaaagtacttagaacagcgcctgcatatagtgagagcagagaaaagggaaaaggttcgtggtggtgattgcattgatgttattattccttcagggtatcaccaagtcttccagtgccagcattgttcagttgagagagaaatatagatgctaggcatacacctagaaatagcattgacagtaagttacgatttctgtaattatcttcttagtaaaaaacctacatatttataaatcttttgagcaactggaaaaaaagtattaacttaaatttactacaggaaaaatgtattgcaataattatgttactttataccagaaaaaagaaaacatttataggtggttaaaatcgatcctatccaataaatcagactcttccaaataagtatatgtcagatgatataactgtctagtttatctgtgatatatgtatccaaattatctatgttgttataaatgtgaactgtatctcacctgtaagtggtgttaatttccccacagctcttcctttccatagtattaagtatgtctttggcccacttgtagtttctcaagaaagcatgttgatacggacagcccctactctcatatatggtgtattgaccttaggcaagagatgtggtttctctgagctccagatatgtcatctataaaattggtgttaacaccgtttatctcatagggtgctaagaagattaaagtactgcccagagtaggcactcagtcaagttctctttcctctcctgatacctacccccatcctttcctctaggttgcatatagttctttactcccaaaggagatcacagtagatagaaaatcccatgaatgtccttgctcttcgttgttacctccctccccctctatcccccacacataatgccttagatattcagtaggttttattgattagaggtgaacttatttggaaggaataaaaagacaaagcaggagaatggtcaagaacatgagttttagagtgagacacttgagtttgaaatccagcccaaccatttactagttgtgtgacctctatcaagttatgcaacctctctgtgcctcagtttcctttttggcaaattggtgctaacacctcacaggactattgtaaggattaagttcatgtagataaagcacttaacacagcatccgacacatctcatcactcaataaattatcactgccctttgttactgtggttaacaaacacttgctgtaatttctctcttctaacttataggacaaacaaataatggaaatttttaacataagtatgtagagattgtggtaccacagtgataaactgatttttatgcttaagttaatgactctggtttatgtatgacaatttattcagtatgagaatctcagaaaactaatgtttttttctattccttaaccttcctaccctttttttggtaaagaaaattaccgaaaaaacaaaaaacaaaaaaaaaactacctctgtctatttatttattccattttaatctcatggcttgaaatctgaaaaattggagttgctgtaagagattggtggatgtctttttgccctcatggtgatgtattcttttacagcttttatcattgaccagaattttaaggcctgcttattttaaaaaacgaaaaccagtgttctttatgataataagcttaaaataatagaaatactttttaaaatagtatggggagagctcattgtcagtgaatatagatcattcttgttgatacccttctttgaatattctagtgtattaatataccattgtttatttaatcatgtcttattaatggactggctgttttcacatatttgatatatcaagtgtcttcacaacttgtgcttgcatattctttcccaaaatattgaaagtccatatatttccttgtacatttttaaagttgatatctaaatctttcattgtagttgcaaagcatgtaatttcttgggggaggggggctgtaaatattgacattttaaaataaaacttttaaatcagccttaaatgtatca

SEQ ID NO: 24674 - DNA, 362 bp, Homo sapiens
  misc_feature 362: n = A,T,C or G
cgggcaggtacgtccacggtcagccttgcgacatttaaagttctacaatgaactcactggagatgcaaagaaaagtgtggagatggagacaccccaatcgactcgccaggggctcaatgcactgtggaaagccacaggaacctctgcccaagaaagcctggctgttgtgggaagtcagggaccccgaatggagggaccagctggtggtgcatcaggggagcataaagtgtgaagatttcttgcccatttatcagtttccacaattaatccttttataatttctgacacgggtcttacatgaatctcttaatcatgttatctttgtaatgtgagaatataggtcacctcaggaccactaatgn

SEQ ID NO: 24675 - DNA, 2315 bp, Homo sapiens; identical to SEQ ID NO: 20885
  misc_feature 1, 2, 2313, 2314, 2315: n = A,T,C or G

SEQ ID NO: 24676 - DNA, 3057 bp, Homo sapiens
tatgccttttaaaaaatggggctacttcaagtttttacttctaatctggacgcttctcttttgatatatcaagaaaataaatggaaatgggggtgataatttatatttgtaatttacaaatcaaacatctatcatacacttactatgtacctagttttattcacgaatcatccatttctaagataaaaattcccatcatttcctcactgcactaaaccaccactgtacatctttgccaatgaatgactgtatttttctatggtcaagatttaaaattctgggatacattatgaaaactgcattaatgaaaacaacctactgctattcatgctcaacagtagcaagctaaactactgtacttggctcctttgagctacccttattttaagaattataaataggtgtcaacccacacaaagaacagattgtggattaccgtagggaaaaaaatagcttactcaacttactaaaagtttcaacaccaaaaaagatttaacttggctgaaagttctgaaacagctgagacacagaaccaggaagctataatttataatgaaatgttgatacatacttaaaagctactgcagctgtagctatactaaaataagatttcttcagggtttacttaccctgaaatgcaagaatacaagcataacaataatattactgtttttatatgcaccaatacctctctttaatatataaagctctacaacaaatacctctaataattttacaattaaattaagtccatacttctatactactttggtctcaacatttttaaaacatcaattaattttgaaaatttacaatttaacaacatgatcctatcaataacaagcacattttgtagtggattaaagacacattcaaccatgcaatccagtgttcaataccttaatgataaataacaatgctgattgacttttattttgaaaaatcattgaaaactggaataatcatctgagactcacagtgatcacaaacatgcagaaaaaagcatacaattctattcttcctgaaggaatgttacaaaatgcccacttttttatatagggtcaatatgccaaattacttatatttttcaatccatcatcttctaacatttgtcacttaaatttttcttaaagtacaaatgttcctgtaagttgtaacagaaaatgaaccccaactctttcagtctttaagacctcagtcacagtcccacactaatagctgccttttagtaaaatagtgacatccagtggacaaatgaaatatttctcaaattcccatatttgaatcataaacaaaagttgcctctttaaatccaacaattttagtatgagttcctacttattttgatggaatctacagattctcatgaatacttcacatcataatttctatgtatcttaaatatatcctcttttcttcctatttaaaatcaattatttaaattgagctagtaagaatgtctactcttgaagctagtgaggttaaaggtattacttttccttctttgcttcagctacttcccaccaccaaataactggtttgtctctaggaatggaaggactaaaatataggggaaatactgtgcatttaaataaaaatgaatagtatttaaaagaaatcacaaaagatgaaatctgaacctgttttgcatttataatttgatgtacggttgaacataaatagggatgtaataagtaatgctatcaattacatcctcttgcctcaatgctcaaatattaagaatatgtattttagcaatgattgtttcagtgtttaaaaacttactttcataaatcagtataaatgaatatccattatatattatgtttaagtaaaagtgaaaaaacttgcactgtactgagtcatgatttaccactggttatatatattatgtgtgtgttcaaagtacaaaatgcagcaatgatgttaacattgacagtgtaatgaactgccgtagatgagactgttatgcttaatttcttggaaaactgtaaagaaatttcacaggttaaaaaaaatagagtaagcaaaaaaaaagaattggagaactttacttttaaatcagcagctaaatgaagaaaacttttcctttctaaaaaaagattaagaatgtaaaagtacattttaatattaaaaaagcattttaaaaaatctataacaactttatgacaaaatctgcatttgaaaaaggcctgtaaaaacagtaggacagaattgccctcatcaccttttactttttcttgtcagaaaaaagtgtatgcatctctggaaccataaatgatgttaaaataggcatttataaaatgacaaggagaatttcatgataaatttgtttgttttcttacaatcattggcattgcagccattagtaagtcacaaggaaaacttctctagctaaaacgcaaaatgaaatatcaagttttgaaatgtattaggtctgttgcctgcgttttgctgatctcattttttcaaagcgcgactccatttcttctaagactttgggtgtgtatcgtaccactaatttaacctttccttgtgcggctttcagcagttctacagctttttcatgatgttctccttcaacactcactccattaacagagaggagttgatctccacgtttgaggcccccatgtctatcagcaattccacctggaattattcgggatatatagattggagagttttgttctttgcctcccataatattgaatccaaggccctcttctgtttttggtagctcaacaactcgaggatgagaatgtccttcactggcagcaaatgcagcaacagtagcctttgcagtagcgttcgctctcacttcaggactgctactgatgtccacagtctcatagacatgttcatatacctctctcacagcattgcagaattcactttgaaggactctttgcaaagcctgaagtttctgtggtggtacttctccactcctttgtagtttttccaataattcaattgctctacaaatatctctctccagccgcacgggttcccctagcgccgccatcttctcccttaacctacagacgtggtcgactc

SEQ ID NO: 24677 - DNA, 403 bp, Homo sapiens
  misc_feature 403: n = A,T,C or G
ggcaaactaagccgattttccggaaaaaggctaaaactacaaagaagattgtgctaaggcttgagtgcgttgagcccaactgcagatctaagagaatgctggctattaaaagatgcaagcatgtgggtaaagctgggagctgataagaagagaattccgaggcctcggtgactgcctggtctaagatctacaaatctgttgggattatggagcctgtacgatcgggagcttatctttccgcgccgatagcgctcacgcaagcatggttaacgtccctttttttttcgcggggggggcttttaaaaaaaaagggcccccccgggcggggaaaattttatttgcgttttttttaccccccccccccggggggggggccccgcccccccttttttgcccttttaan

SEQ ID NO: 24678 - DNA, 1214 bp, Homo sapiens; identical to SEQ ID NO: 20119

SEQ ID NO: 24679 - DNA, 1214 bp, Homo sapiens; identical to SEQ ID NO: 20119

SEQ ID NO: 24680 - DNA, 1229 bp, Homo sapiens
acaacattgagatacatggctgttgggaccactcttaatcttccaaggatgaccaccatttcttgtagtggtttactgagacagtcaagacagtgtgaatatttctggtagtgttcggtgaaattttttcttgtgattgacttactgtttgtgtttgctgatctggaacttcagttgacctccttgactgcaatcatttgttttggttttgtgtgtgtgtttgcactgggctttagatttgtaaaacattgtatatagttaatgtgatgtagcctccctaaatctcagtgaataggattttacatggcatcaatatgcagtgaaactactatgattgtcatagtctaacatggtgtaaggacctgatgaagattttgtatgacaaatgaggctatggctgcctttgggattagtagatatatggaacaggaacaagaacaagaaggcatgtaggataggtattcaccataacatgaatagatggagattatatagacagttagccttcaattgcaggtgaagaatggaattaatatggaacatttaaaaatattttagaaatgatatttttaaaagagagtcaaaataaaatgctttcatctgattatttgaccagaaattgggctgcttaatataatgaataattgttaggatctatcgatatggctactcagtggtaagaagtgccacataaatattggtctaatacatatataattatgtaactctagccaggtagctggattaaatatgggtaacagcaaaagcacttctgtcctgataaaagtctcagttacatttaaatacttaatataatcagctctttttcaagtaaacaataattcaggaggcaaatgttcagtacatctcatagaaattttttgtcttaatttgtttgcctgtacaatctgcattcttcttattaatttaatccatattttgaagtcagaaaagaattcatctcatttgagttagtttagatcaacatactgatattgctgaatagcttcacttccctgaaactaaacatatctattcctttcgtcttagacaaattatgaggggaaacctgtctgaaatttggctaacacatggtgtgcatttgatgccactggaggatttgctttgtcaatttaagattgagtgatggctatagaggaaagtgacggaaaaaaaaaccttcttaatgtgaaatagaaagtataaaggacaataaaatgctaaaaagt

SEQ ID NO: 24681 - DNA, 410 bp, Homo sapiens
ttcatcatgggaccatggatacagtgcagggaaaaaacaaacaaacaatatttgagaaaatatatatattctgcccagccacactggtgagtttttatttcttgtatgagtttaaattgccaacttaaaaaagcctcattagaatttgctattcgaaaagaccttaaaaaccctcacagagttctaaacatcccattcattgaaaataattttcagttaagtagatttgttttgtgcacttcacaacttttaggtgacatgaatttgaagcgtagcaaaagaaatgtataaagatagccttttctggtcattaccatgtctactcaagtttctgttttctaggtacaacagccccattcttagttaaaaagaaaagaaaaagacaagagcaagccactgccatcacaggt

SEQ ID NO: 24682 - DNA, 5564 bp, Homo sapiens
  misc_feature 5409, 5477, 5559: n = A,T,C or G
agtcgacccacgcgtccggtggtttccctggaactcctggacttcctggcttcaaaggcattaggggacacaatggtctggatggattgaagggacagcccggtgctcctggtgtgaagggtgaacctggtgcccctggtgaaaatggaactccaggtcaaacaggagcccgtgggcttcctggtgagagaggacgtgttggtgcccctggcccagctggtgcccgtggcagtgatggaagtgtgggtcccgtgggtcctgctggtcccattgggtctgctggccctccaggcttcccaggtgcccctggccccaagggtgaaattggagctgttggtaacgctggtcctgctggtcccgccggtccccgtggtgaagtgggtcttccaggcctctccggccccgttggacctcctggtaatcctggagcaaacggccttactggtgccaagggtgctgcttgcagtaaccttatgcctagcaacatgccaatctttacaagaggaaactgtaagaaagggcccagccggagatagaggaccacgtggagaaaggggtccaccaggccccccaggcagagatggtgaagatggtcccacaggccctcctggtccacctggtcctccctggtcctcctggcccccctggtctcggtgggaactttgctgctcagtatgatggaaaaggagttggacttggccctggaccaatgggcttaatgggacctagaggcccacctggtgcagctggagccccaggccctcaaggtttccaaggacctgctggtgagcctggtgaacctggtcaaactggtcctgcaggtgctcgtggtccagctggccctcctggcaaggctggtgaagatggtcaccctggaaaacccggacgacctggtgagagaggagttgttggaccacagggtgctcgtggtttccctggaactcctggacttcctggcttcaaaggcattaggggacacaatggtctggatggattgaagggacagcccggtgctcctggtgtgaagggtgaacctggtgcccctggtgaaaatggaactccaggtcaaacaggagcccgtgggcttcctggtgagagaggacgtgttggtgcccctggcccagctggtgcccgtggcagtgatggaagtgtgggtcccgtgggtcctgctggtcccattgggtctgctggccctccaggcttcccaggtgcccctggccccaagggtgaaattggagctgttggtaacgctggtcctgctggtcccgccggtccccgtggtgaagtgggtcttccaggcctctccggccccgttggacctcctggtaatcctggagcaaacggccttactggtgccaagggtgctgctggccttcccggcgttgctggggctcccggcctccctggaccccgcggtattcctggccctgttggtgctgccggtgctactggtgccagaggacttgttggtgagcctggtccagctggctccaaaggagagagcggtaacaagggtgagcccggctctgctgggccccaaggtcctcctggtcccagtggtgaagaaggaaagagaggccctaatggggaagctggatctgccggccctccaggacctcctgggctgagaggtagtcctggttctcgtggtcttcctggagctgatggcagagctggcgtcatgggccctcctggtagtcgtggtgcaagtggccctgctggagtccgaggacctaatggagatgctggtcgccctggggagcctggtctcatgggacccagaggtcttcctggttcccctggaaatatcggccccgctggaaaagaaggtcctgtcggcctccctggcatcgacggcaggcctggcccaattggccccgctggagcaagaggagagcctggcaacattggattccctggacccaaaggccccactggtgatcctggcaaaaacggtgataaaggtcatgctggtcttgctggtgctcggggtgctccaggtcctgatggaaacaatggtgctcagggacctcctggaccacagggtgttcaaggtggaaaaggtgaacagggtcccgctggtcctccaggcttccagggtctgcctggcccctcaggtcccgctggtgaagttggcaaaccaggagaaaggggtctccatggtgagtttggtctccctggtcctgctggtccaagaggggaacgcggtcccccaggtgagagtggtgctgccggtcctactggtcctattggaagccgaggtccttctggacccccagggcctgatggaaacaagggtgaacctggtgtggttggtgctgtgggcactgctggtccatctggtcctagtggactcccaggagagaggggtgctgctggcatacctggaggcaagggagaaaagggtgaacctggtctcagaggtgaaattggtaaccctggcagagatggtgctcgtggtgctcctggtgctgtaggtgcccctggtcctgctggagccacaggtgaccggggcgaagctggggctgctggtcctgctggtcctgctggtcctcggggaagccctggtgaacgtggtgaggtcggtcctgctggccccaatggatttgctggtcctgctggtgctgctggtcaacctggtgctaaaggagaaagaggagccaaagggcctaagggtgaaaacggtgttgttggtcccacaggccccgttggagctgctggcccagctggtccaaatggtccccccggtcctgctggaagtcgtggtgatggaggcccccctggtatgactggtttccctggtgctgctggacggactggtcccccaggaccctctggtatttctggccctcctggtccccctggtcctgctgggaaagaagggcttcgtggtcctcgtggtgaccaaggtccagttggccgaactggagaagtaggtgcagttggtccccctggcttcgctggtgagaagggtccctctggagaggctggtactgctggacctcctggcactccaggtcctcagggtcttcttggtgctcctggtattctgggtctccctggctcgagaggtgaacgtggtctaccaggtgttgctggtgctgtgggtgaacctggtcctcttggcattgccggccctcctggggcccgtggtcctcctggtgctgtgggtagtcctggagtcaacggtgctcctggtgaagctggtcgtgatggcaaccctgggaacgatggtcccccaggtcgcgatggtcaacccggacacaagggagagcgcggttaccctggcaatattggtcccgttggtgctgcaggtgcacctggtcctcatggccccgtgggtcctgctggcaaacatggaaaccgtggtgaaactggtccttctggtcctgttggtcctgctggtgctgttggcccaagaggtcctagtggcccacaaggcattcgtggcgataaggggagagcccggtgaaaaggggcccagaggtcttcctggcttaaagggacacaatggattgcaaggtctgcctggtatcgctggtcaccatggtgatcaaggtgctcctggctccgtgggtcctgctggtcctaggggccctgctggtccttctggccctgctggaaaagatggtcgcactggacatcctggtacagttggacctgctggcattcgaggccctcagggtcaccaaggccctgctggcccccctggtccccctggccctcctggacctccaggtgtaagcggtggtggttatgactttggttacgatggagacttctacagggctgaccagcctcgctcagcaccttctctcagacccaaggactatgaagttgatgctactctgaagtctctcaacaaccagattgagacccttcttactcctgaaggctctagaaagaacccagctcgcacatgccgtgacttgagactcagccacccagagtggagcagtggttactactggattgaccctaaccaaggatgcactatggatgctatcaaagtatactgtgatttctctactggcgaaacctgtatccgggcccaacctgaaaacatcccagccaagaactggtataggagctccaaggacaagaaacacgtctggctaggagaaactatcaatgctggcagccagtttgaatataatgtagaaggagtgacttccaaggaaatggctacccaacttgccttcatgcgcctgctggccaactatgcctctcagaacatcacctaccactgcaagaacagcattgcatacatggatgaggagactggcaacctgaaaaaggctgtcattctacagggctctaatgatgttgaacttgttgctgagggcaacagcaggttcacttacactgttcttgtagatggctgctctaaaaagacaaatgaatggggaaagacaatcattgaatacaaaacaaataagccatcacgcctgcccttccttgatattgcacctttggacatcggtggtgctgaccaggaattctttgtggacattggcccagtctgtttcaaataaatgaactcaatctaaattaaaaaagaaagaaatttgaaaaaactttctctttgccatttcttcttcttcttttttaactgaaagctgaatccttccatttcttctgcacatctacttgcttaaattgtgggcaaaagagaaaaagaaggattgatcagagcattgtgcaatacagtttcattaactccttcccccgctcccccaaaaatttgaatttttttttcaacactcttacacctgttatggaaaatgtcaacctttgtaagaaaaccaaaataaaaattgaaaaataaaaaccataaacatttgcaccacttgtggcttttgaatatcttccacagagggaagtttaaaacccaaacttccaaaggtttaaactacctcaaaacactttcccatgagtgtgatccacattgttaggtgctgacctagacagagatgaactgaggtccttgttttgttttgttcataatacaaaggtgctaattaatagtatttcagatacttgaagaatgttgatggtgctagaagaatttgagaagaaatactcctgtattgagttgtatcgtgtggtgtattttttaaaaaatttgatttagcattcatattttccatcttattcccaattaaaagtatgcagattatttgcccaaagttgtcctcttcttcagattcagcatttgttctttgccagtctcattttcatcttcttccatggttccacagaagctttgtttcttgggcaagcagaaaaattaaattgtacctattttgtatatgtgagatgtttaaataaattgtgaaaaaaatgaaataaagcatgtttggttttccaaaaaaaaaaaaaaaaaaaaaaaaaaaaaaattagtctgnttatgctaaatctggccaaagatgagcattgtccaccactaaaatgcctctgccactttgaattctgngctacttttgtggccagaatgcggtgatcaaaacgctccatctttttacagtggcataggaagacggcaaaaatttcctaangtgca

SEQ ID NO: 24683 - DNA, 1556 bp, Homo sapiens
  misc_feature 1, 2, 3, 4, 5, 1477, 1520, 1535, 1550, 1551, 1552, 1553,1554, 1555, 1556: n = A,T,C or G
nnnnnaactccgggtatttttgtatttaaatccagacaagccacaatcaggctcatgaggggcattttcattgttgttataggaagccacgagtaactccggatactgagatgaccaatccaaacaactaaccacccgatgctttgaccaacgttcgtcaaaaaattgtcgatttaatgacagtttagcacctgcttgaatctctccttctttgtcttccaaatctctcccactatagtcaaagaagatgttaatctgctcagaaagagctctttctacaattcttgtagaatggtcaaagaaacttaaaaattcctcagagtgcaagatttgttgcttttcttcttcagtcagctcatgagggggagctttactatcattttcctcatctttctttaaagttttctcttcttcaggttcaataggtggtttaggagccactacatcatcatcttcctcttcatcttctttgggttgagccataactggagtctgagtttcctttgtatacgtgacaatttctcgaggaggaaagtcgacttgcgtgattttagccattccaagtttaataggtcctcgtctagatcccacggcgccatctccagagtcttggcttccagcttcacttggagtgctcacagatttggaggatggagacataggaggagggacaatgggggattctggagttagccccatgctttgaagcaatgcttcagcttctctcctttttttttcaagatctgattcttcttgcacaggagcaacagcttccttcttctggtctgtttctttttttttcctttcttcttcttttctcttcttttcctctctgatttgggccagtcgctgcttcttacgttccaactcagcctttaattcacttttgtctgacatgtttgtgacctgtcaggtgactggatggggaagagtcctcccgcctgcaacttcccggtaacgtccctcgcctaagcccccaacaccaactgtagccaccaccagctccgcggctttccaaagcacacaaagagggatgggcggcggctgctacggcgagagcttagggacaaatagcctcaccagaacgaggtcgctcccagaaataaaaggtggggccctgctgcgaggaattgtagcccctccgtgacttacctgtcgtaaagcagaagccggtagataaaacaaagaacccagtcaacccaggggccttaagtatttccgctttgccaaaaactggaaaactacgcctaatattctcaggccaggaatccaacttccgccctcgccttacaaactgacacgatcgagaagaactacaaaccccggcaacaaggaaaacctgcgtgcgacgagcagttgcgttctgggaattgtggtcgctgggcgtcgcaaggtgtgctggggacatgtagttgtgttcccttccttttaggattttccaattccaagggccttctttccggtcggaggaagcttnctggtattaaagttattcttcggtctggtttgaatccggtggnccaccagtggtttgntatggtggttataannnnnnn

SEQ ID NO: 24684 - DNA, 3470 bp, Homo sapiens; identical to SEQ ID NO: 24493

SEQ ID NO: 24685 - DNA, 1033 bp, Homo sapiens; identical to SEQ ID NO: 22857

SEQ ID NO: 24686 - DNA, 2162 bp, Homo sapiens
  misc_feature 1, 2, 3, 4, 5, 6, 7, 8, 9, 10, 11, 12, 13, 14, 15, 16, 17,18, 19, 20, 21, 22, 23, 24, 25, 26, 27, 28, 2162: n = A,T,C or G
nnnnnnnnnnnnnnnnnnnnnnnnnnnncagtagagatggggtttcgtcatgttggctacgctggtcttgaaatcctgaagattacaggtgtgagccactgtgcctggccatgtttgacttctaatttgtgaatgtgatttctcagatttctctataaaacaccttcaatgacagtacaaaaattagtgtttaataattactataaagtaatttaaataatttctatatttctcacaaatcacttgggttttgcttctcctgcatgtatcataggtttccttttcaaaccatcgttttgattctttaaatttcttgtcacagcatcataaatttcatttgctgtaaattgtccttaaaagtctaaaagatactttgagccccaatgaatggatcgtatataaattctgccgcaggcattagggatagtgtttgaacactttttaacaagttccattttagaaagatgagatatcacagctacatagaagatggtaagtttacagttataatgtggcgcttggggaaatagactctaaaatcctatgtttacatttatgatgaagaaaaaaatccctcaaaacctgccaatttaaatataaatcagatgcagtcacacataataaatgtgctaagataaataactttgtatatttgtaatttttaaaaattttaatttccaattttgccaagttcagaaatacatacaacttaaagcaaatagggtacaatgttaacaccaggtgagggttacatggtgttcactctactgttttacttttgctgtagatttgcaatttttcaaaataaaaaatgaaaaaatgtttataagacaaagtctatgtcactgagtatcactagttttagagttaaaaggtgccctgtcttataggtaaaaacttttctgctaagagaagcatgggagaaatatttgacatgcattaaaggacaaaactggtttagaagccaataaagagagaacacactgcatgtaccaccctcatcatctcgagttttcaaaacaagcatgttcctcttgctccaacagactcccatgctaatcatgcaaaaacacagcaatccaccaacttccacatttacaaatgatgataaaagtttaaaaacatatctctcaataagatgaaaatgttttctgactttgacaaataaagttttctcagttgaatgccttaaaactgtctaatactctgaatttctcatgtactatttaatttggctagattttaaaaatacagcacatgattttaattcttgtttaaagtctaatgctaaatgacaaagcctcacagttcctggtagcttgtttgctgaacagtatcaacatggcaaaagtacgagaatttctttttaagatttgaatgtactttgagatgtgtgacagcattatagcaaccccaaattatctgtcttatggtgaagatggagagagtaaaaatcgtatgctgtgaatgataccaaaaacaaaaaaaaaaatctgtcccaaacccaaagttccctccccaggccttccaacaggccatgtggaatgactgcacacttctttcctcctcgtggaaggttgagaaaggaggaaacttaccacccagggggcaggtaacgggaagacccaagaacagggccaagtcctttcaaatgaatatacaggtgacattaggataaaacaatcctgggaggttggacacaagtggattcaataagcgacagccttaattttggggatggtgtcaatgctggtttttaaactcatcatgggcatcggaaatttgtttaaatacattccttttctcccccctcccactccccagcccctcaaacctgtatcatcctgtcttagttttctgcactaattactggcagtcagatagcagagacaataatttagggtccagtgaaagtaaatttttacacagcttgatagcagtctgggaagactgaggaaaggaagatagaggcaaatctctagaaaaattgagtgtttctcttggtagaagctataatttttttaaaaaagatgtcttaaccttgctaataacataagatgatttgtagaaattaactaaactagaaattgtcattttttggttgttgaaaatgtgtgcgttgtttcaagcaaaaataacacaacacacacgagctcgccctn

SEQ ID NO: 24687 - DNA, 905 bp, Homo sapiens; identical to SEQ ID NO: 21290
  misc_feature 1, 2, 3, 4, 5, 6, 7, 8, 9, 10, 11, 12, 13, 14, 15, 16, 17,18, 19, 20, 21, 855, 905: n = A,T,C or G

SEQ ID NO: 24688 - DNA, 3524 bp, Homo sapiens; identical to SEQ ID NO: 24334
  misc_feature 1, 2, 3, 4, 3521, 3522, 3523, 3524: n = A,T,C or G

SEQ ID NO: 24689 - DNA, 910 bp, Homo sapiens
  misc_feature 1, 907, 908, 909, 910: n = A,T,C or G
nctcccagtggcgtggatttgctcccgacccgctttggggcgtgcctgcttcctcctctcgtgttagatgagccccagagaggcgaagccacttgagctcgtgagtgacagtcagatgtcaagccctgctctttctaaagcgtgctgccttcagaaaagaagagccagaaggatggaaattacttcagaaagatgaataccagctttgaaggaataaaagctgacgaggaattgaaggagttgaggcacgagcttgaacagggttgcatgttggcccttgattgtaaatgcccattgctgcacctgttcctgttacttggggagttgcagcagaaggaacagcggcctgggactccagagaactgggttccctctcatccctccaggccaccacttcttgtgggcccttgggcaagtcactgtactttctgagtctcagtttccccatttgcagaatggaaataactaccccggtctaccaacttagaagaattgctttgaggatctgataaggtggtgtggatgatgctgccttgggggctttacagtctggagctcaagggaccccttaagttgggcttacttagtaactccaggggtgggcagaacaggactccaatgagggtttttttctttttccctttttttcttttcctatctcttaacttttatctttattattttacaatgcccttgtaagatgaaacaagtgatgctgaaatatctttttcttttttaacctttattttagaattggggtcctgtgccggtttgtccataggtacgggtggctgggaagttggaatagaatgaattacacccagggtgagcttgggcgaaaggtttcaacctatccacccccattgggtcccgggtgggccattgtacagggcaggggcctagaaannnn

SEQ ID NO: 24690 - DNA, 689 bp, Homo sapiens; identical to SEQ ID NO: 21367
  misc_feature 1, 2: n = A,T,C or G

SEQ ID NO: 24691 - DNA, 264 bp, Homo sapiens; identical to SEQ ID NO: 24624
  misc_feature 262, 263, 264: n = A,T,C or G

SEQ ID NO: 24692 - DNA, 816 bp, Homo sapiens; identical to SEQ ID NO: 21390

SEQ ID NO: 24693 - DNA, 2058 bp, Homo sapiens
  misc_feature 1, 2037, 2049, 2050, 2051, 2052, 2053, 2054, 2055, 2056,2057, 2058: n = A,T,C or G
natgtcggttcacctttaatttccccctttttctggccccttttttttttgaactccaatcttcaagggggcttaaatagtttaccaaaacacacttgacctcagctcccccgtgtctcacagcgagcattcctgagtggccagttaagacccccccgggacagtgggcacccctccccacaggtgaccaagacgctcccactcagcttggacacgcccatgacctgagtgacttggcagagagcctgcttcagcgagttcagaagctagcttcttcatcaggagataaactctggagtccacctcgaatccatgcagttgttggcatcccccggcagcctcatgagcaggcccccataggacacgtacgcagagctgaaacagaaggccccatcccgtgattctggagcactgcactcagcagctctcaatctcagcaggcgtgttgctgcttcagtagaagtttcatctccctcaatcctgtacacttttccatacattacatactcaaactggtcagccctggaaggcctatcatcagtggggttgtattcaccatcatccagggtaccatcttcatacaaggtactagctatgaccaaccgaaacttgtcacccaagtctacagggtaaatttgaatgtttacatctaagattagatccatcttgaaagattcactctcacaatgcagtcgagacactcggtcaaacttcttgccctccgggtcaatatccttcacatcgaaaatatcctcaaacaggatgcccgccatcgcgagggggccacgagagcagcagaaggggtgagagcgcgaccacagttgggagtacaactttaaactgtattgtattcatgttgctaaacaatattggccttctcgatgattttattcatgttgctccaaagttaaaaccctgtagaactaagtaggtgaagagatattttgtataagtgccacagaagagaaaatataataaattaaatagtgaattgagcatcactagaataaaataaaatgagtaggcattcctaagatgtgaaatgatcacctaagatatacatgctccaaccatattgattttagaacaaaacacagcagcccataacagtttgtggcctctactaactgtcctctgctgtcccatctagaggttatgtttctctatttttaaaataaaatgtagttaaattagcctgacggatgtttcctctctatcccttatctcagacacatacaaaacagacagacaataacaaaaagacatcatctttatctgtacaaaataaggtatgcacacttttttctttgtgcttctgagattggctcctttgcatatataagatacaagccatctgcacgatcaccctcatttcctatctttgttgacatgttcctcttacaacacaagagcaaattacctctatttgaaagcaccctgtcttcaacacagctcatgacaattttatttaatattgatcctttgaatgagagatcaaaagcatgcacaggtcaatcctctgcacattaaaaaaaaaaaaaaaaaaatacaataagtgtttaatgaaaaggaagttttaccccatgaaagagatgcctaactcaatcagcaacagaagtggatctgaagaacacctatcaacaattacttctattagagtcacataaaccttcatttgttccatattgcctgaagctgcaaaaggccacctgcaggaattccaaatgtggtcctagacaggcggtgtttgtacccagtgcattcacattaccatagcggccccaaatgcagggatggccaaagtggtctgaggaggccaagacggggtggggagtatgtttaagatgagttccgttctatgtcctccaacttagactgtcttttggttcacagagtgcaacaatattttaccaatggaaaaacaagtattttaatttaccttccagcagagttcctgggaagaattttgttgttattatttaaactataatactataacccttaaaccatccacattatctgttttattttggcaangagaaagcatcnnnnnnnnnn

SEQ ID NO: 24694 - DNA, 1326 bp, Homo sapiens
  misc_feature 1, 2: n = A,T,C or G
nnagcgttgctggaaaagagggtcctgattcagatcccaagagagggttcttggatctcatgcaggaaagaattcaaggcaggttctgtgtatggtgaaagaagcaaatttattagaaacgactttgttacagggtagggcatcctcagaaaggagaaggaggaatgcgccattctttgttagtgtcttcgttgataagaaattctaaggagctgtcattaaaattggaatgtgcagatgtgctcactaaaggtagggggtattggtgctgttaaatcaagtttagcctaaagctgcctccttacatattttaagtttggcctaaaatttctctgtacatggtgaactataacctaaaaggatgtgtaaacagactgcaacctactcttgtgccaatcactgagtttcggccaatcaaaggtggccaactgttcaaatctcgttcaaataaggccaatgctgagctataaccagtctggctgtttctgtacctcactttcattttcagtacatcattttccttttcctgtccataaatcttcttccaccacgtggctgtgttcaagactctctgaacctactctggctcaggaggcttctagatttgtgaattgtctgctcagttaaactccattaaattcaatttggccaagaattttcttcttaacagtggtattgatgaccattaatccttcaacctaaacctgctcattaatgctgcctttaagtgggctgaacttttaggacacctggacattttgtaggcttagtgggagatgttttgtatggccttaaatattctgcaattataattggtggtcagcttagactgtggctattttcagacccaagtattaagcctgtaggttccttttgagtgcctagctacttgctttaagatggagtcactctagccatcttttattaaaccagaagcctggtaagcagaggttactttaacaatatgcaagagtgtgggaatgtttgctgagacaggagacacaagaggtgggcaggtcttagggatttaggagttgggttcaaggcaccccctcaagctttgatagttatctatggaaggtcgttgccttgattttgacctggtaggaaggcagacttcaaatgcttgccccagctggacttttcccagatgtctgcctcatcctcttactctaaccaacactgactctggtcaaaacctgcaagcatgatctgcggaccagcagctcatcatggagctggctagaaatatgaaatcctgggctctaactcagacctcctgagtcaggatctgcattttaacaaggttccaggtgatttatgtgt

SEQ ID NO: 24695 - DNA, 581 bp, Homo sapiens
  misc_feature 1, 2, 3, 4, 5, 6, 7, 8, 9, 10, 11, 12, 13, 14, 561, 562,563, 564, 565, 566, 567, 568, 569, 570, 571, 572, 573, 574,575, 576, 577, 578, 579, 580, 581: n = A,T,C or G
nnnnnnnnnnnnnnaaacccagttgccagttgaaatgtgggccaaatggtttcagtccagagctcctcatctgaggcagcacatgaaggtgcataaagaagagaagcctcgttaaacccggggccaaaatatcagggtgaagactcacttaccctcttggaaagctggtacaggaaggaagtctgtggctggtctccgttaagtatagggctttttgacagctttttgagacctcttaagaaaaaataaaaagtaaaaaatgaaagggatcttttttagaaatagagatgctttatagtagatcccttaaaaactggatcttttggtagtgtgaaaacattgggaatttaatgacattattgagctgaaaaaaattacatgaggccagctaccctcatttcttttttatgtgacatggagcccaaagaactgaaaatatgttttgagggagcatgacatccttgacctcatttgaaattacttcccttttcaaaaaccatcatgttttgcagatacattttgagaaaaaccatgataattctttggatataaaataaaccnnnnnnnnnnnnnnnnnnnnn

SEQ ID NO: 24696 - DNA, 1214 bp, Homo sapiens; identical to SEQ ID NO: 20119

SEQ ID NO: 24697 - DNA, 2644 bp, Homo sapiens
  misc_feature 1, 2, 3, 4, 5, 6, 2572, 2578, 2642, 2643, 2644: n = A,T,C or G
nnnnnnagctagtagaggccggtgtaatcggagaggtcaatcaactgttaatgtttatgtcaaatctttaagagatttttctacagaatcaatgtcttggttccagcaacaaattatatatatacacccctgaatcaacttaagggtggtacaattgtcaatgtctatggtgttgtgaagttctttaagcccccatatctaagcaaaggaactgattattgctcagttgtaactattgtggaccagacaaatgtaaaactaacttgcctgctctttagtggaaactatgaagcccttccaataatttataaaaatggagatattgttcgctttcacaggctgaagattcaagtatataaaaaggagactcagggtatcaccagctctggctttgcatctttgacgtttgagggaactttgggagcccctatcatacctcgcacttcaagcaagtattttaacttcactactgaggaccacaaaatggtagaagccttacgtgtttgggcatctactcatatgtcaccgtcttggacattactaaaattgtgtgatgttcagccaatgcagtattttgacctgacttgtcagctcttgggcaaagcagaagtggacggagcatcatttcttctaaaggtatgggatggcaccaggacaccatttccatcttggagagtcttaatacaagaccttgttcttgaaggtgatttaagtcacatccatcggctacaaaatctgacaatagacattttagtctacgataaccatgttcatgtggcaagatctctgaaggttggaagctttcttagaatctatagccttcataccaaacttcaatcaatgaattcagagaatcagacaatgttaagtttagagtttcatcttcatggaggtaccagttacggtcggggaatcagggtcttgccagaaagtaactctgatgtggatcaactgaaaaaggatttagaatctgcaaatttgacagccaatcagcattcagatgttatctgtcaatcagaacctgacgacagctttccaagctctggatcagtatcattatacgaggtagaaagatgtcaacagctatctgctacaatacttacagatcatcagtatttggagaggacaccactatgtgccattttgaaacaaaaagctcctcaacaataccgcatccgagcaaaattgaggtcatataagcccagaagactatttcagtctgttaaacttcattgccctaaatgtcatttgctgcaagaagttccacatgagggcgatttggatataatttttcaggatggtgcaactaaaaccccagatgtcaagctacaaaatacatcattatatgattcaaaaatctggaccactaaaaatcaaaaaggacgaaaagtagcagttcattttgtgaaaaataatggtattctcccgctttcaaatgaatgtctacttttgatagaaggaggtacactcagtgaaatttgcaaactctcgaacaagtttaatagtgtaattcctgtgagatctggccacgaagacctggaacttttggacctttcagcaccatttcttatacaaggaacaatacatcactatggatgtaaacagtgttctagtttgagatccatacaaaatctaaattccctggttgataaaacatcgtggattccttcttctgtggcagaagcactgggtattgtacccctccaatatgtgtttgttatgacctttacacttgatgatggaacaggagtactagaagcctatctcatggattctgacaaattcttccagattccagcatcagaagttctgatggatgatgaccttcagaaaagtgtggatatgatcatggatatgttttgtcctccaggaataaaaattgatgcatatccgtggttggaatgcttcatcaagtcatacaatgtcacaaatggaacagataatcaaatttgctatcagatttttgacaccacagttgcagaagatgtaatctaatattgccatccaatttagcatacataaaatgttgccactcaccttccctgtttgagcttcttttcctgacctgagttttgtatcagcaatgttgatgatgttagcatgggtatgggattagaaaatgtccttaccttaaatctcttggcttttactgggtgcaaggtaaataatggctatggattttgttttgctttctgttttgcttttgtacaaagagacctgcttaaacaagtactgctgagataagtgtctgatcaagctacagtgtactttaagtagaaatggcaaagttgctttgttggggtgctgatactgatgattttaggataaattcatttctttaaacttgtaatacatggttttattgcttgtttctctccaggatagtagagatttctctatttcacctcaacctaataaaagtggtcagatttataatgttaatgacttaatattatccttttctaatagtctcatgtaaaatatgccgctattacaacttacaactaattgaatgagatgttaacttagtaaaatagtttgatttttacctgacagtgtttgtcaaatttgngtatgntatttgccaaagacagatataaattacctggtttaatattagtgaagaataaataggtgcacannn

SEQ ID NO: 24698 - DNA, 1828 bp, Homo sapiens; identical to SEQ ID NO: 23042
  misc_feature 1, 159, 160, 161, 162, 163, 164, 165, 166, 167, 168, 169,170, 171, 172, 173, 174, 175, 176, 177, 178, 179, 180, 181,1814, 1815, 1816, 1817, 1818, 1819, 1820, 1821, 1822, 1823,1824, 1825, 1826, 1827, 1828: n = A,T,C or G

SEQ ID NO: 24699 - DNA, 373 bp, Homo sapiens
  misc_feature 1, 2: n = A,T,C or G
nnatggtactagtcctgttttgcaaattggagtggcctctctgtaaaggctcagaactaggtactaggaataaaaagaaattaaagaccctcgaggggctcaaagcctggacagggagataggctgttaagcccatttaaaacctgggtgtgttgagtgctaggctggagacatgcatacaagaaggctggtctgtgggggtagataatgcctctgttgactcttaggatgaattagaggcacaagggtgagagcctggtgtgttcggcaaacaataatcagtgaggggttgacagcgagggagtgattggtaagaggtgaatgtggagggtggaccagagtcagatgctaaaaggccttttccactgtgccc

SEQ ID NO: 24700 - DNA, 1375 bp, Homo sapiens
  misc_feature 1, 2, 3, 4: n = A,T,C or G
nnnnatgaaagcctgaactagagcagtggaaatgcgaatgtggagcagaggaacgattcaagaaattctgcggtaaaactcatcagacttcatcactgattaaagattgtcttctcctccaaggtctacatgattacctgaagtttaataataatgcaagaagtgtttgtgggaagcagagaagcaagcaactgtatttcttgttctcacctaagcattactggaggataagccacatcagtctacaaagaggttttcatacaaacataataagatgtaaatggaccaaaagtgaagcacattcttgcagtaagcactgttactctccaagcaaccatggtttacatattgggattttgaaacttagcacttctgctcccaagggacttacaaaagtgaacatttgtatgtcccgtattaaaagtactttgaactctgtttcaaaggctgtttttggcaatcaaaatgaaatgatttcacgtttagctcaatttaagccaagttcccaaattttaagaaaagtatcggatagtggctggttaaaacagaaaaacatcaaacaagccatcaaatctctgaaaaaatatagtgacaaatcagcagaaaagagtccttttccagaagagaaaagtcacattatagacaaagaagaagatataggtaaacgcagtctttttcattacacaagttctataaccacaaaatttggagactcattctactttttatcaaatcatattaattcatatttcaaacgtaaggaaaaaatgtctcaacaaaaggaaaatgaacatttccgggacaaatcagaacttgaagataaaaaggtagaagaggggaaattaagatctccagatcctggcatcctggcttataagccaggctcagaatctgtacatacggtggacaagcctacaagtccttctgcgatacctgatgttcttcaagtttcaactaaacaaagtattgctaactttctttctcgtcccacggaaggtgtacaagctttagtaggtggttatattggtggacttgtccccaaattaaagtatgattcaaagagtcagtcagaagaacaggaagagcctgctaaaactgatcaggctgtcagcaaagacagaaatgcagaggagaaaaagcgtttatctcttcagcgagaaaagattatcgcaagggtgagtattgataacaggacccgggcattagttcaggcattaagaagaacaactgacccaaagctctgcattactagggttgaagaactgacttttcatcttctagaatttcctgaaggaaaaggagtggctgtcaaggaaagaattattccatatttattacgactgagacaaattaaggatgaaactcttcaggctgc

SEQ ID NO: 24701 - DNA, 2603 bp, Homo sapiens
  misc_feature 1, 2, 2331, 2333, 2336, 2338, 2339, 2340, 2341, 2342, 2343,2344, 2345, 2346, 2347, 2348, 2349, 2350, 2351, 2373, 2374,2375, 2376, 2377, 2378, 2379, 2380, 2381, 2382, 2383, 2384,2385, 2386, 2387, 2388, 2389, 2390, 2391, 2392, 2393: n = A,T,C or G
  misc_feature 2394, 2395, 2396, 2397, 2398, 2399, 2400, 2401, 2402, 2403,2404, 2405, 2406, 2407, 2408, 2409, 2410, 2411, 2412, 2413,2414, 2596, 2597, 2598, 2599, 2600, 2601, 2602, 2603: n = A,T,C or G
nncggcttccactccttcaggcgtcggcagccactagtcgtggcgagaggggcggggtggccggggctggcgctccacttggcccccgctcccggcccgccccgccgaccgcggccccccggatgagggtatatattcggagcgagcgcgggacgccgacgcgcgtccgcgcggaaggagctggagacggtcgtagctgcggtcgcgccgagaaaggtttacaggtacatacattacacccctatttctacaaagcttggctattagagcattatgaacattaatgacctcaaactcacgttgtccaaagctgggcaagagcacctactacgtttctggaatgagcttgaagaagcccaacaggtagaactttatgcagagctccaggccatgaactttgaggagctgaacttctttttccaaaaggccattgaaggttttaaccagtcttctcaccaaaagaatgtggatgcacgaatggaacctgtgcctcgagaggtattaggcagtgctacaagggatcaagatcagctccaggcctgggaaagtgaaggacttttccagatttctcagaataaagtagcagttcttcttctagctggtgggcaggggacaagactcggcgttgcatatcctaaggggatgtatgatgttggtttgccatcccgtaagacactttttcagattcaagcagagcgtatcctgaagctacagcaggttgctgaaaaatattatggcaacaaatgcattattccatggtatataatgaccagtggcagaacaatggaatctacaaaggagttcttcaccaagcacaagtactttggtttaaaaaaagagaatgtaatcttttttcagcaaggaatgctccccgccatgagttttgatgggaaaattattttggaagagaagaacaaagtttctatggctccagatgggaatggtggtctttatcgggcacttgcagcccagaatattgtggaggatatggagcaaagaggcatttggagcattcatgtctattgtgttgacaacatattagtaaaagtggcagacccacggttcattggattttgcattcagaaaggagcagactgtggagcaaaggtggtagagaaaacgaaccctacagaaccagttggagtggtttgccgagtggatggagtttaccaggtggtagaatatagtgagatttccctggcaacagctcaaaaacgaagctcagacggacgactgctgttcaatgcggggaacattgccaaccatttcttcactgtaccatttctgagagatgttgtcaatgtttatgaacctcagttgcagcaccatgtggctcaaaagaagattccttatgtggatacccaaggacagttaattaagccagacaaacccaatggaataaagatggaaaaatttgtctttgacatcttccagtttgcaaagaagtttgtggtatatgaagtattgcgagaagatgagttttccccactaaagaatgctgatagtcagaatgggaaagacaaccctactactgcaaggcatgctttgatgtcccttcatcattgctgggtcctcaatgcagggggccatttcatagatgaaaatggctctcgccttccagcaattccccgcttgaaggatgccaatgatgtaccaatccaatgtgaaatctctcctcttatctcctatgctggagaaggattagaaagttatgtggcagataaagaattccatgcacctctaatcatcgatgagaatggagttcatgagctggtgaaaaatggtatttgaaccagataccaagttttgtttgccacgataggaatagcttttatttttgatagaccaactgtgaacctacaagacgtcttggacaactgaagtttaaatatccacagggttttattttgcttgttgaactcttagagctattgcaaacttcccaagatccagatgactgaatttcagatagcatttttatgattcccaactcattgaaggtcttatttatataattttttccaagccaaggagaccattggccatccaggaaatttcgtacagctgaaatataggcaggatgttcaacatcagtttacttgcagctggaagcatttgtttttgaagttgtacatagtaataatatgtcattgtacatgttgaaaggtttctatggtactaaaagtttgttttattttatcaaacattaagcttttttaagaaaataattgggcagtgaaataaatgtatcttcttgtctctggagaaaaaaaaaaaaaaaaaaaaaaaaaaaaaaaaaaaaaaaaaagggcggccgcttctagaggatcncnagnannnnnnnnnnnnnnggccattaaactattaaaaaannnnnnnnnnnnnnnnnnnnnnnnnnnnnnnnnnnnnnnnnnaaagaaaatgggtgaggaaaacatcaaaatgccaccaaaaaagggtaacaaaaaaaccaataccatcaaaaatttcaaaaaaaaacaattttttcaactgaattctagtgggggtttgccaaaacccaaaaaaggatataaaaatgcttgaacccccggttcccgagcaaaaaaaaaatccnnnnnnnn

SEQ ID NO: 24702 - DNA, 707 bp, Homo sapiens
  misc_feature 700, 701, 702, 703, 704, 705, 706, 707: n = A,T,C or G
acttccactcttgtttccaattcaccccaggtcattcaactctatagccactcctaatgcctctcctgaggtaggacaaaagtgggcttcccaaaccaaaaagattcacagatccatgaagaaactgaacatccacttcaaatttcctcctctgatcttggcaactgcaggaaatgaaagcatttgtccagatctctggcaaagatggcactgtggtgttttctctggggccagttgtgcaaaaccttatagaagagaaggctgatctcattgcttcagacttggcccagattccacagaaggaagacctactacgttatctgagacaatggggaaagctgacgtatggcttattcgaaactcctggaattttcagtttcctcatccactcttaccaaatgttgattttgttggaggactccactgcaaacctgccaaacccctgcctaaggaaatggaagactttgtacagagctctggagtggtgttgtggtgttttctctggggtcaatggtcagtaacatgacagaagaaagggccaacgtaattgcatcagccctggcccagatcccacctcggctgtacaagtggataccccagaatgaccttctaggtcatccgaccagagctcttataactcatggtggagccaatggcatctacgaggctctaccatgggatccctatggtggggattccnnnnnnnn

SEQ ID NO: 24703 - DNA, 3918 bp, Homo sapiens; identical to SEQ ID NO: 22949
  misc_feature 3915, 3916, 3917, 3918: n = A,T,C or G

SEQ ID NO: 24704 - DNA, 1390 bp, Homo sapiens; identical to SEQ ID NO: 24490
  misc_feature 1, 1385, 1386, 1387, 1388, 1389, 1390: n = A,T,C or G

SEQ ID NO: 24705 - DNA, 910 bp, Homo sapiens; identical to SEQ ID NO: 24689
  misc_feature 1, 907, 908, 909, 910: n = A,T,C or G

SEQ ID NO: 24706 - DNA, 1169 bp, Homo sapiens
  misc_feature 1, 2, 1169: n = A,T,C or G
nnacgcgtccgcaaaaatgaaagcattttcattctggaaaattgactcttagggtcacatgcccactgtggagctcctgaaaaagtatcacctgatgcagtttgcggaagtaaccagagctgtgaggtagagtatgccatccttcctgtttggggttttaaaaatgcaagcctgatgagagttgacgtgcacgctctgtgagaaactcactctccttctgacgcgcctgccccctcaccagagagggcaacctgctggtgctgcacgaggcgctggcgaagcacgaggccttcttcattcgctgcggaatcttcctcatcctggagaagctgaagatcatcacctacaggaacctctttaagaaagtgtatttgttactgaaaacacaccagctgtctctggatgcttttctggttgccttggaagttcatgcaggtggaggacgtggacattgacgaagttcagtgtattctggctaacttgatatacatgggacacgtcaaaggctacatatcgcatcagcatcagaagctggtggtcagcaagcagaacccatttcctcccctgtccacggtgtgttgaaagtacacggagccccgaggacgggtgagcagttgtttctttccactttggttgtgctgatgagaccggtccggtactgcaacaaggctccctgaagccggaactcttggaggcgcttttcccagggatgctgaggctgagattttcagcacacccgagttaatctccttcatttgtaactaatttcagcctgatgaaaacctggaattcctttttcacagactcggctggttctggagtctttgtgagacttctttgaaggaggctttgcgtgaaggctgctcggctcacttttcctaagtgtggttcctgaaggctgtctttgtaactttttgtagttctttgtgtaaaaagcgtattctgaatttatacacatggcatgttcttcattatatcttccaggatacatctatttttatatattaaatttgaatgtgttatcaaaatgcttggttaacttaaggcacctttttaaagcagattttttgttaatttgcgattttagtgcgtaggggcccatttggggggtccaacttttttgcttaaaaaaaaagggggcatttccgggcggctgtccctttagctcn

SEQ ID NO: 24707 - DNA, 4399 bp, Homo sapiens; identical to SEQ ID NO: 20975

SEQ ID NO: 24708 - DNA, 3161 bp, Homo sapiens
  misc_feature 3156, 3157, 3158, 3159, 3160, 3161: n = A,T,C or G
ggagtcgacgtgtgtttgtgggtgaaatggctgcgcaggtcggagcggtgcgcgtagtacgggcggtggcggcgcaggaggagccggacaaagaggggaaggagaaacctcatgctggggtctccccgcggggagttaaacggcagcgccgatctagcagtggggggtctcaggagaagcgggggcggccgagccaggagccccctctcgctccccctcaccggcggcgtcgcagccgccaacatcctgggccgctgccgccaacgaatgcagccccaactgtcccaggccctgttgagcctcttctcctgccgcctccgccgccaccttcgctggcacccgccgggcccgctgtcgctgcccctctcccggccccaagcacctcggccctcttcaccttctcgcctctgacggtgagcgcggccgggcccaagcataagggccacaaggagcggcacaagcaccatcaccaccgcggccccgatggtgatcccagctcctgcggaaccgatctcaagcacaaggacaagcaggaaaacggcgagaggactggaggggtgcctctgatcaaagcccccaagagagaaacaccagatgaaaatggtaaaacccagagagccgatgattttgtcttgaagaaaataaagaagaaaaagaaaaagaaacaccgagaagacatgcgaggaagacgccttaaaatgtacaataaggaagtacaaaccgtctgtgctggcctgacccgcatcagtaaagaaattctcacccaaggacaaataaatagcacttcaggacttaataaggagtccttcaggtatctgaaagatgaacagctgtgccgattaaatttgggtatgcaagaatatcgggtaccccagggagtacaaacaccttttatgactcaccaggaacattctattcgtagaaatttcttaaaaacaggtactaaatttagcaactttattcatgaggaacaccagtccaatggtggtgctcttgtccttcatgcttacatggatgaactctcatttttgtctccaatggagatggagagattttctgaggagtttcttgctttgacattcagtgaaaatgagaaaaatgctgcttactatgctttagcaatagtgcatggagcggctgcttatctcccagacttcttggactactttgcttttaatttccccaacactccagtgaaaatggaaattctgggcaagaaagatattgaaacaaccaccatttcaaattttcacactcaggtcaacaggacatactgctgtggcacctaccgagcaggtcctatgcggcagataagtctcgttggagcagtagatgaagaagttggtgattatttcccagagttccttgatatgttagaagaatcaccatttctgaaaatgactttgccctggggtacactttctagcctccgactccagtgtaggtcccagagtgatgatgggcctataatgtgggtaaggccaggagaacagatgatccctacagcagatatgccaaagtcacccttcaaaagacgacgatcaatgaatgaaataaaaaatctccagtacctacctcggaccagtgaaccccgcgaagttctctttgaagataggactagagctcatgctgatcatgtcggtcaggggtttgactggcagagtacggctgctgttggagttttgaaagctgtacaatttggtgaatggagtgaccaacctcgcataaccaaagatgtgatttgttttcatgctgaggattttactgatgttgtacaaagacttcagttagatcttcatgaacctccagtttcccagtgcgtacagtgggtagatgaagctaaactaaaccaaatgaggcgggaaggcattcgttatgctagaattcagctttgcgacaatgatatctacttcatccctagaaatgtcattcatcagttcaaaacagtttcggcggtgtgcagcttagcctggcatataaggcttaaacagtaccaccctgttgtggaagccactcaaaacacagaaagcaattctaacatggactgtggtttaactggaaagcgagaattagaagttgactcccaatgtgtgaggataaaaactgaatctgaagaagcatgcacagagattcagctgttaacaactgcttcatcatctttcccacctgcatcagaacttaatctacagcaagatcagaagactcagcctattccagttttaaaagtggaaagtagactggactctgaccagcaacacaatctgcaagaacattcaaccacttctgtgtgatatgtacatattcaaacacattttttaacttttttaaattttgatgtgaagttatagttttataactggcttaagttaagttttattggagaaatcttgcctataattctataaagagaaatgacattccacaaatgtcaagcatatcttttttacacagattatgcaaagttaagagttgtatcttatcccgttagtacagtatgtaatagtgggtctgctgctactttctgttttaaggtgtgaggtaacaattcaatctcttcttcaaatcaaaatgagaattctctggaataacagattcttgtttggtaaattattcacttcccttaattttatcttgccttgtctcttgccatatttgctgtttttatggataaataagatttatggtttagtacttgtgtctttatggcacaggttcaatttctacagtgaaaatggcataggttgcaggaaagaatttctgcatctggtacatgggcaagtaagttatttagttctaaccacaaataacaagtagtttccaaggaaatttcagtggctctctggtttcttaacaaaagagaaagcacagcactttctgatccaaactgtcttttttttgtatctgttatttaaagcccagtggatatttcaattacaaaaaatttaggatgaatggccctgggaataataacggggcactaactgttagaaatatgctacgtggaaaatttgggcaagacatatgggcggaccaggtgacgggctccaatgtggggattgctaaggcaaatatacgaaaaatgtggggaatggcacaaaaatcgggactaatagtacaagtggttcacgagaaaacttggtactggctaatctatannnnnn

SEQ ID NO: 24709 - DNA, 1929 bp, Homo sapiens; identical to SEQ ID NO: 22972
  misc_feature 1, 2, 3, 4, 5, 6, 7, 8, 9, 10, 11, 12, 13: n = A,T,C or G

SEQ ID NO: 24710 - DNA, 1191 bp, Homo sapiens; identical to SEQ ID NO: 24304
  misc_feature 1187, 1188, 1189, 1190, 1191: n = A,T,C or G

SEQ ID NO: 24711 - DNA, 343 bp, Homo sapiens
atgacaacgaccaacttttcaaacatccaggacaaccagttttctccctgtggtgtgcccatttcgcttttgtggtgaagcttctgccgttgagcctgcaggtacagctgaggaaataaatggcagatgttacacaggaagcaatataacatggtcattaagtaactgtattcaaccatcaaatttaattttaaatcttggcacagtgcccacaagccgtgtgactttagtccccttgataatataaacttcatttctctcacttataataaagagacacaaatggtacctgcgaggcccccgctaaagaggcaaaaaacgatcttaatgttctcccatgaac

SEQ ID NO: 24712 - DNA, 5242 bp, Homo sapiens
  misc_feature 4136, 5242: n = A,T,C or G
ccggggaggaaggagggcgagcgaggaggatggcggagtcggggctcctgacggaactctaatgaatcattgattgaccagcactattttaccagttggaatgaatgatcagaaatgggcatagtgcttttagatccaacatgtaacagatggatgttactccatgctgattacttcttcaagccagtacttttttgattgtgtaggatctttgtctcttcatctttgaattcaattactggaaaataaaaggagttcatgtagtttttgtccaggcttgagtcaccatgagtagtagtttaggaaaagaaaaagactctaaagaaaaagatcccaaagtaccatcagccaaggaaagagaaaaggaggcaaaagcctctggaggttttgggaaagagagcaaagaaaaagaacctaagaccaaagggaaagatgccaaagatggaaagaaggactccagtgctgcccaaccaggggtggcattttcagttgacaatacgatcaaacggccaaacccagcacctgggactagaaaaaaatccagcaatgcagaggtgattaaagagctcaacaaatgccgggaagagaattcaatgcgtttggacttatccaagagatctatacacatattgccatcatcaatcaaagagttgactcaattaacagaactttatttatacagtaacaaattgcagtccctcccagcagaggtgggatgtttagtaaatctcatgacactggctctaagtgaaaattcacttaccagtttgcctgactctcttgataacttgaagaagctgcggatgcttgatttacggcataataaactgagagaaattccttcagtggtgtataggctggattctctcaccactctttaccttcgctttaatcgtataactactgtggaaaaggacatcaaaaacttgtcaaaactcagcatgcttagcattcgagagaacaaaattaaacaactacctgctgaaattggtgaattatgtaacctcattacgctggatgtagctcacaatcaacttgaacaccttccaaaggagattggaaactgtacacagataaccaaccttgacttgcagcacaatgaactgctagacctcccagatactataggaaacctgtccagtttaagtcgtcttggtctgagatataacagactgtcagcaatacccagatcattagcaaaatgcagtgcacttgaagaattaaatttagagaacaataacatttctactttaccagagagtcttttatcaagtcttgtgaaactgaatagtttgaccttagctagaaattgcttccagttgtatccagtgggtggtccatctcagttttctaccatctattccctcaacatggaacacaatcgaatcaacaaaattccatttggaattttctccagagcaaaagtattaagtaagctgaatatgaaggacaatcagttaacatcacttcccttggattttggaacttggaccagtatggtagaattgaatttagccactaatcagctcacaaagatccctgaggatgtgtctggtctcgtttctcttgaggttcttatcttatcaaacaatcttctaaagaagcttccccatggtcttggaaaccttaggaagttaagagagttggatctagaagagaacaaattggaatccttgccaaatgaaattgcatatcttaaggatttacagaaattagtcttgacaaacaaccagttgaccactcttcccagaggcattggtcaccttactaatctcacacatctgggccttggagagaacctacttactcaccttcctgaagaaattggtacactggagaacctagaagaactgtatttgaatgacaaccccaacctgcatagccttccctttgagctggcactctgcagcaagctttcaatcatgagtattgagaactgtccactcagtcaccttccacctcagattgttgctggggggccttctttcatcattcagttcttaaagatgcagggtccatatcgtgccatggtctgatataaatctgctggtcccacacactgttcaaaaatagactgccattaatgtttcttatctatatctgtatctatttatgtagatattggtatatggcagatttataaaaattgcattatgtgtttctgctaatagaggaatcatagccatttagaattttttttaaattctgtacaaaaggcttatataagttttctttgctgaatttgatggatgtttttctgttgtgtaatctgatatgccagtttgcttaaaacatttgccaacacattatgaagttattaaatttaagggacagaggtagtatagttagatatactttctcttaggaaaaataatgggcaaaaatttttgttgcaacttttcatatatattttccccttaccaattgttttatccttatagtattgtaggccctgaaagtagaatttttctttaacttattttgagatttgagatttaaattttatgtattgtttacagtcagagtaaatcactggatttcttttgtttgttttgatttgctctgttttattcagtcaaatctagagtttgaatcctctgctaaagaatttgcatccactggtgtaaacagtgaaaggtatttgcttgttgaaaaaaaaaactggcaaagtgaaaagatacagtcaaaaatctagaatttctttaattttgcttctctgacgagttgtgaagcaaaatacctgaagtgagtctttgggtaggggaagggtattgagaccttttctagtatgaatattttttaagtttgggggaagagaaacttgcagtgaaaaggagttttttcattcctgaaagttgcagatccacaaaactaacaggataattgggcaaataaattacatataaacacacacaatctatatatgtatatacaatgctatatagatatgtatttattatatcataaactacagtaggtaactttaaggatttcttcctatccttgtacaatgacatgaatgtctttctttgaaaactgcaatgtatgtatgtttcaaggttatttaacagtgtactatggttttatatcttgacttgccttgtacatctttcaattctggaatatctgtgtctaagcacaatatcttcacactgtgctgtattgctgctgaactaaatgcacttttccccacatatggggcactggcttcaaacaattcagttcagtatcattacttttaatctcatctttcctttcttggtagttgttaatacagttatggaaaagaggcacattgcatagaagccattggggagttcagtggaagttctgtaagatgtgcatgtactatttgatgcgttttctttgcttcactgcttttaatacttagcagtattgttggtctaagtcaatttgattattgaggagtctcagagcaaggtgcgttctagatgtcatcctaaaaaacacttcatatataattaatcactattttgtataattacatattgctgcttgtgtgtttttttttttttccatttagttgggcgttgtgttttacacaaaaccatttttgaattaaggctatgatattaagatagaaatttggactgttgttctgcttttcctggcactcaaattcatgactagttttgaggtcaaacctatgttcgtaatgagagattttataaggatcaactaagaaatggaaggcaggtgaagatataaaaccctagaatgcttaaatgtgctgtaaaactattgtagatgtcactggattttaccaagtaatatcctttcttttttttttccccccatctgctgtggcttttcagttaaaattttgtttataaaaggaatttgtttattacagctctacctaaaaaaaaaaaaaaaaaaaaacttggtgtgcggcgcgcgcgcccaggggccaccagagaaaaaggtcttctataagagaacccatccgcggttgaggcgcgcgcgggggggccccacagtaagtgcaaacgagcaaaccactgggcgccaaaacggggtggtcccaaaggagaacactccggggcgcaatagcgaacaacgggcgcgggcggtccccccaccaaataaaaaaaaagagcgccgcggggaggcancaaccaagcggcgtcggttccggagaaacaaatccccgagaaggcgggcgcacgaagggggaacaaaacgggggactacaatcaccaacgagagacgtcccaagggaggagccaggaatataaaaatataacgcccggcagcagagggggagcacaaccatcacagcaacaacaagcagaacgcaagagcagaggacgcggcgaaggcgagacaggagcagagaggggagagagcaaaaagcggacaagaaacgaagggcagaagaaggagggaagcgagccagagaggaaggcagaggcgagacaccgacgaggacaacccagacgagagacgagagaaaggagacagagcacaagcgaacaaccgcggcaaagagaagcgagagagagcagagaaggacgagcagaggaggagagcagaagcagagagggggagcgagaagcgcaagcagaagccaaaaaagcaagacgcaaccacaatagcagaacaacagcacaagaaccgacagacaacaagaagacacaaaaagaaagagacgaaacccagccagacgaaccacacacaaggagcaagacagacaagaagacagtcagcccgacgatacgcgagagagagcaaagacacagaaacgacaaagcaagaacagagaacagcagagcaaaacaaagaagagacacaaaacaacagaaagaagaaccaccgacacaaaccaagagagacgaccagcaagacaaacctaaaagcgcgagacacacgagcgaagaccacacgaagcagaaagcggaccagaccacgagaccacagaagcagcagacaccgaggcagcggcagacgagcgacgggagaagagcagacagagacaaagacaaggaagaagcaagacgaacagaagaagcaaacgcagagaaagaacagcaacaaaagaaggaagacgagaggacacgcgacagcaaactaggcaaagcaagacagcgaaggaagcagacagcagaaaagcaaccagagaaagacgaacagacacagagaagaagcgagaagcagacgaggaaccagagaagcacagagaagagcgaaacaagaaacacacagagaaaacaaccgacan

SEQ ID NO: 24713 - DNA, 503 bp, Homo sapiens
  misc_feature 1, 2, 32, 43, 53, 79, 483, 484, 485, 486, 487, 488, 489,490, 491, 492, 493, 494, 495, 496, 497, 498, 499, 500, 501,502, 503: n = A,T,C or G
nnatcccctcccctttgtttgattttttttcncagtataaagnttaaaatgcnttagcccttgtactgtatgatcaaantgtttaatcatataaatagaatgtaaatgtctcactgagcactgttttctagtgtatcaaaatgctcttatttcatcattcacttcactgtgctgttgttatgatgtgcttaacagggaacgtgattagtgaaaggaagatgaacgtggatgttactccaaaacttcgtttaatgaatgcttaaagaattcaaattttatctgcctctcttgtggtgtggatctcttcttaatgtacatagtgctaacatgaagacctttttctgcactatatgctaacagggtaactaactgaaacatagcctctttcactcttccatccttcaaggtatatttgggtttaccccggcctttgtgttaaggtgggatggtttttttttttaaaaaaagggtcccccccctcgnnnnnnnnnnnnnnnnnnnnn

SEQ ID NO: 24714 - DNA, 948 bp, Homo sapiens
  misc_feature 1, 2, 107, 122, 124, 142, 143, 948: n = A,T,C or G
nnccagttgccactccataggagttgaaaaaaagtttttgtttttttgcccatctgttaagatgttcctgagacagggccagttaataaaaccattaacaaagcacntggagtccgggtttncnctttcgcactacgtcctnnacatcactacttaaacttgttagacttgagatgtggaatgcaggtcatgtactatgaaaagttgattgtagcacaactgttcaatcagtaaaaggtcttcggcaaattccctttagagtatactttctataaactacatgttccacaaaaaggtcaattatatatacaattgatttgttttacttaatcttatttgctcagatcttgcaaatgcaatgagaatattaagcctgaggctagttctcagtgtataggtttaacaaattaaggctcattttcccaaatcaaaatagtttttagttttccttttaaattatgaattacattcatagtacaagaagaaatgcttaaggaagaatttcaaaagaaatctgagcagttaaataaagagattaatcaactgaaagaaaaaattgaaagcactaaaaatgaacagttaaggctcttaaagatccttgacatggctagcaacataatgattgtcactctacctggggcttccaagctacttggagtagggacaaaatatcttggctcacgtatttaagagcctgaatattccagggtctcgctttgacacccaggctggagtgcagtagcacaaacatgggtcattgtagcctcaacctcccaggctcaagcagtcctttcacctcaaccccccacatagctgggactacaggtgcttacacccaagaccagttaattttttgtatttgtttgtagagatgtgtttttccatgttgcccaagctggtcttgaactactgagctcaagcaatctgcctgcttcagcctcccaaagn

SEQ ID NO: 24715 - DNA, 253 bp, Homo sapiens
  misc_feature 250, 251, 252, 253: n = A,T,C or G
ggaaaagtgaggcagaatggagcttgtttataggttttctgataacaattataaaaaatgtgctttatagattaagacttattccagtatcctcccgccccacccccatcatagatgttttcaaacaagaacccctgcgatcagcagaagcatctctaatctaacatgctttgtccttgctagggcaggctaacagctttaaaaagcaaccgtatgctcttctctggttgaggtgaggggaaggcgctcnnnn

SEQ ID NO: 24716 - DNA, 1959 bp, Homo sapiens
  misc_feature 1, 2, 3, 4, 5, 6, 1934, 1935, 1936, 1937, 1938, 1939, 1940,1941, 1942, 1943, 1944, 1945, 1946, 1947, 1948, 1949, 1950,1951, 1952, 1953, 1954, 1955, 1956, 1957, 1958, 1959: n = A,T,C or G
nnnnnnagtaacggctaggtacgaggctgggtggcgccggaagtgagatgcaaggcggcgattttcccttctgtcagatcttgatgaacaaagcagtcataattcatctctagaaagatttatatcctggcatttgaaatgctttttatttagaatagtagtaaaaaatggaaaaagaaaaaggaaatgatgatggaataccagaccaagagaattccttggatttttctgaacactttaaccaacttgaattgttggaaacacatggacaccttattcctactggtactcaaagtctttgggtaggcaattctgatgaagatgaggagcaagatgacaaaaatgaagagtggtatcgattgcaagaaaaaaaaatggaaaaagacccaagcagattgcttctttgggctgctgaaaaaaatcggcttaccacagtgcggagactcctttctgaaaaggccactcacgtgaacactagggatgaagatgagtatacccctcttcatcgagcagcctacagtggacacttagatattgttcaggagctcattgcacagggggccgatgttcatgcagtgactgtggatggctggacgcccctgcacagtgcttgtaagtggaataataccagagtggcttctttcttactgcagcatgatgcagatatcaatgcccaaacaaaaggcctcttgacccccttgcatcttgctgctgggaacagagacagcaaggataccctagaactcctcctgatgaaccgttacgtcaaaccagggctgaaaaacaacttggaagaaactgcatttgatattgccaggaggacaagtatctatcactacctctttgaaattgtggaaggctgtacaaattcttcacctcagtcttaacaattctagtaattttcctaagtttctaaataccagtgcctcctgtgtgtgagatgtattcccataatcaaagttgacgtcaaacatcttactacaaaaattcagtgacattcattataacattcttccaagtgaattgcctgactttgatgtcaaaatgtatttgaaagtaatttgcatatatctttaattatttctgtggagtttgtgatttttttatcagaaataattttaatgtgtgtatacttaaaaacttgacacgggttgtacagaaactggtatttttggtgctgatacaagagaaatgtatttttaaatatcccacatcctggatctttgttgggtatttagtatattgacatatatttttataaggtgaggtaactcagaacttaatttaaaagtcttaaatattctgatacaattcagctgtcttctctaccttaccatagccagttgctttcattttaaaccagagcaagtaacatattagtgacttgaatcttcataagttaaagtaaaaaacagcaaaaaacctagatctttgtcttttagaacacagaccattttcaggaaagcagttagctaagtgtttaattcatgaatattgtatactgcatcccctaccacaatttacacaatcctgtggatagtcctacctcaccctggtcaacctacatgatccttaagctaatggcgaatcacgatgaccttgtagacatgcacacaactatacctttgtccaacagatcataatatatctgctatccaactggttttacctgcctaatcctactgatttgggcactgcttgtatagtctctcaagttcacaggaaatgttgattttctaaggtcctcatttttacagagtatacaggcaaagtgacaggggaaaaggaattagtctaagagtaaggggatgattattatattgaggctaaaaccacaaagtggctcaggctttaaaaaaaaaacactgtggataatgacaaaaagcataagtaaaaatatttgagaaaaataaagtacaagttttgaacaacannnnnnnnnnnnnnnnnnnnnnnnnn

SEQ ID NO: 24717 - DNA, 3294 bp, Homo sapiens
  misc_feature 1, 2, 3, 4, 3293, 3294: n = A,T,C or G
nnnnccgcgtcgactgtgacactgccagcagcgcgcagagggagggatgggggcgggtatcggcgtaggggccctcggaaagaacggatattgctgtgacaccgcggggacgctctgaagggacgagtgtcggtgtggcaccggtgcacgctgaaggagccggcggaaccgggtggccatggggatgtgggcatcgctggacgctttgtgggagatgccggccaagaagcgtatcttcggggccgtgctgctcttttcctggacagtgtatctttgggagaccttcctagcacagcggcagagaaggatatataaaacaacaactcatgtaccaccggagttaggacagatcatggattctgaaacatttgagaaatctcgactctatcaactggataaaagcactttcagcttctggtcaggactctattcagagactgaaggcactcttattcttctctttggaggaataccttatctctggagactttctggacggttctgtggttatgctggctttggaccagaatatgagatcactcagtccctggtgtttctgctgttggctacacttttcagtgcattgactggtttgccatggagtctttataatacttttgtgatagaagaaaaacatggcttcaatcaacagactttggggttcttcatgaaagatgcaatcaagaaatttgttgtgactcagtgtattttgttgcctgtgtcttcacttctactttacattattaaaattgggggtgactatttttttatttatgcctggctgttcacattagttgtgtctctggttcttgtcacaatctatgctgattatattgcccctttatttgacaaattcacacctctgcctgagggaaagcttaaagaagaaattgaagtaatggcaaagagtattgactttcctttgacgaaggtgtatgttgtggaaggatctaaacgctcttcccacagcaatgcttatttttatggcttcttcaagaacaagcgaatagttttgtttgacactctactagaagagtactctgtactaaacaaagacatccaggaggattctggcatggaaccccgcaatgaggaagaagggaacagtgaagaaataaaagctaaagttaaaaataagaaacaaggatgtaaaaatgaggaggtactcgctgtactaggccatgaactggggcactggaagttgggacatacagtcaaaaatatcattattagccagatgaattctttcctgtgtttttttttatttgctgtattaattggtcgaaaggagctttttgctgcatttggtttttatgatagccaacccactcttattggactattgatcatcttccagtttattttttcaccttacaatgaggttctttctttttgcctaacagtcctaagccgcagatttgagtttcaagctgatgcatttgccaagaaacttgggaaggctaaagacttatattctgctttaatcaaacttaacaaagataacttgggattccctgtttctgactggttgttctcaatgtggcattattctcatcctccactgctagagagacttcaagctttgaaaactatgaagcaacactgagatgtccaggatctgtgactgaagacatttctgattatttctgtcctggcagcatgttccagctcttgatgtttttaaacttttttttagaagaaaaattaagtacagaaaagcccagatttaaatacatttaatatgtcattttaaaaatgattttaataattcatttcttaaaacactgaatgaattttgaagcttaatgtttttaaaggcatagttttatctttgacatctaatttaccatcaagttgtaaaattatttggaaaaatacagaactcgttttatttgtatacttatatggaatctgcatgtgaggtgtttgagggcatatgtttgaaagagggagcatcaccacaggaatcctttctgtgaggtggaaacagtggtcctgaatcattgtgctcacacctaacttgaaatctggtcttactttcatgctgttatgatttcacctggtgaatcagtgttttaaataagaaaggtaatagttggtaaggccaatgttatttaaatgaaagtagttagaaaaatgctctcctattctaccaaatttttaatttctttcttccctttcttgctacacagtgatcaagagtttctcatagtgctttgaagttagaaattatgtataggatattttaaatcattgagttttgtggggtttttttgtttgtttgtttcttttgttttttggaaaatccgtgtctttatctttttttcccacgtggtagatatgatcccattggaggtaaattgtagcttcttctcattcatgcagtaaataatacatcctttcactcagcagagatggccatattaaacacgttttgctatgttaaaagtggcagaacaggaaagacgaattaaaaataacattttttaagcgacataaggatgaaatactgatgaatctctgtgacattacagggaaaaaaatatagttttctatctctttcaagggcagaagagttttcatttttatttttgtaattttatctgtaagtcataaatattacttaatcaggcctgattctacttttgaaaattacagttcttgaaatgcagataatgtttactttgaaaacaaatgtcatgaatgatttccagtttttaaagctatatgtttcactgcttcatatctctgtccactttctgaatgagaacttattttgtgcctagagctctcactcactgataatgcttattaccttctgggcatttattccaaagtgggatcaactgtacgcctttggtatctgaccataaagtcttttgctccgctgacatttgggtgatgtcttcacatggaaatataataaaaataaaaatctagtttaatactgcattatttattttcctaaggctaaagaggagcagtcctatgcttttattcagcatcctttatctgtgacttcatgctctgataactgcctttccttccttctgtgcctttgaatacaaatttcagttctgcaaaagtgaaacattaaacattgccaacgcaaatgaaaagaaaaaaaaaaaaagggggcgcgtacgaggcagaaaatctcaaaccatcgtggggggcggcgccaaaggtagataacgggcaaggtcaagaacggccagacaggtggtgtcccaaaaaacccgggaccagtttgaaacccagggcggggcagggacacaagcagcaaacagcann

SEQ ID NO: 24718 - DNA, 2065 bp, Homo sapiens
  misc_feature 1, 2065: n = A,T,C or G
ncttgtacttttctttcttcctccctctacacaactaacttcgttctctctttctccaaacaactctctctttatctcttttgacggcagcctctctccttaactctcccctcccacccaactctccaaagggaaaccctttccctatcacatgtctgcgccaaacaaccatatttcccctgaacacccaggtgaacccttcccaattggtctctatttgggcattaatgtctgaacccatatcgagcagcaattttactgcaggaacatgtccattcattgcagccaacatcaggggagaaatacctagtttactcccagtccttgaattaatttctgccccagcattaagcagaatcttaatgatattaacatatcctccagacgcagctagactcagtggtgtataatcagatacgttcctatgttctttatttgcacctcgagccagcagcaagtctaccacctcctgacgtccaccagaacatgccaatgaaagcggagtatccttagttcgttcagactgtgcttctatatctccacctttatccaaaaggatttcaacaactccaacatgccctgctgttgctgccaggattagtggtgtgaaaccttttttgtctctgtgttcaattttggcatcccgtgcaatgagcacagatacaagttcttcatgaccacctgcacaagctagtgttaatgctgtgtcatgattgctctcagtatgtgcatcaatgtcaactgaaggatacacaggaggcatcgattgggaagccacattgcttgtagtctgcgaacaggattcaggtgtaagacactctgtggtctgagaagaactgttggaaccagtgggcactctggtactcacagctgctatcaggtcatcaagagtgtcggtaagcgtctgagctggagttgcaaccattagtccatctggttcttgaactaacagcccctgatcatgtccagtaatagcaatctgaggctgtcctacaatctgctgattacctgatactttctgaagttcaagagaatttgtcccattagaacctaagtcactggaaaagttacactgtggagatgataaaggctggactgggacaaaatcaatctgttctgccgatggtggagactgttgctcatcatcaacatcattatctttaaataagattgtgtcaacctgaggtaactctgaaaagtgatcctctgggagactaccatctccttccccttctgggaagactcctctatgagagcactgttggtgtagagacactgtgtctttctgacctttggtttccaagtattctttggtaaattgctgctgtgttttcatctgcaactgcctttccactttctgcagttctttcaatattttcttcttcttctggacttgctcttctctgttctttttaagttcttctatcttatctttgttcagaggttcaccttgaattaactccagtgacttaagctgtgctttttcaatagcactaattctttgtcccagttcattcagcttgccttcagtctcctctactatgcactccaaaggctggtatgggtgaaaagatggcagtaggtcctgatctgctacctggagggaactggacttctgcttggatgtacctttttgcactcctaaaagggcaggagagttctcctgtgaagttctgtcaggttcctggggaggtacaaccatggcaagtgtatgcgttggcacacgtggcacctgagactgatcttgagaaggtggagggagctgagacacatctgtggtgggaactgacagaacattatttggataatccaacagataagaaactacattagtatggccaccctttgcagcttcaatgagcattgttgaaccatccttgagtcgatgagtagggtcagccccatgaccaagagaagctcaacaactgccaggtggcctcctgcacatgccagcgacactcctgtatgatcattattggctgtagccctgttaacattggcacctttgctaataagaaactgcacagtgcacaaatgaccagctcttgccggacgcgtgggtcgn

SEQ ID NO: 24719 - DNA, 2947 bp, Homo sapiens
cgtccggagctcctgcgcgttccgggggcgccgcttcctcgagttaccttcccgccgttaaccgcggcgcgccagaggtggtctcctccaggccctgcctcccattgccccaaattaatgctgactgaacggatcggtgcgaggattattttacactgaactgatcaagtactttgaaaatgacttcgaaatttctcttggtgtccttcatacttgctgcactgagtctttcaaccaccttttctctccaaccagaccagcaaaaggttctactagtttcttttgatggattccgttgggattacttatataaagttccaacgccccattttcattatattatgaaatatggtgttcacgtgaagcaagttactaatgtttttattacaaaaacctaccctaaccattatactttggtaactggcctctttgcagagaatcatgggattgttgcaaatgatatgtttgatcctattcggaacaaatctttctccttggatcacatgaatatttatgattccaagttttgggaagaagcgacaccaatatggatcacaaaccagagggcaggacatactagtggtgcagccatgtggcccggaacagatgtaaaaatacataagcgctttcctactcattacatgccttacaatgagtcagtttcatttgaagatagagttgccaaaattattgaatggtttacgtcaaaagagcccataaatcttggtcttctctattgggaagaccctgatgacatgggccaccatttgggacctgacagtccgctcatggggcctgtcatttcagatattgacaagaagttaggatatctcatacaaatgctgaaaaaggcaaagttgtggaacactctgaacctaatcatcacaagtgatcatggaatgacgcagtgctctgaggaaaggttaatagaacttgaccagtacctggataaagaccactataccctgattgatcaatctccagtagcagccatcttgccaaaagaaggtaaatttgatgaagtctatgaagcactaactcacgctcatcctaatcttactgtttacaaaaaagaagacgttccagaaaggtggcattacaaatacaacagtcgaattcaaccaatcatagcagtggctgatgaagggtggcacattttacagaataagtcagatgactttctgttaggcaaccacggttacgataatgcgttagcagatatgcatccaatatttttagcccatggtcctgccttcagaaagaatttctcaaaagaagccatgaactccacagatttgtacccactactatgccacctcctcaatatcaccgccatgccacacaatggatcattctggaatgtccaggatctgctcaattcagcaatgccaagggtggtcccttatacacagagtactatactcctccctggtagtgttaaaccagcagaatatgaccaagaggggtcatacccttatttcataggggtctctcttggcagcattatagtgattgtattttttgtaattttcattaagcatttaattcacagtcaaatacctgccttacaagatatgcatgctgaaatagctcaaccattattacaagcctaatgttactttgaagtggatttgcatattgaagtggagattccataattatgtcagtgtttaaaggtttcaaattctgggaaaccagttccaaacatttgcagaaaccattaagcagttacatatttaggtatacacacacacacacacatacatacacacacacggaccaaaatacttacacctgcaaaggaataaagatgtgagagtatgtctccattgttcactgtagcatagggatagataagatcctgctttatttggacttggcgcagataatgtatatatttagcaactttgcactatgtaaagtaccttatatattgcactttaaatttctctcctgatgggtactttaatttgaaatgcactttatggacagttatgtcttataacttgattgaaaatgacaactttttgcacccatgtcacagaatacttgttacgcattgttcaaactgaaggaaatttctaataatcccgaataatgaacgtagaaatctatctccataaattgagagaagaagaaggtgataagtgttgaaaattaaatgtgataacctttgaaccttgaattttggagatgtattcccaacagcagaatgcaactgtgggcatttcttgtcttatttctttccagagaacgtggttttcatttatttttccctcaaaagagagtcaaatactgacagattcgttctaaatatattgtttctgtcataaaattattgtgatttcctgatgagtcatattactgtgattttcataataatgaagacaccatgaatatactttttttctatatagttcagcaatggcctgaatagaagcaaccaggcaccatctcagcaatgttttctcttgtttgtaattatttgctcctttgaaaattaaatcactattaattacattaaaaatcaaattggataaaacaatgttttctttctggtagcgcataataacagagcacaagcatcttttagatttgagcatttgaagattcaaagttgcgaaagagcacaaaccatattaggtaaaatattggccactcgatccttgaaaagaactgtgtggagcctggaaaaaaaaattaggaccacatgtgagatgtttacaagacacccagaacagtggtaaagtgtgcatactagaaaaagcagcaaaataactctttgtggtaacaggtatcaaaacacgggagccgagatgatatagctctgtttcaagaaatatgtgaatacccacctaccaggtgctcagtggaatcaaagatgaatccaagttctcaaatagacttctacttccaaggtatgtactacggccgccaccgcggtgga

SEQ ID NO: 24720 - DNA, 555 bp, Homo sapiens; identical to SEQ ID NO: 23733
  misc_feature 1, 2, 3, 554, 555: n = A,T,C or G

SEQ ID NO: 24721 - DNA, 3129 bp, Homo sapiens
ccacgcgtccggccgagggaagcggcccgcggcggagggaggggaggccgagtcctggaagcggagctccgcgctgggactggttccttcgcagccattttctgtccaaccaaacagccgattggagacgggagccaaccagggctgcattggaggttgaaatcacaaagattagacacctttttagataggtgttcttcagcaccactgacaacacggttctgacagtatttcatgacaatggatggtgacagttctacaacagatgcttctcaactaggaatctctgcagactatattggaggaagtcattatgttatacagcctcatgatgatactgaggacagcatgaatgatcatgaagacacaaatggttcaaaagaaagtttcagagaacaagatatatatcttccaatagcaaacgtggctaggataatgaaaaatgccatacctcaaacgggaaagattgcaaaagatgccaaagaatgtgttcaagaatgtgtaagtgagttcatcagttttataacatctgaagcaagtgaaaggtgccatcaagagaaacggaaaacaatcaatggagaagatattctctttggtatgtctactttaggctttgacagttatgtggaactctgaaattataccttcagaaattcagagaggtatgaaaggagaaaagggaattggtggagcagtcacagtacagatggactaagtgaagagcttacagaggaggcattactaacagttacaggttggttataacacagaggtcacacaaatgttgtttcacaactctatcacggattctggtgtcagaattcagttcatgtctgagaagggattgggggtgcaaaggaggcgttgattgggacagacttcaaggaagggaaagtttggtaaaacggaggccgagggaaaagggtgggaatcgagttcacaatggtggaaatttgcaaagtaattctgacttgagaatctttttcatgaatgattttaaagaaaaatttggattttaaaggtattaaaatatttttgttttgtacgagagtttgttgctctgtatgactcctgtatgcattgtatattgcaatttattactgtcagagatttgtagacagtttcttattttcatattgaatcatgttacttttgtaattcaagtaagcggctgggttaattcatgatgtttgcccttttaataaaatataagggtagagttcattttgaatgcaagttgcctttattataaatttgagtttgtcttggttataccttgcatgataacctagctagatttctagcatttgctgtatttattaaaattattatttttttggtaaaacattaatagtttaagcagcatcatttttttaaaaaatgtaattgaataagtgtgaatgcagaagcaaatattgtctgccctgttaaacttggtgcccattaacagtgtttacactgttcatcgtgcctgttaatgtagttttagttactggagcttttttaagactagatttggttttgagttacatttttaagaatgtgggaatatatttaagtttaatgtagtcctagtgctcttgaaatggtgcccctttcatttggtacatgattttttttcaaatcatatcttcaagtactatagtattctcttacagaagaggagttttatagtctgatggtaaatgtcttcattttacctttttaattgaaatgtcaagtttcctgttacactatggaaaccaagaaacatcagacatcattgcgtgtacagaccttttgcatgggtgagtggatgaaatggagaacagagtgagtgctgtgaacggtgtgaaatagaagccaacttctagtatgctgtcttcatctctgcaataaactaaacgtaaataatgtaactttgtataatttagtagtatgtacttggattgtttctttttgaaaagtgaggatttgtattttctcatctattctttttggtgttaattaacttgagggatttcttttttaagtttttaatatcaaaaattgctattgtatagtttgcctaaaaggaagttggagtgaatatcatctttgaaggacactcaaatttataaggtagaagcaatttcccagatataggctgaacagaaacatttactttgccagaaggagcctttaggagtatatgtgggctaatcagaggttaataatgtcctcatctcctactctccatttaaaaaacaaacttcattgtagtaaattcaaataggaaaaaatgggggagtagttaagcaaaatcaacagtcatcctactatgttgaaagaaccaatgttaatattttgataaatatcatttgtccttttactttgctaaatatgtatatttttataaaaatgggctcatattgtgcataccattttgtaacctgcttttttcacttaacaatatattgggaacatcttttccaggtcatgcatagtcttctgcatcatttttattggtttattattctgctgtatgactcaatcataattcatttaatcttctattggatattttgactatttacatcttttcacagttataaacagcacttcactgaatcccatgtacatccatgactgttttcttaaattctttgaattgctgggttaccaaatatgcaaaattttaaggcttttgatacttcgttatgagtgtatttttgagatattttccacttgatccaagcagtgtgtcactatataactgataaaagcacttggtctttgattatcagaaaaaaaatctaaaattattttaaagattaatatttgtctcaagtagagaatgaagataaaaaaggaatttgaggccaggtatggggtgtctcatgcctataattccagcacttgggaggccaaggcaggcagatcactttgaggtcaggagtttgagaccagcctggccaacatggagaaccccccgtctctacaaaaaatacaaaattagcagggtgtggtggtgcacacctgtagtcccttactccctggtggctgaggcattatcccttgaacctgggaggcagagcctaaagtgagccgagctcgcgcactgactccagcctggtgacacagcaagactcttgtctcaaacaaacagga

SEQ ID NO: 24722 - DNA, 3459 bp, Homo sapiens
  misc_feature 1, 2, 3455, 3456, 3457, 3458, 3459: n = A,T,C or G
nnctcctcccttttttttatgtcgccttttctcccttggtcgtcttccttgtccgttctctcagagaatcatgtcctgttttcctttctcctcccttactccattgttttgctccttcaggacatttattcagttactgtatactgaagccacagagaatctcaaatttgacctcgctttctcctttgatccaccaacacagattctaagtccaatcaagagctgcttttgataggaaaaagagttaatggagtgctatttctgccttttataaatcctccataggggttcaggtaacacagttccagactttgggtgtgctctaactttaaggtacaaagtctggaatggaatgggtctggaacagtggcactttgaaaagcagtccacttttaaagtccttatttctaaactatgaaaaaacaaacaccttccagagaagaaagatgttacttgcattcttgtttctctcttgctaaaaaggcccatcagatcgggctgagtagaccgaaggccacttgtgcaaagacaacacagagactgcttcttagtgaagattgcattttaatgctctgacaactcccatttcttcattgtcagaataacctggatagaggccaaagcttaaaacaatttgtacatatgtaaaaagaaaagaaaaatgagaaacctaaattgccgtaagagttcagggcagcagagcagatctttctggatttggcaccagagtccctgagcctggggatgggcccgggggtcaggtccttgtttgcagagggagtctgagggccagctccgtcagatgagtcatgtctggttgtttgctttgcttcttgatgtattctagcgttttcaccatggtcctggtgtctgcacagccgtgcctctgtgccaggtgccacaggttgacggagagctggttgagcttgttgttgcgtaggtccccatgggccaagatgctgttaaagaaggaaaggcccaacgagctctggcgcttcagggcctcgtccttggccagggttttcagatgctctaggatctgagccatcaccgtctcacacagcttgttgttttctgccaggaacttggagtctcccccgtagaggctgtcgttggagtccactttgtctatgtggtaaaggtacgtctcctggctcatggcggagaggagatgcaggacgcaggtgtagatgcggattttctcatcgctgttgtcctcccaggtgtagtcctggatcacgttgagaagctctcgaacaagaaacaggaccccatgttcaggatgatccggaactattaataaagtagaaaagaaattgcagaggaattccagaaggaacgattccgatggccgcatcttcccatcaatattaatcatctttggaacttccggaacaaggcttatagcggctttgaaaaaagcatcagcttgggagaggcactggttggccaaggccacctgaccagaatgcaggtagagattgagacgtgtgaagatgcccgccagggaggggatggtgatgaagcagtaggcaacacaggcccggacaaatgcagctgtctttctggaatgatttcctttcattacttttcttgtctccattgccaaccggttcacactatgaatcaactgcacaagaacaggctccagattgcaaaacatcgacctggactcaacataaaaactcagctgttgttcaaaatcacggccaaaggaaaccatttttataaatccattaatcaaatatgacagcattcttttctcatcctcaagagtgagtgcattcacagagtcatgcatggtcttgcaaacatgcaaaagggcattcaagatgaccgggtccttggtgggctcttgttgatgcttgataaaggcgtccatgatgcatttgcaaacctccacccgcacactctctttttggaacatgtccagaaacggcagaaatttttccactgagaaaagaactgagaagtcatggaagtgggcaataactttcttaattattaactgaagctgggggtaggaatcttcaaatgcacgatctggagtcatgtgcttgatgacatctgccaaaacggtattcacctctcgtttcgtgaaatgcttgcaggtgtattccacccacacttcggcacaattaatgtagtcctgtgggttcttcagcttagtgatgactttccaagcttcgttgagaatctgaagtcggtcactctcaggaggatcagccaaggccaagtttaatcccagtgatcgaaaaagaagatgcttggggaaaccagattcatcacactctttaatcatgccaatgaaatccatagaccttgtggcgatgaactcagcccggaaggcagacatcacagaattcaacagcaaggcattgtttcctagtttcttacacctttccatcatctcggtcagcagagcccggcacaggtaggcacgggcatacaccgacactagtgggtctccgatccctctgatcatgcatgtcaaccggggcaggcactctgaaattcccgttttggagaggaatttgttacatttcaggatggatgcctccacgtaaaatcttggaatgagttccctgatggaggcaatcttgaaaaaccaatttaggcatgtttccttggccgtgtcatttgcattctctggagaaaagtgatctggtaagacgctgcggctatccacacacatggaaaagatgcgctcgtacacgagctttccaaatgtatcaagtatgtcggtgataaggacaaatttgcttgggtagaactgaataacactggtgtctgaaagaagctttgaacactggatgactatttttagagccttcactttctggtctgaggcccaggcatccttcagcgattggttgagctcctctatgcggttcacgtaatcctgctgagtcaagttcaacagctccttttgggaaccctcctcaaagtcatccagctcctccagccgggtccgcaccttctctgacattgccaatgtggcagtcccagctttgcctttttcagatcccataaacagattaatagacagcttttcggtagtggtgtaccgggcaaggatttctccccgtttgttggtccaaggctcaaaatccgatcctacaacggagttatcatctctatcacgtttccttctggagctgtccatggcagctgccaaggctgcggggtcagcagtggctgcaaacatggagagggggtcagtcccatcgaggacgctgctcagcgggtccaccacggagctggaggaggaggaggacgtggaagaagtgcttcctttccggttcactttctttgtctttgactctgtgacagtttcatggagtcttccagagggctgatcagtcaccacagaactccaaatggtacagccttcagtcggcatgatgcaaattcagctttgtagttcctattctctggagtgccaaggaaagacnnnnn

SEQ ID NO: 24723 - DNA, 689 bp, Homo sapiens
acatttaattctgtgcatgtaaactcactgatttttctgtttttctgtggctaagcaaagaaaataaggaaagtcagagaaatctgctgacctatggactgcaaattcaaattctgccaatttcagaacacaaatatggagttttgataattactctgtaactttagtttataagtaaaatataaagagaacgggactacagtaaagtatagcacgtgattcaatctctctgaatcccttagcactttgctaatttgctagttaaaagttgacttaaaagtgacaagaaattaaattagggatctacagaagagacacatcaattatagcaacaggggtgaggggataaattctacttgacatgaacgtgacaggcatttctctatcctcaatcatctaatgagagttgagattgtttctctattttaaacttagttattgttgtaaagaacactacgagcacaattggattaatcatactatcgattcatgaagcactacaagcataaagcactataatcatttatctaaatgtgtatcacttttatgtttcttatttgagtctactacatgttggtgatttatttaatgagtcaacaaatacctaagactccttcacttaactcaagaacaaaagcattattaataatctacatgctcctccatattaagaaatcaactaaagaagt

SEQ ID NO: 24724 - DNA, 1180 bp, Homo sapiens; identical to SEQ ID NO: 22963
  misc_feature 1, 2, 3, 4, 5, 6, 7, 8, 1179, 1180: n = A,T,C or G

SEQ ID NO: 24725 - DNA, 2049 bp, Homo sapiens
  misc_feature 1, 2, 1875, 1876, 1877, 1878, 1879, 1880, 1881, 1882, 1883,1884, 1885, 1886, 1887, 1888, 1889, 1890, 1891, 1892, 1893,1894, 1895, 1896, 1897, 1898, 1899, 1900, 1901, 1902, 1903,1904, 1905, 1906, 1907, 1908, 1909, 1910, 1911, 1912: n = A,T,C or G
  misc_feature 1913, 1914, 1915, 1916, 1917, 1918, 1919, 1920, 1921, 1922,1923, 1924, 1925, 1926, 1927, 1928, 1929, 1930, 1931, 1932,1933, 1934, 1935, 1936, 1937, 1938, 1939, 1940, 1941, 1942,1943, 1944, 1945, 1946, 1951, 1952, 1953, 1954, 1955: n = A,T,C or G
  misc_feature 1956, 1957, 1958, 1959, 1960, 1961, 1962, 1963, 1964, 1965,1966, 1967, 1968, 1969, 1970, 1971, 1972, 1973, 1974, 1975,1976, 1977, 1978, 1979, 1980, 1981, 1982, 1983, 1984, 1985,1986, 2041, 2042, 2043, 2044, 2045, 2046, 2047, 2048: n = A,T,C or G
  misc_feature 2049: n = A,T,C or G
nnctggctgtccgttgggctagagcttaaaagcccaacacgggcgaaaaagacgcggtctcagttaacggggacgctttagagaaacgcactcgcctctcctgttccggttgggtcggcgcgggcttctcaggcgccacgtgggattcggcccgggtgctcttgtgagctgctgctcctgcggttggtgagattacctgggtctagagtgcggagctgctccgtggccacgaggacgtcaccatgcccaaagcaccaaagggaaaaagtgcaggacgggaaaaaaaagtcatccatccatatagtagaaaagcagctcaaattacgagagaggcccacaaacaagaaaaaaaggaaaaattgaagaatgaaaaggccttgcgtctcaaccttgttggtgaaaaactgcaatggtttcaaaatcatcttgatcccccaaaaaagagatattcaaagaaagatgcttgtgaactaattgaaaggtacttaaatcgattcagcagtgagctggagcagattgagttacataacagtatcagggacaggcaggggaggcggcactgttcccgggagaccgtcatcaagcagacgatggagcgggagcgacagcagtttgagggatatggccttgagattccagacattctaaatgcaagtaatctgaaaacatttagggaatgggactttgatctgaagaaattaccaaacattaaaatgagaaaaatttgcgctaatgatgcaattcccaagacgtgcaagaggaaaactactataactgtagaccaagatttgggggaattggaactaaacgatgaatcaagtgattcagatgaggaaatgactgcagtggcctaattgtcttcacttgaattgaaaataaataatttgagagcttcaaattatattcattgattatggtacctaattgtcatgatacaaaaatttgatactgacattctcttatatgatgagagtttcatttgcgtttcaaaaatggtgttatgatacttattttaaaatgaagattgcttttcatttccattaagttgctaaaatagatagatgtgatctgcagaagttgtttagtcttcatctgaatttcaggctgggagggagcaatataactaaggacaaaaaatgttttgtttttcttgtgtatttatgatcacctaatttcacgttttgtgaaatggacagtaacctgtttcctgaaagattcctgtgggtactttttgagctgtgataatagcaaaattgtttttcggtaataatatcacactaatgcttcttttaaacattaaacctattttccttttttacagaataagggaaaatgtgataagaagtttgtatacatttctggattatagattattatttatcttttgaaccagagctaaatggtaaaagaaaaaaaatcagtgatgattgttatgttgatctcccacaattaatttatcttttgacaaaggggataaagagtttcagtttagctccttttgattgtatattattttttgcttttttattgtgaaaagaggtaggttttatttgtggagagagagttgaagattagggaaccagtgattttaattatgctactttttcttctaagagataaattgatatatcattcagtgtcatgaaaaacatgaatgttgtacaattttcttcctcaaaaaactttttaaatgtaagtatccttattttttttttaaaagagcacaatgtaggtgtatttgagtattttcaagaaaagaataaaaacattaatgcagtattaggttaactggatatcaactaagccttgttaacagttaaagtattataactttttttacttctgaaaattaaaaataaaatttatttctgcaannnnnnnnnnnnnnnnnnnnnnnnnnnnnnnnnnnnnnnnnnnnnnnnnnnnnnnnnnnnnnnnnnnnnnnncaccnnnnnnnnnnnnnnnnnnnnnnnnnnnnnnnnnnnnggggggggggggccctttttttttttaaaaaaaaaaaacctccccccttttccgnnnnnnnnn

SEQ ID NO: 24726 - DNA, 1218 bp, Homo sapiens
actgccacactcaaccctcttcctttgtttttattctcattattcaatcactttcagttctctggcctgttattctacggctattataattaccttaataaatacctttgtattctgctcctctcaatcctcttctcaatgttaacagcgttaggtgtttttgaagcatgggagacccaagtgaataacatgtacgcgggggcatctgcctggggccagtgaggagaatgcatctagacagagcttttcgtgctgctgagatctgttacctaaagcaataaaaaatgaccagaggatcagtgtccgatgaggaaatgatggagctcagagaagcttttgccaaagttgatactgatggcaatggatacatcagcttcaatgagttgaatgacttgttcaaggctgcttgcttgcctttgcctgggtatagagtacgagaaattacagaaaacctgatggctacaggtgatctggaccaagatggaaggatcagctttgatgagtttatcaagattttccatggcctaaaaagcacagatgttgccaagacctttagaaaagcaatcaataagaaggaagggatttgtgcaatcggtggtacttcagagcagtctagcgttggcacccaacactcctattcagaggaagaaaagtatgcctttgtcaactggataaacaaagccctggaaaatgatcctgattgtcggcatgtcatcccaatgaacccaagcacgaatgatctctttaatgctgttggagatggcattgtcctttgtaaaatgatcaacctgtcagtgccagacacaattgatgaaagaacaatcaacaaaaagaagctaacccctttcaccattcaggaaaatctgaacttggctctgaactctgcctcagccatcgggtgccatgtggtcaacataggggctgaggacctgaaggaggggaagccttatctggtcctgggacttctgtggcaagtcatcaagattgggttgtttgctgacattgaactcagcagaaatgaagctctgattgctcttttgagagaaggtgagagcctggaggatttgatgaaactctcccctgaagagctcttgctgaggtgggctaattaccacctggaaaatgcaggctgcaacaaaattggcaacttcagtactgacatcaaggactcaaagcttattaccacctgcttgagcaagtggctccaaaaggagatga

SEQ ID NO: 24727 - DNA, 727 bp, Homo sapiens; identical to SEQ ID NO: 21436
  misc_feature 1, 2, 3, 4, 5, 722, 723, 724, 725, 726, 727: n = A,T,C or G

SEQ ID NO: 24728 - DNA, 930 bp, Homo sapiens; identical to SEQ ID NO: 23765
  misc_feature 1, 2, 3: n = A,T,C or G

SEQ ID NO: 24729 - DNA, 3652 bp, Homo sapiens
  misc_feature 3642, 3643, 3644, 3645, 3646, 3647, 3648, 3649, 3650, 3651,3652: n = A,T,C or G
gatcgaccacgcgtccgggactctggagccgccgccgccgctgctgcggttcatatccggagtagacggagccgcagtagacggatccgcggctgcaccaaaccactgcccctcggagcctggtagtgggccacaagcccccagtcccagaggcgtgattttctggcatccttaaatcttgtgtcaaggattggttataatataaccagaaaccatgacggcggctgagaacgtatgctacacgttaattaacgtgccaatggattcagaaccaccatctgaaattagcttaaaaaatgatctagaaaaaggagatgtaaagtcaaagactgaagctttgaagaaagtaatcattatgattctgaatggtgaaaaacttcctggacttctgatgaccatcattcgttttgtgctacctcttcaggatcacactatcaagaaattacttctggtattttgggaaattgttcctaaaacaactccagatgggagacttttacatgagatgatccttgtatgtgatgcatacagaaaggatcttcaacatcctaatgaatttattcgaggatctactcttcgttttctttgcaaattgaaagaagcagaattgctagaacctttaatgccagctattcgtgcatgtttggagcatcgacacagctatgttagaagaaatgctgttttggccatctataccatctatagaaattttgaacatcttatacctgatgctcctgaactgatacatgattttctggtgaatgagaaggatgcaagttgcaaaaggaatgcatttatgatgctaattcatgcagatcaggatcgagctttggattacttaagtacttgcattgatcaagttcaaacatttggagacattctgcagctggttattgttgaactgatttataaggtctgtcatgctaatccatcagaaagagctcgttttattcgctgcatctataacttattacagtcatccagccctgctgtaaaatatgaagctgctgggacattagtgacactctctagtgcaccaactgcaatcaaggctgctgctcagtgttacattgatttaattattaaggagagcgacaacaatgtaaaactcatagttttggatcgcttgatagaattaaaagagcatcctgctcatgaacgagtactacaggatctggttatggatatcctaagagtattgagcacaccagacttagaagtacgaaagaaaactctgcagttagcactggatcttgtctcttctagaaatgttgaagagctggttattgtcctgaagaaggaagtgataaaaacaaataatgtgtctgagcatgaagatactgacaaatacagacaactcctagtgcgaacattgcattcctgttctgtccgatttccagatatggctgcaaatgttattcctgtgttaatggaatttctcagtgacaacaacgaagcagcagctgctgatgtcttggagtttgttcgtgaagccattcagcgctttgataacctgagaatgcttattgttgagaagatgcttgaagtctttcatgctattaaatctgtcaagatttaccgaggagcattatggatcctgggagaatactgtagtaccaaggaagacattcagagtgtgatgactgagatccgcaggtcccttggagagatcccaattgtagagtcagaaataaagaaagaagctggtgaattaaaacctgaagaagaaataactgtagggccagttcagaaattggttactgaaatgggtacctatgcaactcagagtgcccttagcagttctagacccaccaagaaagaggaagacagacctcccttgagaggattccttctggatggagatttctttgttgctgcctcccttgccacaactctgaccaagattgcattgcgctatgtagctttggttcaggagaagaaaaagcaaaattcttttgttgctgaggctatgttgctcatggctactatcctgcatttgggaaaatcctctcttcctaagaagccaattactgatgatgatgtggatcgaatttccctgtgcctcaaggtcttgtctgaatgttcacctttaatgaatgacattttcaataaggaatgcagacagtccctttctcacatgttatctgctaaactagaagaagagaaattatcccaaaagaaagaatctgaaaagaggaatgtgacagtacagcctgatgaccccatttccttcatgcaactaactgctaagaatgaaatgaactgcaaggaagatcagtttcagctgagtttactggcagcaatgggtaacacacagaggaaagaggcagcagatcccctagcatctaaacttaacaaggtcacccaattgacaggtttctcagatcctgtatatgcagaagcttacgttcatgtcaaccaatatgatattgtcctggatgtacttgttgtgaaccaaaccagtgatactttgcagaattgcacattagaactagctacactaggggatctgaaacttgtggaaaagccgtctcctttgactcttgctcctcatgacttcgcaaatattaaagctaacgtcaaagtagcatcaacagaaaatggaataatttttggtaatatagtttatgatgtctctggagcagcaagtgacagaaattgtgtggttctcagtgatattcacatcgacatcatggactatatccagcctgcaacttgcactgatgcagaattccgtcagatgtgggccgaatttgaatgggaaaacaaagtgacagttaacaccaacatggttgatttaaatgactacttacagcacatattaaagtcaaccaatatgaaatgcctgactccagaaaaggccctttctggttactgtggctttatggcagccaacctttatgctcgttccatatttggtgaagatgcacttgcaaatgtcagcattgagaagccaattcaccagggaccagatgctgctgttaccggccatataagaattcgtgcaaagagccagggaatggccttaagtcttggagataaaatcaacttgtcacagaagaaaactagtatataaaaataaacaaaaagtccttgaagctttacagttaatttaggtatgggcttactggactccaacatcttttgtactctttcatgcttatatagaatctgagttcatgctgaatacttttcagccaataatttatagcctttcccttaaatcaagattgagtttaaaattatagtttgtcttttgtcttaacagttctgaatgctgtcctcaaagtatataatgtttcatgtaccaagacccttttcacagtacaataaacagatctattcataaatttttgttattttataaataaatgattacataattttaaaaaaaaaaaaagaaagaaaagaggacaaaaaaaagtgttcgaggaccggagccatcgaagagagttttatgaaacacaagcacagtatggggcacggaccaatgagaataagaaccactggcaacaacgggtaaaaagaaaaccggggaaaagagaggtgtgggttgctcacacatggaaaagcggagagaacgagagtctgaacaaaccaaacggagacggagcaaaagagatctaaacagagaaaagagannnnnnnnnnn

SEQ ID NO: 24730 - DNA, 2315 bp, Homo sapiens; identical to SEQ ID NO: 20885
  misc_feature 1, 2, 2313, 2314, 2315: n = A,T,C or G

SEQ ID NO: 24731 - DNA, 1081 bp, Homo sapiens
agatgatggatgccaatattaaatctgctggagtttcatgtacctcggccgcccgggcaggtactaccttaatgataaggactccttaaagttccatttgctaatgattaatacactgtttgggctggccagtttttcatgcatgcagcttgacgattgagcacagtcaggcctttgtattaaaaatgaaaaatgaaaaaacaaattcaaaacctattcaaatgggttctagttcaatttgtttagtataaattgtcatagctggtttactgaaaacaaacacatttaaaattggtttacctcaggatgacgtgcagaaaaatgggtgaaggataaaccgttgagacgtggccccactggtaggatggtcctcttgtacttcgtgtgctccgacccatggtgacgatgacacaccctggtggcatgcccgtgtatgttggtttagcgttgtctgcattgttctagagtgaaacaggtgtcaggctgtcactgttcacacaaatttttaataagaaacatttaccaagggagcatctttggacgtaaactgtaatttctttgaacagcaatgttgatggttgtgctgaagtccacagccacagcatactctgccggctccaagtcatggttcagaaggttttaaaaacagagagtccaaagatgctcccttggtaaatgtttcttattaaaaatttgtgtgaacagtgacagcctgacacctgtttcactctagaacaatgcagacaacgctaaaccaacatacacgggcatgccaccagggtgtgtcatcgtcaccatgggtcggagcacacgaagtacaagaggaccatcctaccagtggggccacgtctcaacggtttatccttcactcatttttctgcacgtcatcctgaggtaaaccaattttaaatgtgtttgttttcagtaaaccagctatgacaatttatactaaacaaattgaactagaacccatttgaataggttttgaatttgttttttcatttttcatttttaatacaaaggcctgactgtgctcaatcgtcaagctgcatgcatgaaaaactggccagcccacccgcgt

SEQ ID NO: 24732 - DNA, 2158 bp, Homo sapiens
  misc_feature 1, 203, 209, 228, 236, 260, 262, 2158: n = A,T,C or G
nacttaataactaattttgatgttcatgattagcctctggcaaacgtttgaggaaatgaatctatagagaatggacgggctttaggacttctacaagaccttcgatctttagaaagggatgaaggatgcaaccatctacaaaaagttctatttgtattattcagcaatatgtaaagagctggaatttggcatcgccctcttanctgatngccgagctgctgaaagctncacaggantcatatccccagaaccaaccaatncnatcacctgatcctggctcagaagccccaggtcccttccatccccaatccttttgcgtggcccatgttttaaaaacctgcggagagaaggacggggtgccaggaagcctgttgattcaacgtgccacccgattcacgggttccgggtgtcactgggctgggaaaagctttcggactctgagcaactacagcgctttcctcccccttccccccatagagcagggaaggccaggctcccccttcttcccgcatacggctccccactgcctcttcccttacgtgaccaggccctaggagcccggatccccacctgactcctgcgagaaacacgctctccagtcggaactttacctgtctgaagcccgccgctcctccagtgcgctaagcccccaccgaggaaaatggagtcgtcgaaccgagactgggaaaagatagtacggacccaccgcacggcccctccgccgccaccgccgccgctgctgcgtcaacgtgctacgtcatttccggctccccgacaccgggagtgggcgggccatttcttgttctctctcccgctctcggaagctttcgtctcgtgggtgcgaaaggtaaccgaagcggctcaggaaggcagctgtcactgagcccctggaacagagcgagagtatcgtaagtaaccaggctcagccggtttctcaggccgctctagtcaaataaaccataaagatcagactcgggcttcttcacttccttctctccgtggtttcgccattagcttccggttccggggaggggccgagttttcttcgaagatttggggctccgcgatacagttaggatggctgtagtacctctgctgttgttggggggtttgtggagcgctgtgggagcgtccagcctgggtgtcgttacttgcggctccgtggtgaagctactcaatacgcgccacaacgtccgactgcactcacacgacgtgcgctatgggtcaggtagtgggcagcagtcagtgacaggtgtaacctctgtggatgacagcaacagttactggaggatacgggggaagagtgccacagtgtgtgagaggggaacccccatcaagtgtggccagcccatccggctgacacatgtcaacactggccgaaacctccatagtcaccacttcacttcacctctttctggaaaccaggaagtgagtgcttttggtgaggaaggtgaaggtgattatctggatgactggacagtgctctgtaatggaccctactgggtgagagatggtgaggtgcggttcaaacactcttccactgaggtactgctgtctgtcacaggagaacaatatggtcgacctatcagtgggcaaaaagaggtgcatggcatggcccagccaagtcagaacaactactggaaagccatggaaggcatcttcatgaagcccagtgagttgttgaaggcagaagcccaccatgcagagctgtgaatctagaggctctgagccactgttaacgcacaatgttcacagacatctgttgctgcctcaccttgggatccctgccacaagttccttgggcagtggccatgtcaccattgagatgaagatatacaacagaaaatagtggctgtgtttggaagcttcagccctgcacatttgaactagtcactctcccagacttgcgtgggtcagttctttctgagtagaggacttgctggtaaaggggcagatgctttttattagtactgataaaacaaactgagggaaacatccctcttagctgggaaacttttactcttcaggagcttggcatcatggactgttaatgtatgtgattttccccctattttctctctccaaaatgataaaaacaataattacacataaattcttaacaaagaaagaaaaaagaaaagtgtcggcgcgggccgcn

SEQ ID NO: 24733 - DNA, 469 bp, Homo sapiens; identical to SEQ ID NO: 24267
  misc_feature 1, 316, 317, 318, 319, 320, 321, 322, 323, 324, 325, 326,327, 328, 329, 330, 331, 332, 333, 334, 335, 336, 337, 338,339, 340, 341, 342, 343, 344, 345, 346: n = A,T,C or G

SEQ ID NO: 24734 - DNA, 2037 bp, Homo sapiens
  misc_feature 1, 2, 3, 887, 888, 950, 2036, 2037: n = A,T,C or G
nnncccgggggtgccccaccaaggtcccccggggaggtcaaggcccaatgcctgcctttgcggccccccgtgccctccaccacccagcggccctttggccccaggagctctgtctggccccgaccaggcgagtccactcaggccagctgcctgcccggagtcctgtctctgctctctttctggctgtgccttgctgcctggagccccaaccaaggcagggactgctgtcctccacgtctgtcctcaccgacataatggctggctgggcacacaggcagtgcccaagagtttctaatgagcatatgattacctgagtcctgggcagaccttcttagggaacagcctgggacagagaaccacagacactctgaggagccacctgaggcctcttttgccagaggaccctacagcctcctggcagcagttccgccagcatttctgtaaatgccctcatgccagggtgcggcccggctgtcagcacgagagggacgttggtctgtccctggcaccgagtcagtcagaagggtgccagggcccccttgggcccctccagagacaatccactgtggtcacacggctcggtggcaggaagtgctgttcctgcagctgtggggacagggagtgtggatgaagccaggctgggtttgtctgaagacggaggccccgaaaggtggcagcctggcctatagcagcagcaactcttggatttattggaaagattttcttcacggttctgagtcttgggggtgttagaggctcagaaccagtccagccagagctctgtcatgggcacgtagacccggtcccagggcctttgctctttgctgtcctcagaggcctcagatggatacgcagcaacttccttttgaacctttttattttcctgnnctccctcctgggataagacggcagcctcctccttgggggcagcagcattcagtcctccaggnctcctgggggtcgtgacctgacctatgagagcggagaacactgagatatcttgcccatggcctgccctgtggttagctgtcgttttttccttgacacttgtaggctcctcttcatgtttacataacctcagtggggaaaacgccagcgaagagagacactcagaatggacgatctaaagttccttccagcttcaaattctgggctggttttcagagatccagggctcgggatgcgaatgtccctgtctacgatggggctgccgttacagccttcctcccggggctctggagacgcgccagctctttgacacctctcctgcgctaaggaagagttggtttacagaaaatgcgccaattccagctggacatcactgtgaaaatgggacgggataaagtccgagaaatgtttatgaagaatgcccatgtcacagaccccagggtggttgatcttctggtcattaagggaaagatcgaactggaagaaacaattaaagtatggaagcagcggacacatgttatgcggttcttccatgaaacagaagcgccaaggccaaaggatttcctatccaggttctatgttggccacgatccatgaagtcattcagtggaaagatgcacgttgatactattttagagcacaaataaactcactatacaataaaaaaaaaaaaaaaaaaaaaaaaaaaaaacaatggtcgccgcttcgcccagtcgactctagactcgagcaagcttatgcatgcggccgcaattcgagctcacttggccaattcgccctatagtgagtcgtattacaattcactggccgtcgttttacaacgtcgtgactgggaaaaccctggcgttacccaacttaatcgccttgcagcacatccccctttcgccagctggcgtaatagcgaagaggccccgaccgattcgcctttccaacagttgcgcagcctgaatggcgaatggaaatttgtaagcgtaatattttgtaaaattccgcgttaatttttggtaaatcagcttcatttttaaccaataggcccgaatcggcaaaatcccttataaatcctttttaaagacgggggcctccaccgnn

SEQ ID NO: 24735 - DNA, 1677 bp, Homo sapiens; identical to SEQ ID NO: 23620

SEQ ID NO: 24736 - DNA, 353 bp, Homo sapiens
  misc_feature 353: n = A,T,C or G
actggcgtgtatccattggttgcaaatatgctcttgacccaaacgtagacacacattctccagcttggctgactgaatttaattctgttacattgtgctttattttatcaaaaatgtgcatattaatagattgtagtttagcctttgtcaaaagacatgcaagtatttagtatttacattaaaaggattgcctcagaagaaacattgaattcataagccctcttaaaaagtcaaaaatatgcataaagaagactagtattgatattttctgatattttagatatgattaatattttggacctccattggtttccacactatcatgcaaatttccaacttgcttcaacacaacn

SEQ ID NO: 24737 - DNA, 4444 bp, Homo sapiens; identical to SEQ ID NO: 22727

SEQ ID NO: 24738 - DNA, 2170 bp, Homo sapiens; identical to SEQ ID NO: 22582
  misc_feature 1, 2, 2090, 2166, 2167, 2168, 2169, 2170: n = A,T,C or G

SEQ ID NO: 24739 - DNA, 245 bp, Homo sapiens
  misc_feature 1, 2, 3: n = A,T,C or G
nnncaatctttccaaagtaaattcagggccccattgctacttatgccatatttggacatactttttttttcttcaattttgtaaacttcctggaaagccgtcttcactaagtatcccctagtctctatatatgtggttagtagtcatggaaatgacacataaagtacgttcttctattgtgccttctatctaatttttattaatttgtaagagtaagcacctttagaatattaaaaattaattct

SEQ ID NO: 24740 - DNA, 4108 bp, Homo sapiens
  misc_feature 1, 4107, 4108: n = A,T,C or G
naacgcaaccccccctcgggagaacgggggcaaccaaccccccccgtccacgagttaaaaaggcccgcaggcaggcttttatgacctatgaaccatgggcagcaagaggactggtgaccgggggacatggtgaggtccagtgtgccaggaacatggtaagtgcccacattgcgggggagggaacaattcagagacaggctcagctggaggccgcacagaggagaaatgtcactctgtcccatcttccctgcattcagctgagctcagaccaagtgagcacctaagaatcatttacccccaaaggatgtttcaagtgagatgcaatgttctctaaccattattctctcagaaattaggggtggcggggcgggaatcaagcagatgtttgaattgcctttcattcctccatagttgtctaattgtctggctcttggtttttatatagcagaaataaaacaaaatggcaataaaccaacctacaacctgtgtacaagatacagcatacaaaactgtcccacggactgggatcaaaagacttctattcctagccctaaattagaggttctgttttggttagggaagtttgttgtaaacagcagctgagaagccatttatttgattttggcaatagagacagacagcaatgcacatacacttatttcattgaactgtaaacggataaggtcaggagaggaaaaaccctactgtttatgtaatagaaccctactaaatggttttggaagggactaaaagttaggtagcagcctactttcctactttccaaggctggaattatatatatattgagtaataaatcaaatattagtaatccatccacttgtttttcagagtccaacaatttgataccaccttcctccctatcccaccctagtcccgttagatttgactgcattaaagtagttgttcaaccaaaacactctgtactgtcgccttcctttagcatttatatgaaaagccaaaaccagagagaaagaatccttacacctcctctccactaaagtatcactgtagagaaaactaagctcagaatatactcaataacataccaaggaaaaaagtgagtgtgactgaggggacccccgtcaccaaccgcagtacgccctgctaaacggtagttatcttcttgtccttggtggcttgcttgatggcagcctgctcgcagatgatctctttgagcctctgcagcctcgtgttctgggtggtcagttcccccaccccagtttggctgcggtgcagcagggtcagagcgtggatgtactccagctccgtgtacttcacaccctggtccaccaccaggttcaggagctcgtcagctgtgttgtaaagcatctcgtagtactgccttgcaaagtccaggtctgcctcccgcgacatggtgatgttggtcaaattctgctgaagaacaaaaatgttcctacacattttcttgatgccagactcactgatgcgcctgaagtactgggcaccattaatgaggatgcaggagatcaggtggcccaggccttcgaagatatactggaacttgtgctgctgaaggctggcgctcatggcctcttcaatggcgctgatatctttgttgagcttgaccaccagggggtcataatccatactttccacattagccacaatggcatagttcccctcctttgcaagagggataagatagtggaaacagtgaaccctcacttccagatgtaagacaagcaagcagcggtcagccatatcctggaacgatttggcaagttcactgagagtctgcatgatctgctctgacactggggggagatccgtgttcgtgtggctgtcttgagcaggagaaagcatctgggatgtagaaagattggagaaagctgactttgttcgacttgccaaccattccaggctttcatgcatgttggccaaggctttgaggtcactgacgtcacgaaggatgtcttgtggagggattaatttatcacccaggttcccaataagaacttcagactccttgccaaaagctgcccttatgaaatcttcttcctcctctctttttggcctcagctgtttgggttgagccatattcatccagtttggtagagatttcaagagtctgctgatatcatcatcttttgcccaggatgcactgatgacaagtttttcttctgactggacaatacccctgtaagctgcagtgcaggtgtccttgtactcctggagcttcacgcacaccatgttgaggaattgatctgaatatgcactcaagtcatgcatcaggttcaggaggtcttgaactgtcttctccacaatgattgtgctctgtaggagaggccgctgcactcccagcaccttcatggtgtctgcgttggccagaatcttcaaagggtcagatgttttagtgactccttcaatctccttgttgatctcagccaagacttgattgagaaagatgtttttgatgtacacggtgagaaactctcgaagaggacactgtttggctgggccaagacccagagcatgctcaatctcctgaataaatcttagtaatgggtggaatatgacggtaatgtttctggctccaggtttgcagacaaattttgttcctccaccttcaattaagttgtcatcaggacccccttgcagttctccactccgactatagagctcccttctctgttctcgcagataggcgctcatactgatggcatgggaggacgattcgaacttgaaaagagaattttttggcctttgaggtttcttcttggcaaaaaaggctgcaaactctcgtccagtgctggcatagcttagttgagctgatggttcagaggccgtacgagtatttttcatatccaagtactcagttaatagcatctgtagaacatcttggatcttcacccatacatctgccatatcatacagtttgatatcttcctgctgagtcagtggagtcactacagtgtcctgcaggtatcccaggaccacagagtgtgcagcggctacagcattaaacttgtcaaacagtaactccagcagttctagaagcaaccttggttggttctccacagtaacgttctccccccgctgatagccactgtctgccacctgggttgtagacctcttcacaatttgcttcaactcctgctccaagcgctctatgattgccttaactgtttctgggatcttcttcagtttcgccaagcccttaatgaggatacccataaacagggtgctgttttcctctggatccaattctaaatcttccttgatgtcctgcagatttatctccctcacacttgagcttccagcagtagaatagtgagaggtatcaaggaattttcgaggagtagggaggtttgtaacatcaatcagaggaacagaagcatctttcacgagggagctgattttccctttttccttgttacgctgcacaactcggctagtcgatttgatgtacaggtgccggtgtagttcatctatgagaaccaagtgaaggttcatcttcttgctgtgaagctctagtcgaaggtcactcagtccttccacctggagcagggggccctccaaagactcaactgctgacaccaacatgtcagtggcactgagatagtgcttgctggccatgcactgttccagcttttgaggcacttgcttgatattctcaatttcatccaacaagttcaggacatgcttatgctcaattccttcaatccacagtttccgaagctcatcccgtttgcagtgcagcagcatcttgcatgaaagcaggttctcttttacctgctttattttatttcgggagttagtgatgcgctctgtgatgctctggtatgtgcgaatggctgtcgtcaattctgtgtagtgctgtacaatcaattcatccaggtcacggtcacatttctcgtaggcttcttcaaggcgacccttttcattttccctgtcttcgacatcgtcactagtagacagagtcctgatcacagagatgagcagccccgaggggtctttgcttttgctgactgtgcttctgtatttcccaccagctgcttctgccgccatcttggacgcggggagagccgctaggctccaaggaagccaagggtgcgtaaattctgnn

SEQ ID NO: 24741 - DNA, 2023 bp, Homo sapiens
  misc_feature 1, 2, 2017, 2018, 2019, 2020, 2021, 2022, 2023: n = A,T,C or G
nngaacacagcttggaaatctcttaaccatgggagttaagtctcaaaattctggtgatacaagtggttgaaacttaaaactgtatttaaaaaataggattcgtgaatttgagatagttcataagtctgcaaaaggctgtataaatacatattttacatttactattattaattttgtagtaaatttgagtacagcactctctttatctgtggaaacttcagactctcccctattactttaatttcagtgagacattattaaatataagtgggcttacacatttgttttgctttactgacaaataatacacaacttggaggcttttttttcctttctattcttcctctaaatgttcaacacttttctgattttgtgatttgaggttgtttaatagcttcctgaggctccattgagaccgtatatacgtgacacttaacagtctagccttcctcggtacatatagatatatgatggtggctttgcctgtagtaaattcatgccaaaacataggctttcagtgcctattacatatggctttcagctctctctactgagggatgtaggagtttatttctgaggtctgagcctcttttcctttacttcctttactctttcctaagccttctttataaaaactatgcatgttctattgttttcctttttgattccctttcttttattatccccagtaggagtgacttgtaattctcatatgttagaaaggcagatctcctggttgaagaaaagatccacccaagcaagtcagcatgtttaataatttttgagggggatctcaaatgtgggaaggattgttatataagacaaccaaatgatgacatgagacaataaatgctataggaattatggagttcttggttagggaagagatattattagttgtagaagtaattactaacttctacattttttattgtggaaatcaaaaatatatatatgaaaataaaatgttataattgacttcagtgtcccataaaccagcttcaacaattaccaaattgtgaccaatctttacacacatgcacaggtgtccctcagtatctgtggggcattggttctaggaccacttatggataccaacatctatggatgctcaagtccctgatataaaatggtggactatttgcatataacctgtgtacatcccgtattatttaaatcatccctagatcacttataatacgtaatacaatgtaaatgccatgtaaataactgttatactgtattaaggaataacaacaagaaaaatgtacatgttcagtacagacgcaattttttttgtgtgtggaatattttcattccaaggtcagttgaacccatggacataggaggctgactgcgtgtgtgtgtgtgtgtgtgtgtgtgtgtgtgtgtgtgtgtgcatacagacacacatatttctgaaatgtaaatattctctttttaaaaaaattattatcacagctaaacaaattaccagtaattcttttatcctcatatacccggtgttcagattttctagattggctcctaatttttttacagattatttgaatctgattcaattcatgtactgtaatgtttgataacttaagtaccctttataggttctcttttacctcttctttattaaattccttgtaatttgttgtactaaatagattgtcttctagaatttcctgtagtctgaattatgtagtattgtttcacatgttccagtgtcctcttatttcctgtgagttggtagttagatctagaagcttgattaaattcagattttctctctttagatcatcaactttagatcatcaacttggatcatttgtttcattttgcttttgatatgttgttttttagaattacctcttaaaattttgatttaattttataatcatgtaaaatgtttataaatttccaaattcagatcagcaaaacacaataaaatctattcagagaaggcaaaaaaaaaaaaaaaaagggccggccgttaaactagtttaaagaaaaaacttccaacacnnnnnnn

SEQ ID NO: 24742 - DNA, 1464 bp, Homo sapiens
  misc_feature 1, 1463, 1464: n = A,T,C or G
nccgaggcctgggggcgagctggggtcgtgcagtacagcctctttccggcaaatcacgcgagatttcgttcacccgggctccacagggtcagtgacgcgcgagcgttcccgcaactgtggctcccgaagctgcttcgggccccagcggagtattttatacagaaatcttgtgaaaccactgcccaaccagagcaatgattgttcaaagagtggtattgaattctcgacctggaaaaaatggtaatccagtggcagagaatttccgaatggaagaagtctatttaccagataatattaatgaaggacaagtacaagttagaactctttatctttctgtggatccttacatgcgttgtagaatgaatgaagacactggcactgattatataacaccttggcagctatctcaagtcgttgatggtggaggtattggaattatagaagaaagcaaacacacaaatttgactaaaggcgattttgtgacttctttctattggccctggcaaaccaaggttattctggatggaaatagccttgaaaaggtagacccacaacttgtggatggacacctttcatattttcttggagctataggtatgcctggtttgacttccttgattgggatacaggaaaaaggtcatataactgctggatctaataagacaatggttgtcagtggggccgcaggtgcctgtggatctgtggctgggcagattggccatttcttaggttgttccagagtggtgggaatttgtggaacacatgagaaatgcatcctcttgacctcagaactgggctttgatgctgcaattaattataaaaaagacaatgtggcagaacagctccgtgaatcatgcccagctggagtggatgtttattttgacaatgttggtggtaacatcagtgatacagtgataagtcagatgaatgagaacagccacatcatcctgtgtggtcaaatttctcagtacaacaaagatgtgccttatcctcccccgctatcccctgctatagaggcaatccagaaagaaagaaacatcacaagggaaagatttctggtattaaattataaagacaaatttgagcctggcattctacagctgagtcagtggtttaaagaaggaaagctaaagattaaagagacggtaataaatgggttggaaaacatggggagctgcattccagtccatggatgacaggaggtaacattgtggaaagcagatagtttgcatttcagaagaaatctctttgtaattgctgtaaatgtcatcaaggcaatcatagatttcttttgcatttggtatttcaagtttttaaaaaccttgaatattaatagttggttaagtgaaaggggtattacggcaggggttggtaatctttgggtttacacaaggtttaaattatatggatattttataaaagacggagggtgtgagatgcagagttgtgttgtactgtacggnn

SEQ ID NO: 24743 - DNA, 2670 bp, Homo sapiens; identical to SEQ ID NO: 24256
  misc_feature 1, 2, 3, 4, 5, 6, 7, 8, 9, 10, 11, 12, 13, 14, 15, 16, 17,18, 19, 20, 21, 22, 23, 24, 2643, 2659, 2660, 2661, 2662,2663, 2664, 2665, 2666, 2667, 2668, 2669, 2670: n = A,T,C or G

SEQ ID NO: 24744 - DNA, 365 bp, Homo sapiens; identical to SEQ ID NO: 21784

SEQ ID NO: 24745 - DNA, 367 bp, Homo sapiens
  misc_feature 365, 366, 367: n = A,T,C or G
cttgatagtggccacctgtgaagagtggagaagggaaaataatgagtgtgggaggtgggatgggtattggttaaaggggacttcagctttttatataaacatccacttctctttcaaaagacttcaagtaaatataagaagatactgattgattctggattgtggtatagggatatcttgtcttatcttttgtacacaccacgcgtcacccaacgacccatgaccgttctctgaggcaaaggagggcagcctgacagcaaacacagtcactgttggttccttctgatccacagcctcatcagtatttggactttttaaagctcgtagaaacaagacaaggtgcaccggtttcatagacgcaaccnnn

SEQ ID NO: 24746 - DNA, 694 bp, Homo sapiens
actactcgattgtcaacgtcaaggagtcgcaggtcgcctggttctaggaataatgggggaagtatgtaggagttgaagattagtccgccgtagtccgtgtacgagtaagcaatgactctcaagcaatttttggttctgaagatgtaggctctagctcctacgttgctgtggacatattgattgctgtaggtgccatcatcatgattctgggcttcctggcatgctgcggtgctataaaagaaagccgctgcatgcttctgttgtttttcataggctcgcttctgatcctgctcctgcaggtggcgacaggtatcctaggagctgttttcaaatctaagtctgatcgcattgtgaatgaaactctctatgaaaacacaaagcttttgagcgccacaggggaaagtgaaaaacaattccaggaagccataattgtgtttcaagaagagtttaaatgctgcggtttggtcaatggagctgctgattggggaaataattttcaacactatcctgaattatgtgcctgtctagataagcagagaccatgccaaagctataatggaaaacaagtttacaaagagacctgtatttctttcataaaagacttcttggcaaaaaatttgattatagttattggaatagcatttggactggcagttattgagatactgggtttggtgttttctatggtcctgca

SEQ ID NO: 24747 - DNA, 497 bp, Homo sapiens; identical to SEQ ID NO: 20145
  misc_feature 493, 494, 495, 496, 497: n = A,T,C or G

SEQ ID NO: 24748 - DNA, 4850 bp, Homo sapiens
ctggagtatgtttacgttcttgtcatctgttcccttaagcaattcctaattctaatatgtttttgtatcttacagatagaagtatgtgaagaaaaagcttcagctgttcttccccctacctgtatacagcttcttgacagcagtaactggaaagaaaggctggcttgtatggaagagttccagaaggctgttgagctaatggaccgaactgaaatgccatgccaggcattagtgaggatgctagccaagaaacctggatggaaagaaactaattttcaggtgatgcaaatgaagcttcatatagttgctttgattgcccagaagggaaatttttccaaaacgtcagctcaggttgtattagatggccttgtggacaagattggagatgtgaaatgtgggaacaatgcaaaagaagctatgacagcaatagccgaagcctgtatgttaccatggactgctgaacaggttgtgtcaatggctttctcacaaaagaatcccaaaaatcagtcagaaactctgaattggctatcaaatgccataaaagaatttggtttttctgggttgaatgtcaaagctttcattagcaatgtgaagacagctcttgctgcaacaaacccagctgtgaggactgctgccataaccctgcttggcgtgatgtatctgtatgttggtccctctttgcgaatgttctttgaggatgagaagcctgccctcctatcccagatagatgcagaatttgagaagatgcagggacaaagtccacctgctccaaccagaggaatttccaagcatagcacaagtggtacagatgaaggagaagatggagatgaaccagatgacgggagcaatgatgtcgttgatcttttgccgaggacggagatcagtgataaaatcacttcagagttggtatctaagattggtgataagaattggaagattaggaaagaaggcctagatgaagtggcaggtattattaatgacgcaaaatttatccaaccgaatataggtgaacttccaactgccttgaagggtcgactcaatgattcaaataaaatcttggtacagcaaacgctgaatatcctgcaacaactggcagtagccatgggcccaaatattaagcaacatgtaaaaaatttaggcatccctatcatcacagtccttggagacagcaagaacaatgttcgagctgctgccctagcgactgtgaatgcttgggcagaacagactggcatgaaggaatggctggaaggagaagatctttctgaagagctcaaaaaggaaaatcctttcttgaggcaagagcttctgggctggctggctgagaaactacctactcttcgttccacccctacagaccttatcctttgtgttcctcatctctactcctgcctagaagatcgaaatggagatgtgcgaaagaaggcccaagatgccttgccattcttcatgatgcatttaggatatgaaaaaatggccaaggctactgggaaactaaagccaacttctaaagatcaggtattggccatgctagagaaagccaaagttaacatgccagccaagcctgctccacccactaaagcaacttctaaaccaatgggagggtccgctccagccaaattccagcctgcatcagcacctgctgaagattgtatttccagcagtacagaacccaaacctgatccaaaaaaggccaaagctccaggattatcctctaaagcaaagagtgcacaagggaagaagatgccaagcaaaaccagcttaaaggaggatgaagacaaatccgggcctatttttattgttgttccaaatggaaaagagcaaaggatgaaagatgaaaaaggattgaaggtgctaaagtggaattttactaccccacgggatgaatacattgagcaactaaagactcaaatgtctagctgtgtggctaaatggttacaagatgagatgtttcactcagactttcagcatcataacaaagcccttgctgttatggttgatcacttggagagtgaaaaagaaggagttattgggtgcctggatcttatcttaaagtggcttaccctgaggttttttgacaccaatacaagcgtcctgatgaaagcactagaatatttaaaattgctcttcaccttgctaagtgaagaagaatatcatcttactgagaatgaagcatcttccttcatcccctatcttgtcgtcaaggttggagaaccaaaggatgtcattcgtaaagatgttcgtgccatcctgaaccggatgtgccttgtctacccagctagcaagatgtttccctttatcatggaaggaaccaaatccaaaaactctaagcagagagcagagtgcctggaagagctgggatgtctggttgagtcctatggcatgaatgtttgccaaccaaccccaggaaaagccttaaaggaaatagctgttcacataggagaccgtgacaatgctgtacgcaatgctgcactcaacaccattgtaacggtgtacaatgtacatggggatcaggtgttcaaactgattggaaatctttctgaaaaggatatgagcatgctcgaggagaggattaagcggtcagcaaagagaccctctgctgcaccaataaaacaggtggaagagaaacctcagcgtgcacagaacataagctccaatgccaacatgttacgcaagggaccagctgaggacatgtcttccaaactcaaccaagcccgaagcatgagtgggcatcctgaggcagcccagatggtccgccgagaattccagctggatctagatgagattgagaatgacaatggtacagtccgatgtgaaatgccagaacttgttcagcacaaactggatgacatttttgagccagtccttattcctgaacccaagatccgggctgtttctccacacttcgatgacatgcacagtaatacagcatccacaatcaatttcattatctcccaagtagccagtggtgacatcaacacaagtatccaagctctgacacagatcgatgaggtcctgagacaggaagacaaagctgaagccatgtccggccatattgatcagtttctgatagccacttttatgcagctaagactcatctacaacacacacatggcagatgagaaattggagaaggacgagatcatcaagttgtatagctgtatcattggcaacatgatttcgctgtttcagatagagagccttgcccgggaggcctccactggagtactaaaagacctaatgcatggcctcatcaccttaatgctggattctcggattgaagatcttgaggaaggacaacaggtcatccgctctgtgaacctcttggtggtgaaggttctggagaagtcagaccagaccaacatcctgagtgccctacttgttttgctccaagacagcctgctagcaacagccagttctcccaaattctcagagcttgttatgaagtgtctctggagaatggttcgactgttgcctgataccatcaatagcattaacctagacagaattcttctggatatccacattttcatgaaggtcttccccaaagagaaactgaagcaatgcaaaagtgaatttcccataaggaccctaaagaccctgctacacaccttatgcaaattaaaagggcccaagatcctggaccacctaacgatgatcgacaacaaaaacgagtctgagctggaggcccatctctgccggatgatgaagcacagtatggaccagactgggagcaagtctgataaggaaacagaaaagggagcatctcgaatagatgaaaaatcatcaaaggccaaagtgaatgatttcttagctgagatttttaagaagattggctctaaagaaaacactaaagagggactagcagagttatatgaatataagaagaaatactcagatgctgacattgaaccatttctgaaaaattcctcacagttcttccagagctatgtcgaaagaggccttcgggtgattgagatggagagggagggcaaaggtcgtatttccacttcaacaggcatctcccctcagatggaagtcacatgtgtgcccacgcccacaagcacagtgtcctccataggtaacacaaatggggaagaagtggggccatctgtctacttggaaaggctaaagatcctccgacagcgatgtggtctggacaacacaaagcaagatgaccgacctcctttgacctctttgctctccaaaccagcagttcctactgtcgcctcttccacagacatgctccacagcaaactctctcagctccgggagtcacgggagcagcaccagctaacatagacgacttgaaaaaaagactggagagaataaagagcagtcgcaaatgaagctgccccactcccccggcaccctgcagctttagtttactaaactagaagtcctcatagtttaaaatcgcctcagcaggcctagtgtatacaaactggttgtatgtatcatgccgtggagctagggggaggagtcattgtggcacaagtatttgtacatactctgcttctctctgtcagcgtcctgctgctctagaagactgtccgtggatgagtttagtgtacagacttgtaaacagctgccccctctctgctcagtctagttcccagatccttttctttttaattgctcatttgtaaaattgtcctaatctttcctagctttttaatagttaatattagaaactctcttaatagttttccctttcacgtttgtgagctcttctcttgtccgccctgaagggtcacttcgtattctgtatgaatgcatggcatgatacaactaatttaagagtcttttataaataaagtttgcattaacccaacaaaaaaaaaaaaaaaaaa

SEQ ID NO: 24749 - DNA, 306 bp, Homo sapiens
ggcggacactcagctgatgcttggagtcgggctgatcgtgaccatctttccaccgtagaaaaggacacaaatggagaagttctgtgggtgtggtgttatccttccacgacagccacattaaggaacctgctgctgagaaaatgctgccttacagatgaaaacaaacttctccatccctttgtctttggtcagtacgaaagaaaactctgcagttagcactggatcttgtctcttctagaaatgttgaagagctggttattgtcctgaagaaggaagtgataaaaacaaataatgtgtctgagcatg

SEQ ID NO: 24750 - DNA, 2079 bp, Homo sapiens
  misc_feature 1, 2070, 2071, 2072, 2073, 2074, 2075, 2076, 2077, 2078,2079: n = A,T,C or G
ncggcacgaggcacggccgcggctggcggcggcggcggcggctgctggagcccggatgcggcgccgtgaggcaggcccgggagagcggcgcggatggatccaacatggcggcgccgagcctgagccgagagaagagacctgggaaattaagtttcttgcggagtacggtggggattgcagctgctgagcagggattctggaaagcattgcgtacctgagcccccagcatggcgggcctaaagcggcgggcaagccaggtgtggccagaagagcatggtgagcaggaacatgggctgtacagcctgcaccgcatgtttgacatcgtgggcactcatctgacacacagagatgtgcgcgtgctttctttcctctttgttgatgtcattgatgaccacgagcgtggactcatccgaaatggacgtgacttcttattggcactggagcgccagggccgctgtgatgaaagtaactttcgccaggtgctgcagctgctgcgcatcatcactcgccacgacctgctgccctacgtcaccctcaagaggagacgggctgtgtgccctgatcttgtagacaagtatctggaggagacatcaattcgctatgtgacccccagagccctcagtgatccagaaccaaggcctccccagccctctaaaacagtgcctccccactatcctgtggtgtgttgccccacttcgggtcctcagatgtgtagcaagcggccagcccgagggagagccacacttgggagccagcgaaaacgccggaagtcagtgacaccagatcccaaggagaagcagacatgtgacatcagactgcgggttcgggctgaatactgccagcatgagactgctctgcagggcaatgtcttctctaacaagcaggacccacttgagcgccagtttgagcgctttaaccaggccaacaccatcctcaagtcccgggacctgggctccatcatctgtgacatcaagttctctgagctcacctacctcgatgcattctggcgtgactacatcaatggctctttattagaggcacttaaaggtgtcttcatcacagactccctcaagcaagctgtgggccatgaagccatcaagctgctggtaaatgtagacgaggaggactatgagctgggccgacagaaactcctgaggaacttgatgctgcaagcattgccctgacctattccctcttctcactttggggactgttcccatcacccacctctggagcttacactgttctggggtttgttctctacccttccaaccaatcacacccctgcctttttttttttttttttaaagaaaaagacaaaagaaagtggaagtggtattccccacccctccctgcacccatgtgcctgggcttcccctttatttcccttttccatttaccccgtaatgtgtctctacagctaccttaccactgagccgtaagacaaatgtataggaagaagcaaagtctacagcacatagtctttgtaagggattgatgtgaacacttttttttggatgcactaaggagttatcaatacttctggctttatgagagctcttaaattttgtctaaaaaaccaaagggctgtgagtaagggagctatgtggaaagtgggactctgaagtgtattttgaaaattaatcgccaccctcttccaaattatagaattttttaaaaacaagctgtggccctttccactctctcctggcctctggtgctgctcctctctgccgcctttcctccattccatggcttgaaacctctgcctgatgtggctccttcctttttcccatttgtcaaaccctcttcaaaggaggaacagataagactgggtcagcctagtcatgcctcccaactgtggtggtatatgtgtacacacatacacagggtggatggagaagaggttgctgattaaaatacactccccctataaaggggaagggggagtgtgacactttctttccatgttcaagtgaaaataaataatgtaccctgcaaaaaaaaaaaaaaaaaaaaaaaaaaaaaaaaaaaaaaaaaaaaaaaaaaaaaaaaaaaaaaaaaaaaaannnnnnnnnn

SEQ ID NO: 24751 - DNA, 1559 bp, Homo sapiens; identical to SEQ ID NO: 22044
  misc_feature 1: n = A,T,C or G

SEQ ID NO: 24752 - DNA, 1306 bp, Homo sapiens
  misc_feature 1156, 1259, 1274, 1284, 1301, 1302, 1303, 1304, 1305, 1306: n = A,T,C or G
ccgatcttttgtttgcttttttcttttcttatttatttatttatttatttatttatttatttattttgagacggagtttcgcccttgttgcccaggctggagtgcattggcgcgatctcggctcaccgcaacctccgcctcccgggttcaagcgattctcctgcctcagccttccgagtagctgggattacaggcatgagccacctcgcccggccttccggctgatatcttaaaagaacttttcaactttagtaaataccctgtcttaatcaaatctcattaaaagtaccccatatttatcaacaaaacatgaaaatccttggacggcttcaaagttcttacagaaaatattctgcctttcctttccatacaaaggcacagcttcgaaactggtaggtgaagggaaggaaaataaggaattctgttacgaaatcatacaggctgttatttggaaatacagaagggtgtatgtactatatgggatactgcatgctatttggaagaattttgtttatttaaacatttcagcaaattcctcagttttgatatggggtgcagtatttttaactcattgagaaatttctactaacttttttgaatgtgctcttttcccactagttgcactaaggaaagaggttagtcatgtggtaaaattaatagtgacaaagctgtaaatagctctgcaggccaaggtagccatagtaagaagtcctggagatttatggaagaaatttttgttcatggaagcctgtcagacatgaagatgtgggtcttgtgaattggagattcagtgcgtgaggaaaacagcctaactatccataattaaggtaactactgtcagatatttgtaacatagtgaacatcctattatgctagatagaagcattctctatttgaatgttgtttcctgtatcctgtactttctttaagattctagctcaacaagttttaacctgtatttctcttacagctactggaattcagtacgtgaggacttggacttggtgggcacagaatgcatctttttatatcattaaatccaccagaacatctagcatggtcatttgcctaaaacaaagcctctggaaatttagtcaagttgagatgtaaaataaaagattactgaacagaaaaaaaaaaaaaaaaaactcgaggnggggcccggtacccaattcgccctatagtgagtcgtattacaattcactggccgtcgttttacaacgtcgtgactggggctggcgtaatagcgaagaggcccngaacgatcgcctttncaacagttgncagcctgaatgccgaannnnnn

SEQ ID NO: 24753 - DNA, 2129 bp, Homo sapiens
aacaaattaaaagctgaaatggattcacacaaggaaaccaaagataaactcaaagaaacaacaacaaaattaacacaagcaaaggaagaagcagatcagatacgaaaaaactgtcaggatatgataaaaacatatcaggagtcagaagaaattaaatcaaatgagcttgatgcaaagcttagagtcacaaaaggagaacttgaaaaacaaatgcaagaaaaatctgaccagctagagatgcatcatgccaaaataaaggaactagaagatctgaagagaacatttaaggagggtatggactgagttaagaacactgagaacaaaggtgaaatgtctagaagatgaacgattaagaacagaagatgaattatcaaaatataaggaaattattaatcgccaaaaagctgaaattcagaatttattggacaaggtgaaaactgcagatcagctacaggagcagcttcaaagaggtaagcaagaaattgaacatttgaaagaagaagtggaaagtcttaattctttgattaatgacctacaaaaagacatcgaaggcagtaggaaaagagaatctgagctgctgctgtttacagaaaggctcactagtaagaatgcacagcttcagtctgaatccaattcttcgcagtcgcaatttgataaagtttcctgtagtgaaagtcagttacaaagccagtgtggacaaatgaaacagacaaatattaatttggaaagtaggttgttgaaagaggaagaactgcgaaaagaggaagtccaaactctgcaagctgaactcgcttgtagacaaacagaagttaaagcattgagtacccaggtagaagaattaaaagatgagttagtaactcagagacgtaaacatgcctctagtatcaaggatctcaccaaacaacttcagcaagcacgaagaaaattagatcaggttgagagtggaagctatgacaaagaagtcagcagcatgggaagtcgttctagttcatcagggtccctgaatgctcgaagcagtgcagaagatcgatctccagaaaatactgggtcctcagtagctgtggataactttccacaagtagataaggccatgttgattgagagaatagttaggctgcaaaaagcacatgcccggaaaaatgaaaagatagaatttatggaggaccacatcaaacaactggtggaagaaattaggaaaaaaacaaaaataattcaaagttatattttacgagaagaatcaggcacactttcttcagaggcatctgattttaacaaagttcatttaagtagacggggtggcatcatggcatctttatatacatcccatccagctgacaatggattaacattggagctctctttggaaatcaaccgaaaattacaggctgttttggaggatacgttactaaaaaatattactttgaaggaaaatctacaaacacttggaacagaaatagaacgtcttattaaacaccagcatgaactagaacagaggacaaagaaaacctaaaacaagcctcttgctcagtaaagagacaaaagccacacaggagtaggtgccactgacctctattgttggagactttgttccactttttgtttcagccagtaaaaatattgttttgcttcatctgtacacaaaaaaatacccttttacaatatgaatgcattgctgtatatactgtaagactgaaagctttgatgaaatttgtttttgtatggtgcaatatgacagcctgtcattgaatctaaacaacttaatttgcttgtattcataagaagtgttgaacattacaagggcttttataaaaaaccctttgttcatatttcttccctttaaaatatgtaatgtcaaaaatgactcaccttttaaaaattatgcatgaaaacaggtggtaaacattcagtaatacgctatttctccaacatcaagacaactaaaacaaatgataaaaatgtttatttttacactccagcatatcgggtgagttttagggatgtgtatgaatatttaaatcttttaatttcagttttaatgaaagctgaacttaataggaaagctagctcttggtaactagcaatgatcaggcattgtttgcctctgtcaggttttcttatctgttttaggt

SEQ ID NO: 24754 - DNA, 2063 bp, Homo sapiens; identical to SEQ ID NO: 22272

SEQ ID NO: 24755 - DNA, 4214 bp, Homo sapiens
  misc_feature 4197, 4198, 4199, 4200, 4201, 4202, 4203, 4204, 4205, 4206,4207, 4208, 4209, 4210, 4211, 4212, 4213, 4214: n = A,T,C or G
gcgtccggtaagagttgtgtgttctgaattttcagagtgccaaaaggatataaaataaatgaccccagccagaattcatcttgaccgttcacagccccagcgcaggtctggatgtaccgactgcttttggaataaaaagattcccaggatgtgagcaacacgggaccgatatgatgcttcctggtgtgtttagtggttggtgccattccaattttctgtgctgaaatcattctgaaaactcaaacagtagacttcagcacacaaggaaagccaaagccatttgagggggaataaagccaaaagcctttcaccttattcgttccaagaatctcaccgccccctccttatccccctccaaaaataagccattgcacacagacaggcagcatggctagcaaacgaaaatctacaactccatgcatggttcggacatcacaagtagtagaacaagatgtgcccgaggaagtagacagggccaaagagaaaggaatcggcacaccacagcctgacgtggccaaggacagttgggcagcagaacttgaaaactcttccaaagaaaacgaagtgatagaggtgaaatctatgggggaaagccagtccaaaaaactccaaggtggttatgagtgcaaatactgcccctactccacgcaaaacctgaacgagttcacggagcatgtcgacatgcagcatcccaacgtgattctcaaccccctctacgtgtgtgcagaatgtaacttcacaaccaaaaagtacgactccctatccgaccacaactccaagttccatcccggggaggccaacttcaagctgaagttaattaaacgcaataatcaaactgtcttggaacagtccatcgaaaccaccaaccatgtcgtgtccatcaccaccagtggccctggaactggtgacagtgattctgggatctcggtgagtaaaacccccatcatgaagcctggaaaaccaaaagcggatgccaagaaggtgcccaagaagcccgaggagatcacccccgagaaccacgtggaagggaccgcccgcctggtgacagacacagctgagatcctctcgagactcggcggggtggagctcctccaagacacattaggacacgtcatgccttctgtacagctgccaccaaatatcaaccttgtgcccaaggtccctgtcccactaaatactaccaaatacaactctgccctggatacaaatgccacgatgatcaactctttcaacaagtttccttacccgacccaggctgagttgtcctggctgacagctgcctccaaacacccagaggagcacatcagaatctggtttgccacccagcgcttaaagcatggcatcagctggtccccagaagaggtggaggaggcccggaagaagatgttcaacggcaccatccagtcagtacccccgaccatcactgtgctgcccgcccagttggcccccacaaaggtgacgcagcccatcctccagacggctctaccgtgccagatcctcggccagactagcctggtgctgactcaggtgaccagcgggtcaacaaccgtctcttgctcccccatcacacttgccgtggcaggagtcaccaaccatggccagaagagacccttggtgactccccaagctgcccccgaacccaagcgtccacacatcgctcaggtgccagagcccccacccaaggtggccaaccccccgctcacaccagccagtgaccgcaagaagacaaaggagcagatagcacatctcaaggccagctttctccagagccagttccctgacgatgccgaggtttaccggctcatcgaggtgactggccttgccaggagcgagatcaagaagtggttcagtgaccaccgatatcggtgtcaaaggggcatcgtccacatcaccagcgaatcccttgccaaagaccagttggccatcgcggcctcccgacacggtcgcacgtatcatgcgtacccagactttgccccccagaagttcaaagagaaaacacagggtcaggttaaaatcttggaagacagctttttgaaaagttcttttcctacccaagcagaactggatcggctaagggtggagaccaagctgagcaggagagagatcgactcctggttctcggagaggcggaagcttcgagacagcatggaacaagctgtcttggattccatggggtctggcaaaaaaggccaagatgtgggagcccccaatggtgctctgtctcgactcgaccagctctccggtgcccagttaacaagttctctgcccagcccttcgccagcaattgcaaaaagtcaagaacaggttcatctcctgaggagcacgtttgcaagaacccagtggcctactccccaggagtacgaccagttagcggccaagactggcctggtccgaactgagattgtgcgttggttcaaggagaacagatgcttgctgaaaacgggaaccgtgaagtggatggagcagtaccagcaccagcccatggcagatgatcacggctacgatgccgtagcaaggaaagcaacaaaacccatggccgagagcccaaagaacgggggtgatgtggttccacaatattacaaggaccccaaaaagctctgcgaagaggacttggagaagttggtgaccagggtaaaagtaggcagcgagccagcaaaagactgtttgccagcaaagccctcagaggccacctcagaccggtcagagggcagcagccgggacggccagggtagcgacgagaacgaggagtcgagcgttgtggattacgtggaggtgacggtcggggaggaggatgcgatctcagatagatcagatagctggagtcaggctgcggcagaaggtgtgtcggaactggctgaatcagactccgactgcgtccctgcagaggctggccaggcctagacagggaagtctgttagaactgctgtgctgatcaacgggacgctccgtctttgaagaaagaagagatggtctctccccagccatgggccacccttgccagtgactccaagtggaactacttagctcgcgtgtgcctggagggtgcgggaagtccagcgactctcagacgcacctcccagaggaccggtgggaattgttcatagtgccaaagtcctactactgcgttttcagtgggtccttgtacatagtttgctcctctgccctagccctcacctcttgctatactggaaccgatttgtacaatgtgggaattttgttacctttttaatcaagggcaacttccttttccagcactaccattgtaaggtttttttcaggagggagggctaaccaccttgcttttctcttttctctttttcttttttttatttttgttttattaatttggggaaaggggtgttagcattagtgccatgatatctactggattttaagtagggagactttatttttaaaggtaggttgaaatttgggagatttctcggcaggaagggctgaaatccaggcccctgtctcaacttggagagaggtgacagacggcagatcttccaaatcaaattcctttccagttcttcccctggctgcctttttgggggtccctgccttagccccacacaaggctttctgaactgccaagaggggatctggcttctcaactgctcggcctcttgggccaggctgtgcccagccagccctgggagaactgggtagcaggtggctgacttctttaagcacctttctaaataccagcagaagaggctcccgcctctgttagcatgatcagtactattgtgacattaaaacaacaacaataagatcttcctatctggagggtacagaggtgaatggctttggttttcatttctcttcttcactgccttttctcggtgtggtatttgacaagattttagctcaaagcctcaccatgaattgattttttttgtttgtgtgtgtgtttgttttgggacaattttagatacctgagtgcactttttcagttagtcctaacttttaaaagaaggaaaaccaagagacatatctggtgtacgtgttgcagtatgaactctggttgcaatccctccccctcccacactgccccccatttgagtacgccgcacaagtcaaacgctaggaagtttgaataaaaccaatttttctaacttgttgctcatttgttgtaactcaataaagcaaagactaaacatttttataaaaaaaagaataacttaaaagtgnnnnnnnnnnnnnnnnnn

SEQ ID NO: 24756 - DNA, 284 bp, Homo sapiens
  misc_feature 176, 177, 178, 179, 180, 181, 182, 183, 184, 185, 186, 187,188, 189, 190, 191, 192, 193, 194, 195, 196, 197, 198, 199,200, 201, 202, 203, 204, 205, 206, 207, 208, 209, 210, 211: n = A,T,C or G
acggttcagcctgtgatcacttcattccaatcaatttatggggccgagacttgtcacaacaatggcatgcagagattactatcccagcctccatatacagccccaggaataaaaaaatcatgactaaaatgggatagctccctaaaaagggactaggaaagaagtcccaattgagnnnnnnnnnnnnnnnnnnnnnnnnnnnnnnnnnnnnacaggaagttgagcctctggaaggcctcgcggtccttcaccggccccgccatcaccgccgcgctcccccgcgt

SEQ ID NO: 24757 - DNA, 1866 bp, Homo sapiens; identical to SEQ ID NO: 23492

SEQ ID NO: 24758 - DNA, 1447 bp, Homo sapiens
  misc_feature 1, 2, 1446, 1447: n = A,T,C or G
nnacttttttttttttatttgttttttcctttgttgttttaaaggggacaaaaaaaaaggacttgactccatgacgtcgaccgtggccgctggctggctggacaggcgggtgtgaggagttgcagacccaaacccacgtgcattttgggacaattgctttttaaaacgtttttatgccaaaaatccttcattgtgattttcagaaccacgtcagatataccaagtgactgtgtgtggggtttgacaactgtggaaaggcgagcagaaaactccggcggtctgaggccatggaggtggttgctgcatttgagagggagtagggggctagatgtggctcctagtgcaaaccggaaaccatggcaccttccagagccgtggtctcaaggagtcagagcagggctggccctcagtagctgcagggagctttgatgcaacttatttgtaagaaggatttttaaattttttatgggtagaattgtagtcaggaaaacagaaagggcttgaaatttaataagtgctgctggaaggggattttccaagcctggaagggtattcagcagctgtggtggggaaacatttctcctgaaagactgaacgtgtttcttcatgacagctgctcaaagcaggtttctgagatagctgaccgagctctggtaaatctctttgtcaaattacgaaaacttcagggtgaaatcctatgcttccatgtacattacatggcttaagattaaacaaacacacatttttcaagtctctaactcagagtgaactctagcagccacagtcagttcagaacacctcattctcagcagcttcccacgcattcatcatctcaacaggcttccagggcatggtgatctcggttcaagcagcccgcattgcaaaccctcaatgcccagccatagtcatcatcatcatctcagccagctgccagcctccagtctcccatcacacccattgtaattcaattcctcacaagtactagcatcacaggcgctcagggtacaaagacaaactccatctcaaaaaatcccgtacaaccctggaccttcggcacaggccaggaatcacaccaggacaccactcaccccaacgcacagaacgtggggacagcggcgaccccaggcatgggagcaacaacaggcctccacgctaccggcgaacccccaaagaccaacacccaacaccagggacgtacaacaaacccgagggaaggggcaatcccttggacggccatataacaccaataaggaaccaatccacaaagcaaccaacaccacctagcaccccctatgggagcgcagggaccaacctcacccatctcatcagacacgaacggcaaagaaacccggggatcgcgacgaaccacccacgaacactgcaaacgtcaaccgacacgcacggcgagcaactcgacaccgagccaacccccccacaagaggcgann

SEQ ID NO: 24759 - DNA, 3073 bp, Homo sapiens
ataactcaccgggctgccgagcagttcgggctaatgacattaactaccaagacagatccccagaactcttgaagagtatgttggatttcattaagtgactggatatgaaaagtcgtttaatgtggtgctaaaaagtaaaggacttttaatcacagacagtagaattatgtgttcataaattctgcttttctttccactacccttcctcccatcccatccttccttagttctgtatttgtttttcttgcctcatggtaattgatttcagacagactttaacaaaaccacattgttttggtgtaactataaggtatttgcatattggttacctatttgtctttcttttttttaaaggaacagatataaaatgttttgtttatgtaacaagggacatttataatttcaagttgataatgttttaaacagctgcttacaaaagtatttctgttaagcctatgtcagcatgttatccatgcagcagttttgaggattttatgaagaaaaagagctaaaaaggaacattaagaggaatgggatatccaggtgttctgcacatgccaaactgctgtagatagtttacactcttccattatttatacggagtgatgcagcacattttagcattcaggaggatttttaaaaaatagctgcagattaatctggaaaatgtgctaatttaataatagttacaaatttataaatttaaatccatttgaaattgttgcattatgctgggtagtatatacaaaatggttatcatcttaaaccaacttttcagagaatcttgatggactctgcctttaggcttgaattcttcaaagtctattttaatgaaatttatctaaattgcagcagtctatttgattcagctcatagacatgtaaaaattatgaatgctgttttcttatgaaacaaattgtcacagtgtagttatacattctatttttgtccccttttccctttttctcctgtatcttttaaaatttggaaactacttttccagaaggcattatttatgcctccctaataaggtattttacttatgacagatgaaaaggaaccaggatatttttgaattttttcactttcttagtctgtgacaagaagtagaaatatcactagtgtggtataggaacttacatgttttttatgatgaaaataattctcaatgccacttgaaaggtaattgtgtctgagagctgcaaatttttcaaccacaaaatgtcacttattcctacaggctatacagaggtctttatggttttttgttttgttttaatggcaacattgtaactgtcaaactaaaagggtattctgtgattatcttttaagcattacagaaattcaagtgaaagttatatgcttatttctattgatgttaaaaatgataatgaaagcaaaattagctgtatctgtaattttctctctagtgccaaatgaatgccttagctactcatagtgcatggtactgtaagtgaagacctgtagttttttttttttctttaatgaaaagcattataatgatgtagcagcatcagatataaacttaaaaaaaaaggtttcaattaacattttatatatggataatgctttgtaaagtgtaagagaaaggttgcagttggatcagtataaaacaatgaccaagccaaaatcagcaccctagggccttaaataaaatagagataccccacaaaatgaaatattttgaaggatgggaggggacagaaggggggactatcccccaaggatgcaagatactttttacagttgctatcattatactttgtcttcttgcttcagttaggaaggttttgatggtaaattctgtcatggtaatagatacctattttcctaacctgagattttacaaggaaggtttttaggttggcttaaatggaggtatttatttgagtgagccctaatttgaaaattaccagacttgatcctcctggtatgaatcaaggaaatactgtaccttgctcttagcaactctcagtggcctgaaagagaaaatgcacttcttcaaggtgagtgaatcatgctttttccacagttcagatcagaccctttatttttcaaactacaaggcctgcttattggacagtctaaggaatagctttgatacttggtattcagttggttccattattaatgtatattatttttatttaaacatcaaaacttaaaatatcagataatgttgcatgttttaaaaacacatttcatccctttggctacccaggaccagcactatttaagacactgcttatttataaaatgagaataatgattatatgtacatattcagacatcaaaatttaatgacattctattttgagaagggaagacaatgctgaagaaagtaaaactgttgattgaaatgctgacagggtggagaacgaatttgaagacagtggaataaactatgaactatgctaatggtaattagattttttgtttgtttagtatagtggtaaattgtgtagtatcttgctgagaatctaattctatcttgtaaaatcaatccaaatgtgtattgtgaaacacctgtataaaatcatttttgaaataagtgatctacatgcctgtttttttaaaatgtttttggtagaattgtttgaaaatatgtttagccagacccttccccaacttaatttttttttaaaaaaggaaaataggtaagaaaatgatagttctatatctcagccctctgtgaactctaggctgtctccattttgcagccactttggtcatttgatgtttactattggtatacttatgctttgaattgtaaatcttcattgatggtattacagattcaaccaaaacttctctgtcctgttcagtaattgttatataaatctggatgagctagggaggcccaggtggatgttttcattcgcaaatcatgagaaacttaagtgggttttatgcacttgatagagttggcaaaattgaactatgaagttaactatttaactcaaggaatgggcggcaaacccatcccctcgattgataaagaaggggaacatttttacattagaactgacactgaaaacatagctttttcagt

SEQ ID NO: 24760 - DNA, 701 bp, Homo sapiens
gcgtccgggttgggcggtgcttgcgcgcgtgagctgagccggtgggtgagcggcggccacggcatcctgtgctgtgggggctacgaggaaagatctaattatcatggacctgcgacagtttcttatgtgcctgtccctgtgcacagcctttgccttgagcaaacccacagaaaagaaggaccgtgtacatcatgagcctcagctcagtgacaaggttcacaatgatgctcagagttttgattatgaccatgatgccttcttgggtgctgaagaagcaaagacctttgatcagctgacaccagaagagagcaaggaaaggcttggaatgattgtagataaaatagacgtggataaagatgggtttgtgacggagggggagctgaaatcctggattaagcacgcccagaagaaatacatatatgacaatgttgaaaaccaatggcaggagtttgatatgaatcaagacggcttaatctcctgggatgagtacagaaacgtgacttatggcacttacctggatgatccagatcctgatgatggatttaactataaacagatgatggttagagatgagcggaggtttaaaatggcagacaaggatggagacctcattgccaccaaggaggagttcacagctttcctgcaccctgaggagtatgactacatgaaagatatagtagtacaggaaacaatggaagata

SEQ ID NO: 24761 - DNA, 2670 bp, Homo sapiens; identical to SEQ ID NO: 24256
  misc_feature 1, 2, 3, 4, 5, 6, 7, 8, 9, 10, 11, 12, 13, 14, 15, 16, 17,18, 19, 20, 21, 22, 23, 24, 2643, 2659, 2660, 2661, 2662,2663, 2664, 2665, 2666, 2667, 2668, 2669, 2670: n = A,T,C or G

SEQ ID NO: 24762 - DNA, 3389 bp, Homo sapiens
  misc_feature 3387, 3388, 3389: n = A,T,C or G
agggaatttggccctcgaggccaagaattcggcacgaggggcgggggaggaaagcggaagccgcggggccttctaagtccgaaagtcttcacgaggcgccagtctcttcgcggcgtccaccacttagacgcaagttgctgaagccggccggggagaaggtgttgttgccggagctgagaccgggcggccacagtccgcagggatgaacctcgagttgctggagtcctttgggcagaactatccagaggaagctgatggaactttggattgtatcagcatggctttgacttgcacctttaacaggtggggcacactgcttgcagttggctgtaatgatggccgaattgtcatctgggatttcttgacaagaggcattgctaaaataattagtgcacacatccatccagtgtgttctttatgctggagccgagatggtcataaactcgtgagtgcttccactgataacatagtgtcacagtgggatgttctttcaggcgactgtgaccagaggtttcgattcccttcacccatcttaaaagtccaatatcatccacgagatcagaacaaggttctcgtgtgtcccatgaaatctgctcctgtcatgttgaccctttcagattccaaacatgttgttctgccggtggacgatgactccgatttgaacgttgtggcatcttttgataggcgaggggaatatatttatacgggaaacgcaaaaggcaagattttggtcctaaaaacagattctcaggatcttgttgcttccttcagagtgacaactggaacaagcaataccacagccattaagtcaattgagtttgcccggaaggggagttgctttttaattaacacggcagatcgaataatcagagtttatgatggcagagaaatcttaacatgtggaagagatggagagcctgaacctatgcagaaattgcaggatttggtgaataggaccccatggaagaaatgttgtttctctggggatggggaatacatcgtggcaggttctgcccggcagcatgccctgtacatctgggagaagagcattggcaacctggtgaagattctccatgggacgagaggagaactcctcttggatgtagcttggcatcctgttcgacccatcatagcatccatttccagtggagtggtatctatctgggcacagaatcaagtagaaaactggagtgcatttgcaccagacttcaaagaattggatgaaaatgtagaatacgaagaaagggaatcagggtttgatattgaagatgaagataagagtgagcctgagcagacaggggctgatgctgcagaagatgaggaagtggatgtcaccagcgtggaccctattgctgccttctgtagcagtgatgaagagctggaagattcaaaggctctattgtatttacccattgcccctgaggtagaagacccagaagaaaatccttacggccccccaccggatgcagtccaaacctccttgatggatgaaggggctagttcagagaagaagaggcagtcctcagcagatgggtcccagccacctaagaagaaacccaaaacaaccaatatagaacttcaaggagtaccaaatgatgaagtccatccactactgggtgtgaagggggatggcaaatccaagaagaagcaagcaggccggcctaaaggatcaaaaggtaaagagaaagattctccatttaaaccgaaactctacaaaggggacagaggtttacctctggaaggatcagcgaagggtaaagtgcaggcggaactcagccagcccttgacagcaggaggagcaatctcagaactgttatgaagaccttcgaagttcttcattctttctcactttgccatcatgtggcctctggacactgtggtcagtcatttgaaaattgactttaatttaaaacaaaggcctgtgctccacccaggaggtgggaggtgaattttatgtttaaatgaagaagtgaattatggaagaaggtatacgaccttcccttccttttcaagcataagtccaaatagactctcaggaatgaagatttgtgaagacatcagataggaattttggactcatttaaactttgatgcttagttatgttgctggagaaaagatacttatgttttgctcatctaacttcattgtacccagcgtcattttgacatgtcatttcctatctcccatttgccttcggtcctcaatgcatgtctttgagtgacttcttatctgaaattttgctactggtatcctaggaaagcttttgttggatactctcattttaaacttctcctctccccagatacctcctatatttccatattgtgtgcaaaggatgggcagaaaagaaagtgcttgaaagatttcaaattttcagaaagggaacaacgaaggccctctcttcctctcataccacgttttgctcaagaagctgggctgtaacaattcagggttttcccttgttttcctctcattgcatgtttccctccaatattggttcattgtcatcaatcatggtttttgaagatagctagttttatccatctccagcaaagaatcatcaatagtttatattgctttacctgtgctggcttccagagatggaaacaaacccaggtgtctctcaacaagctacttttttactggggtgggggaatctatgcaaggagtaaagtaaaaccatccagaatcaaagcagcaaccacatagttcaaatcaaagatcaaggtgaattttttgtatcactgcctgtggaaatctatcctcatcagtcattgcatttttccctgcctatacctgtgctcctttttcttactgtgttttcagtcacttcctttctgtgaaaggttgcttagctttttttttgacatttgttgttctttatataaaaataacagattggatagatgtgtacatttggtgtttgaaattctctgaaaatcccattaggaaaccaggtgtgaaaagggctcagtagcttctctgagtggcgtttttagctgactggaagtgcttaatctggatcgtcttttttttttttttttttttcaatattttaaaaggagaatttaaatactgtgcttactgtgaaatatatcagttggtgagccgggcgtggtgggtcacgcctgtaatcccagcactttgggaggccaaggcgggtggatcacccgaggtcaggagttcaagaccagcctggccaacgtggtgaaagcctgtatctattaaaagacaaaaattagctgggcgtggtggtacatgcctgtaatcccagctacactggaggctgagtcaggagaatcacttgaacgtgggaggcagaggttgcagtgagtggagatcgcaccactgccctccagcctaggtgacagaatgagactctatcnnn

SEQ ID NO: 24763 - DNA, 3181 bp, Homo sapiens
  misc_feature 3179, 3180: n = A,T,C or G
gaaaacctgactgcgctcccagaagcctccggtgtacctcgctgggaacgcacttcctgggacgctgagagggagacgctccaagaggctcctcagtgtgggcgagtaaaatgccctgcgtgtgagaagcaggctcagattattgctactctgtattcagatcttcatgtgtctcttctaagctgaataaagctgttttggaactgtcaggtacctcaaagctctgactgacagtactccacaagcttgcctgccatgggctgtcgggatgtccacgcagccacagtcctttccttcctgtgtggaatcgcctcagtagcaggcctctttgcagggactctgcttcccaactggagaaaattacgattgatcacattcaacagaaacgagaagaacctgactgtttacacaggcctgtgggtgaaatgtgcccggtatgacgggagcagtgactgcctgatgtacgacactacttggtactcatcagttgaccagctggacctgcgtgtcctccagtttgccctacccctcagcatgctgatcgccatgggtgccctgctgctctgcctgattggaatgtgcaacactgccttcaggtcctcggtgcccaacatcaaactggccaagtgtctggtcaatagtgcaggttgccacctggtggctgggctgctatttttcctggcaggtactgtgagcctctccccatctatctgggtcatcttttataacatccatctgaacaagaagtttgagccagtcttttcatttgactatgcagtgtatgtcactattgctagtgctgggggcctgtttatgacttcccttatactatttatttggtattgtacatgcaaatctttgccttctcctttctggcaaccattgtactcccatccacccagtatgcatacttactcacagccctattcagcacgctctcgcctctctgccattgaaattgacattccagtagtttcacacaccacttaatggggaaatagttaattgttaaagaaaacttcttgtagcctcacattccccttgtgcaaagagctcttttggacctacatacattttcctttgtttttgaccaatcaatgaagccaaatttatatgtcctagtagaatgaagtgctgctagtttttatgagaagtatattatattaaatgtgaattttttaaattttgcttcttatactggaaggaattttagccttcatattgatatctaattaattatttaagtggaagaggcctgcatcacaattgaggtaatgtagagcaacatgttaaagaatgatggttagcagaagctgttgtatacaatcttcatgaaaatttcagtgtgtatttttctttttctataatacctttaactgcaaagaaaaggcagtttcaaatataagaaatttatttcaggtaagggtaatattttaatagtagtcaataatctagcttaaggctgtaactcttctatcggggctaattgtatgaataggtgtcagtatgttgaagattactttcttttgtgactttcttctacctcatgccactgtttaaaagtaaaacgtattttaatgatgttagaataagactaccattctaaatatcacctacttatgaataacatgtaataatttttaacattaatgattccataaattgtattattgggattagaatgtgctttatgacaggttagtgtttcctctgaggcagaaaactcttttttggagatatcttccatcaagcagtactcgtgcccatatacaatctcttagtggctaggagaaataaataaaagggccataatggtttgttctctttcagacataatttagtaggggacaagaagtctgttcttcagtgagtacactagagatttactctggtgactgccttttgagttatgggtgaagtaaggtatggctttaccataaccttgattcattcacccttgattcatttctcgcccccgtcactgattatttccttgagcatatatctctgcctaacactttagtaggtgctatagaggatacatgaaaagtatgagatctggttccatccagtaagacattttaatagagaagatcaaaatgttacctggcagttggggaataatctgacttcgttggcagttggccttaacttcttaatcattgatccaggaatatttcaaccagagacacaactttctggcagacagacaaattgtacaacaccaacaatatcctggaccttgaaattctgtttacttcagtccattgtatcctttaaggcacctgtgctagcctagattttgtaataacactgatttatgagaatggacaaaagtggtagggaaattgttccctctccacttctgaaagtatgatgatgtattaaggatggaggagttattaaaaatgtctcttctgatgaggtaacaattagatgaaaccatgttaaagctgagatgaacacttagaaattcagggatattgggtctttagccttatgaatttgagctgcttatttaattggtgtaatttactacatattagtactatattcgtaaggattttttattaaccattacagattttacaaacagctagttatatggtaaacagattattatgcctttttgcaattctgaatatgattctagtatccggtagatgtatctggtactttttcccctaattccaacactagtttatatattatagacgaataaaatctaggtgtcttcaactttttcacatgcccgtcgtcggaacggcacacaaggttctgcatgttcctcaactaaccgggttctggattacttcaccttcggagtcctttacctttacccagatgtagctgagctcgaccattttcagaacccgcgggcgccacttgcgagcccacggctactttccccccgttttgctaaaattaaggccccctttcaaatggccttgtccaacaagagtctaaaatactctccacagccgtgggcttgtgggtatacacgctagcacagcgagaccacacttagagatacaaacgctgctacgacgcgtaatgacagaacctccacaatgggctgcgaccagacgtgactgacatcacacgacactactctctgttgacttgtcctcacttttcttctctcttgatcttcttcaatactatcctcatattgtgtnng

SEQ ID NO: 24764 - DNA, 2049 bp, Homo sapiens; identical to SEQ ID NO: 24114

SEQ ID NO: 24765 - DNA, 451 bp, Homo sapiens
  misc_feature 1, 2, 3, 4, 5, 6, 7, 8, 9, 10: n = A,T,C or G
nnnnnnnnnnatctcatgtaagcattacattttgaagactgaatatacttcgcagcagatcaaacacatttatggcatgcactgacctcttcttggagcccagaactttatagagttgcctaccagggttactgtaatggaatttatgatcttaagaaattactagttgtattatttatcctatgattcattcattcaataagcttttactgcataaaccttacatccagcactgtagttaagtacaaaagtggcctgtggacatttaggcctgggtgatgcatttgctcttcctgtttgtgccaatgtatcaatgtagaggtgctctgttttcttcaactggatttattgctgcatttctcagcataaacttatcccaggtattttttataaataaatatttttttgaactttcatatggaagaaagaaaaaacataaaaaaagaaagtg

SEQ ID NO: 24766 - DNA, 2103 bp, Homo sapiens
  misc_feature 1, 2100, 2103: n = A,T,C or G
nctggatgtcctgcgagggcttccgcgatctcttggttgggtcgcgtgcgctcggcacacgcggtctcagcggcctgtcttaggaggtatgctagagcgtgtggtcgcagtgactgccgcatcgtctggggttgttatcactgccccctaattttataattatccgccagtttgttcagcgcagaattgccggggtgaccccatagcgcggcagtgtttgttgccgcgccgcgtaattttctgtgttggctggggttccgcctctgttttcgccccgcggagggagggtgtgctctcccaagagatgccgacagggcgtttggtctctcggcccacgggtgggtttgcgcgcgccgtcgcttcggtgtttttgggcgcccctgtggggggcgcgtcctttgttaaaaaggtggggggggggaggtgtggggctccccccgccggggggttttttttgggcgggcgcgccgcccccgcttcttttttttgtgttgtttgttgtgtgtgtgtgttttttttgttggtttgtgttttttttgttgttgttggttgtgtgtttttgttgtttgtttttttttttttaggtttttttttaaatacatttattaaccaatgttaacacattaaatgaatctatatattgctagtcagagcagcttacaaaatgccagaatgcatcatagaactggacagccacaatgaataattacaatgtgcatagtggctaagctcaacacctcgatatagctttatgatttgcagaaaatttttaataatgattcctaaaacaatcaattgtaattttacctaaaacttttacaaaaccaggccacaatctctttttttaattttgtttttttttaaacacacagttttcacgctgtagtaacttggaaatgtgcaaccgtgtcaacagagacagaaaagccaaagtaacacgaatctcactttcatgcagctatcagttaaatattacatactctggaatgattttacaccaaaaatatttccacaattacttgctctcataggggtggatcgaagtcttaaaacttgaaaaacaatcaaagaaggttaagtgttctcggttctgacatctccatcagcgccacacactgtggcaacactgactaattacacagcaacaaggagggaacgatgatgccaagttactgcataatttaggtacattgtatgaaatggggctactgggtactttttacaaaatattgtgcaccatttggcagtagtttgtcaattaacttgtgtcaccaccatctgcaacagcatcaagattagatggatgatatttcacagaagacttagttacatttttatctttagagtgaccctgacaaacctggagaatactttttaaaaggcttttctcctgattctttcacttccattgtgagtaattgctttaataaatatcaaaggtctaaataaatatgtacaaattattctctaacctcaaaaaataactaaatgataaatgggaatttgacttggtctaagatcagtctttaaaaataccacataaattgtgagatattttaaaagaaaagtaatttaagttttcctggctgtattttatatatctatgtataaaaaatcattattcaactatcgatccattcctattggtaatgcttcttaatccagacattccgcaaaatacagactttttacaaatcacggcatctttaatacaagaaaattaacatgcattattcttcattctgtgtacagtgatggagttcattagtaggcaatgacccattactacaaacataacggcttctgtgaaacttaagtgctttctcttcttttagtattaacttacgatacatgaggtgacaccagataataggcagtgagatgatatgtgggaagggaagggaagcattaaacaaattcgtatgcctcatctataatttcacatatggataaaggtagtttttggctttgtttttgttgtttattttgttacaagcactcatgttaggacaaagatgaaatgtgcaaactttaaaatttaaatattcattttctctaagatccagctcagtaaaagattaccccagtccctgcaatttnaan

SEQ ID NO: 24767 - DNA, 2001 bp, Homo sapiens; identical to SEQ ID NO: 23410
  misc_feature 1, 2, 3, 2000, 2001: n = A,T,C or G

SEQ ID NO: 24768 - DNA, 3252 bp, Homo sapiens
ggagtcgacccacgcgtccggcgcaggaaacatggcggcggcgggtgttgtgagcgggaagattatatatgaacaagaaggagtatatattcactcatcttgtggaaagaccaatgaccaagacggcttgatttcaggaatattacgtgttttagaaaaggatgccgaagtaatagtggactggagaccattggatgatgcattagattcctctagtattctctatgctagaaaggactccagttcagttgtagaatggactcaggccccaaaagaaagaggtcatcgaggatcagaacatctgaacagttacgaagcagaatgggacatggttaatacagtttcatttaaaaggaaaccacataccaatggagatgctccaagtcatagaaatgggaaaagcaaatggtcattcctgttcagtttgacagacctgaaatcaatcaagcaaaacaaagagggtatgggctggtcctatttggtattctgtctaaaggatgacgtcgttctccctgctctacactttcatcaaggagatagcaaactactgattgaatctcttgaaaaatatgtggtattgtgtgaatctccacaggataaaagaacacttcttgtgaattgtcagaataagagtctttcacagtcttttgaaaatcttcttgatgagccagcatatggtttaatacaaaaaattaaaaaggacccttatacggcaactatgataggattttccaaagtcacaaactacatttttgacagtttgagaggcagcgatccctctacacatcaacgaccaccttcagaaatggcagattttcttagtgatgctattccaggtctaaagataaatcaacaagaagaaccaggatttgaagtcatcacaagaattgatttgggggaacgccctgttgttcaaaggagagaaccggtatcactggaagaatggactaagaacattgattctgaaggaagaattttaaatgtagataatatgaagcagatgatatttagagggggacttagtcatgcattgagaaagcaagcatggaaatttcttctgggttattttccctgggacagtaccaaggaggaaagaacccaattacaaaagcaaaaaactgatgaatacttcagaatgaaactgcagtggaaatccatcagccaggaacaagagaaaagaaattcgaggttaagagattatagaagtcttatcgaaaaagatgttaacagaacagatcgaacaaacaagttttatgaaggccaagataatccagggttgattttacttcatgacattttgatgacctactgtatgtatgattttgatttaggatatgttcaaggaatgagtgatttactttcccctcttttatatgtgatggaaaatgaagtggatgccttttggtgctttgcctcttacatggaccaaatgcatcagaattttgaagaacaaatgcaaggcatgaagacccagctaattcagctgagtaccttacttcgattgttagacagtggattttgcagttacttagaatctcaggactctggatacctttatttttgcttcaggtggcttttaatcagattcaaaagggaatttagttttctagatattcttcgattatgggaggtaatgtggaccgaactaccatgtacaaatttccatcttcttctctgttgtgctattctggaatcagaaaagcagcaaataatggaaaagcattatggcttcaatgaaatacttaagcatatcaatgaattgtccatgaaaattgatgtggaagatatactctgcaaggcagaagcaatttctctacagatggtaaaatgcaaggaattgccacaagcagtctgtgagatccttgggcttcaaggcagtgaagttacaacaccagattcagacgttggtgaagacgaaaatgttgtcatgactccttgtcctacatctgcatttcaaagtaatgccttgcctacactctctgccagtggagccagaaatgacagcccaacacagataccagtgtcctcagatgtctgcagattaacacctgcatgatcactgttcttgcttttttgggaagagacactttgttgcaaccctttttcaagtacttgaaagttgaaaatttgaaatcttggtattgatcatgctttaaggtttatgtaaagaaagtgtactgatgttcttacattaaagctttacaaagatttaaactaattatttttgtagttacttctaccaaatagcctttccttttcgataacattcctcagtatttttatagccaagtacattttattttcttgctgatgaactggaattggataaatattgcaagtggatgagttggaaattatgcactttgaaaaacattcactttgtttaagcttattgggtttcagatttgattaaattaaatgtggaggctttctatagcattctaagctgagaagtagattgttacccagtaatgaaataaaaaataaaaataaaaggatttttttctctattgtttacgacagtactcagcttaaatatttatgctggtcaaatgtgatttaaattggacattttcatcaatgcagtctaatgtgtagataaatatttcaaccataataagtggattggcagtatattttttacattgaacttttcttcacttgtatataaagattatatataagtacttatttatgagtataagaaaggttaggcatattttcattaactgaataaacgacttgatttatataacctggtttatcaaaatttaacatggcttcagtatgagatctttttcaaaactattttcttaaacatttatttcatgagattatgttcaaccctgtacctggtgtaattttaaaattaattgcttgtaacctcactttactaataatgtttattatctttcctaataatgcattaactgattaatcaggtgtttaaatttttataaaatactcttgcaaaaagtttatttgaaaaatttctagatggtctcatgagtttcaaaataataatttttgtgtatgaacaaagctgttgtttttaccatgcagtattgcatgattttaagttatgtggaattaacataactgattttgttttaattgtaagttgttaactcctgtatatatcattaaaataaatctcaagttgaacaaaaaaaaataaaaaagtcgacgcggccgcgaatttagtagtagtaggcggccgctctagaggatccaagcttacgtacgcgtgca

SEQ ID NO: 24769 - DNA, 1084 bp, Homo sapiens; identical to SEQ ID NO: 23881
  misc_feature 1, 2, 3, 1083, 1084: n = A,T,C or G

SEQ ID NO: 24770 - DNA, 1972 bp, Homo sapiens
  misc_feature 1, 2, 3, 4, 1972: n = A,T,C or G
nnnncacgggggttttttaatttataagagttaatatttgaaaacttttattttctcaaatgagcaccaacacagattggaaatatgacagaaacaatgcacttttctctaatactgaatcactatgtacaaatacaggaaaaggtgaagacaaattatttgaaaacaattacctttgttatagaagcaaagtgacctgaaaaatgccaccaaagaaaacaaaaacccaaacccaacaaatacagtttgtaaacacaagcataaatagacagattctgtattggaagatagtctctgcaggttgggaaagggaaccgactcccactgtcaccgaaatgttatacaaaaacatatgcgcagatagaatttggtaacatgagaatagctttcatagtttcttctaggctttaccttttctgccagatttcataactattttaatttttaaaaaagtaaatatctctttcctctatctagataactagcatattttctcatttgaggcagattcctttaaaatatgtaagttgattgtgttcaagatttgatttctcagcctctttctaaacctgaggcaatctgaccttaaaaaaaaaaagctgtttaccactaagatatgtgtattataatattaatgttcttttaatccaaaccagttaatgtttaacatgatgtggcttctaaaacagctggagccctgcgatacgtgattaatacactctcatctcagttagaagcacagatttgactctgctccatcttcacaaacaacacatctcctttacagtctgtaaaaactgagcacgcaaagcaagaaaaaggagcaaacccgcaacagctccatactcaaaacaaatcctcgtgggttctgctgttggtccactcagaaacagaaacaaccagagagaaagagaagaaaaactttatgcgcccgaggtgtaaactgtagttaaagtgtccccactcgagaaaacaggaggcacaatcgaaagtgctttttacacacgtgtgcgcgcacacgcacaactaaaaacgtgattctgatttgttggaaattcttccaacaggaagaatcactgtaagttgttactactaaattaacttggttttatttattttcttttctagccaatactgatgcaagaaaatatttcaattctcaacctgattaatgtactgcagagtctgttccactggggaaaaaatgcagagaggcattgcttcaaagccttgatccagattaaagtgatagagaccttaaaaaaaaaaaaaactgaaaacatgtattggtgatcactgtttcccttaaaatatacttcaagaaatgcaaaggaaaccatagaatttaaaaggaaaataaaaagtgctctcaggggatctgagaaaacagcaccaaatatattatttaaaaaattaaatattatttacaaaagtatattttacaagcaactgtttcttttatatatatccacttgaaaatctctttataaagggtcatctcttttgcacacactgatccaccagtaaaaatgcactctagcctatcctcgtgaactcaggaagaacactcagtcaggttcagctgacagcttgtgggtatcgagtttggctgtgtttggttcatgtcaaatcaatccatcagcagcctgagactaatgtcccgggtcccgaggggtctgggtctactccaaggtggccaaggtcatatgacctagggtggcacaggggagatggagctagagagtctgctggctggacttcagttccaaacgaaggcagctgctggctgaggtatagaacttcatgccttttcctttctcacgtccccttaccctgtctctactccccacaccccgcccccaaacttcaccaacaaactccaattcccccaacccacctggggtgaatgaatgaggtctttggttatgctctaagtcaataatttggtgaggaaattaaagaatgaactgan

SEQ ID NO: 24771 - DNA, 688 bp, Homo sapiens
  misc_feature 1, 2, 3, 4, 5, 6, 7, 8, 9, 10, 11, 12, 13, 14, 15, 16, 17,18, 19, 20, 21, 22, 23, 24, 25, 26, 27, 28, 29, 688: n = A,T,C or G
nnnnnnnnnnnnnnnnnnnnnnnnnnnnngctatatgacacctcaatgctgaatcagagactgattcaaatttcgattctaaaagactaccagagatacctgaatgtgtactactgacccaacaactgtgactagctggccacgccattcagggctggtgtggcatttatgtgtgtgtgtgtgtgtgtgtgtttttcctgtttgcccagcagtgcattgtgggttccaagagtgggtagtgtgtgtatgtgtgtgtgtcagggggagacctggcaggcacctctttgagagtagctgtggtcagagctgtttggtcagtgcattatgttgaatgaggtccaggaacccagagccacccagcagacaccactgtggcttgccagctgccaagatggagaagcatgtgcccctgtagagcgtctccccagaaccagaccccgagccactcgcttcctctgtgctgtgacaacattggtgccaggggagatggtgtttttcaaagggacctactgtagccactttaatttacaattaagagccttagtttgacttaacacttttgtaggcttttcatcgtgtatttttgtgtatgtgtgcatatagcagctactctgtagcagaggtgggtagagacacttaatagtatcatgtcgcatgcagatgtcacatcggcctctgcaaaaactgn

SEQ ID NO: 24772 - DNA, 3302 bp, Homo sapiens
  misc_feature 1, 2, 3, 4, 5, 6, 7, 8, 9, 10, 11, 12, 13, 14, 15, 16, 3301,3302: n = A,T,C or G
nnnnnnnnnnnnnnnnaggcagcatgacctctattttattgattgattgatggattgattgagacagagtttcactcttgttgcctaagctggagtgcaatggcacggtttcagctcactgcaacctcggtctcccaggttcaagcgattctcctgcctcacactcccaagcagctgggattacaggtacccgccaccatgccaagctaatttttgtatttttagtagagacggggtttcaccatgttggtcaggctggtctcaaactcctgacctcaggtgactgcccaccttggcctcccaaagtgctgggattataggtgtgagccaccacacccgaccagcatgacctttaaacacaattggacttaagacaaatttagtaaatgcagatttctgggggggaaggggggaatcttcttttaaaatgcccatatttagtgtaggtgaaatatactgcttataaactattgatattagccttgaagaagccattattggttcttagttgaataattaaagctttaaaaagtcttataaaatgcaggacctatttgttctttatacaaaatacttagtaattgaagtcaagtcaaaatattctcattagttcttttaaatcatcatgaagttctcttcatttaaaaaaaaaaagctgctaatttactacttttcttttttaaaaaaaaatacagctaactccataaatgaatatactataaaaagctgttaggtacaccttagccttcatcaaagtataaagtacacctcataaaagaagcatactgacacttttatgttcatcttaaaaaccagaaacttctaggaaatagcaacaatttgttttttaaaaagagtttggcaaaaaccatttctcttggacacccaaagaaagggaaaaaaaatttattaggtccaggaatcaaagatgacttgatagaattatgaatacatgcagaattggatggttagaaatgaaatcaatctatttaggtccagcctaaggttctgatagccaatcagtagacacaatcagagtagtagtattcctaagaaaccaggataaatctccaatgtgcatgagtttaatgaaccagatagattattgtatcgccaatatccacccttatcccattctcagtcagatgaattttcttgctcatgaggtccacattgaaaacagcatgctcagaaatgggggtcttctcggtgtactcctttcccaggacaggaactcgtcgaggccccaacagtggatcatcaaatctcatcagtttcactttggaaaggtctttaattcctcgattcattttcattaaacgcctgattatggaatcacagttatctccttgcctgatttcaattttggttgagaagtggccattggatggctggggattcaccagagaaacggacacaccaggttctattctaaaaacattaagtggtttcccaggacagcagtcttccctgattttatcttctgcttcggaggcaaacttgacttctatgtgttctagctcaagcgaattagtcagatagactatattctccataagcacagccttttcatcaaattctaattgcaaatccagaatacgaggccccatcttctccagattttccttaatcatggcaacaaatggcatgactttcttcatgtatttcttcagttctggcatactgcctagttcactagcaatgactttgttgtcaggcagttttccgttattggcctcaaagtgtttacgtagaacagacagggtggtatgttgccaaggtggatagttctttgccacatagatggtgcaatgtgagggcttctgcaggggttgtttgtcagtcttcttccctttagctggcatcatatagttcttgagtcgtagtctaaggtcatgtgttacttccataagatactgtgaggagtgtattaaaacttcattaacaggacctgccacaggccatgaagcattcataattgagtcaggctttcccaggagtgtccagatgtgctcacacaaatgtggacagaatggagcgaggagaagtgtctgaacttcaataaaccggaacacaagttctctgtgcatcccttccacagccaattcacggtacttatcttttgcggcctgaaactcaaaaaaccctgttttcaaagcttctttaaacatcatcttttcatagttttgatctgtttttataattcctgcattcaattcactggcaaaaactctatcattgaaagtgctggcaggaccacttcttaggctgtcccagttggcaaccatttctttcacccactctacccaggtgtacagacggagaatacctgcatctgccatggcttccacaaagttggcatcttctacagtgtcaccagcatcagccagagccaaacgcattccatctgctgaaaatttgtcaatagcttgggtcaaagtgaggaagttgcctgtggattttgacatcttctcagagttcaggaggagatgtccatttgctctcacagctgtaggccatttgtcactttgttccggccacatagccacatgattataaaggtaatatgaaagatgatttggaacaagatccttgccagagacgcgaagatcaacaggataccagaattcaaactcctgctttaactgatctaatttttcctttgcaatctgagtcttaggaaatggagcctccttgaagaaaacataatcccaaacttccttggtcatctgttgcggtctaatgcccagcggagactctgcctgtccatgcaagttacccccctgcaataggtgtgcaactgtgtaaaatgccatgtaaatagtggagtcagaaagtgattcaatcagccactgctcatcccaaggcaagtgagtgcctagaccataagttcttgagcaagcatgttcttgtagccaacctaaggtggcttcaaaattcctcctggtctcctcacagaatgtttccaggttcttcaagcactgagatgtctgtttcttccaattctcttctccataatccaagtaccactggtcacacagagccacaacacattcatctgacgacctggacatcacttgtttctctggttccatgtaaataagtgcatctccagcgtcaatcatctttttctgaatagtcttctttacatcttgaaccttctgtcctttaaatccatccaccaacatgataccctcataaaatccttttagatatatcttctcctttgcttctgcaagtttttcccggtcattctggctctgaattttcaactcatcacaaatggttacagcagaaagann

SEQ ID NO: 24773 - DNA, 237 bp, Homo sapiens
  misc_feature 236, 237: n = A,T,C or G
acgcgggcaatttctggcaatatattatagtaaatgcaaatgttcttgtttaaattttcataaaagtcaacaatgaaaagtttgctagtctctaaaaagctagaaaggacagctacaaataataatgcaggttgtctttatttagatgcaaagttaaaaatgtatgtataggtttttttaatagtaaatttctttaacttattttgaaactaaaatgtagtttctcagacagacann

SEQ ID NO: 24774 - DNA, 336 bp, Homo sapiens
aagagtttaggggcaggttatgcgagatggaaatggcgcagataacggagggaaggatttgagggctcaaacgtaggcgtctgtgtttcgcaaaagttggagacgttctaggctgcctctcgttgcctccatctcgctctgcgcgggttttggaggacattagcattctttcctgtatctccgttgattccagaatcgtccgcactaaagtcccctgcagcgtgaccatgtcgagaccccggaagaggctggctgggacttctggttcaggtgagctgcccctaggctgcacaaaggcagcccaagaaaaaacttttctcgaagagcctgtttagt

SEQ ID NO: 24775 - DNA, 829 bp, Homo sapiens; identical to SEQ ID NO: 24477
  misc_feature 1, 2, 3, 829: n = A,T,C or G

SEQ ID NO: 24776 - DNA, 1058 bp, Homo sapiens
  misc_feature 1, 2, 1053, 1054, 1055, 1056, 1057, 1058: n = A,T,C or G
nnccgacatacatctacatatagctatatagctcaatgggacttccacccccccccccttttttctatggtttgttgttgttgtagtagtctggtgctggccacatttaagtcttaaaaatttttaaattttgttgttgatgtttgtagacagccctgttgttgaaatcatggctttattcattttatttattttttaaacttgcctgaatttgttctaaaggaatatttaagagacataattttcttctctttaccataacattacacaaaactttttcctaaaacacggttgtgaggtactgatgaggtgtaagtggagctgttaaaaacagcagtgctgtattgtagttatgtatattcgtgtacagtatgtttagatcccaggtaaacatattcttttctgagaggataaatacctgcattcagatattccaggtaaatataattgagtcagggagtagtaaatctgatggagaattcactttggggaggggaaaaagaatagtatgcaagacccttattggcttttaattatacctgaaaccaaaatggatatttttagtctctctgcatgtgagatttggtgtaacaagatagaactataatatatacagtatatggaaggatagatatagtgctttgttcattttaattgcaaagctgccaaaatagttgaagcttaattacttgacttgccttgatttataggactggggcttggagaaaatgagcagatgttcctctaagacatcgattacagaagccttatatacatggatttgattttgtatttgtagctgaaagtcactgttgtctaaaactaacttttctaagttatcaaaacaacctaatttcttttccaacaaggagaacttaatggcatgaaggattgtgtgacacattggaaaagccagcttactgccactctcttcctttggccattataagagaagacgtcgaccttacaaggacgctctccacaccacctgcccacctcctcaacaaagtaacacctcaaaacacaagccccacctgcccaactcactactannnnnn

SEQ ID NO: 24777 - DNA, 1797 bp, Homo sapiens
  misc_feature 1, 2, 3, 4, 5, 6, 7, 8, 9, 10, 11, 12, 13, 1796, 1797: n = A,T,C or G
nnnnnnnnnnnnngaggcagagttttgctcttgttgcccaggctggagtgcaatggctcaatcttggctcactacaacctctatcacccaggttcaagtgattattctgcctcagcctcccaagtagctgggattacaggcatgtaccaccatgcccagctaattttgtatttttagtgaaggcagggattctccatgttgatcaggctggtctcgaactcctgacctccagtgatctgcctggtttgacctcccaaggtgctgagattacaggcgtgagccatcacgcccagccagttcttcaattcttacagtccctttccatgtcattaaagaactcacactggagagaaatcttatcaatgttagaattgtggtaaagctctctgttgttcccatttacatgaaagatgtgaacagtcacattgtagaaaaatgctgtgagagttgggaatctggaaccacttctttattatctcaggtcataatgaacttgtaagaattcacagtggcaggaaaccctatgtaaatggaaaatatgggaaaggcttcatttaatccataggactgataccacaaaactcccactaggagaaaacctatgtttatacggaatgtgggaaaatcttcacttatttctcaagccttaaagtgtatgtcaggattcccagtggagagaagccatattgatgtaaggaatgtgggaaagcccttgcctgccacttagtccttgataaacattttagaacacaaactggagagaaactatgaattcaaggattgtgggaaaacccttttatgttccacaagctttaatattcatatgcaatgtatgctggagaataacttgatgactataataagtggaatggcctaggtcagggatccccaaacccctgggccatggactggtactggtctgtggcctgctaggatccagggtgcacagcaggaggtgaatgtaggatgagcaaacattactgcctgagctcaactttctgtcagatcagcagtggcattagattctcataggagcatgaactttattgtgaactgcacatgcaagggatctaggttgcacactccttatgagaatctaatgcctgatgatctgaactggaacagtttaatccccaactccagtccgtgggaaaaatgtcttccacgaaactggtccctggtgccaaaaagttaggggaccactgatttagattatgtcacatgtcccatccactcattaacattaaggctttcatccctgggacctcaagataatggtggtatttagagatgtggttttttaaagaggtgattttaaaatgaggcagttagaatggggccctcattcaatatgactggtttccttataagaagtgaaagagataccagggtagcaggcacagaattttatgtgaagtgaccggaaatggttaccttcaaggcaaagagagattcctggaggagatccttcttttaaggctcattatagaggaaatcatccttatctacactttgatcctggacttccagcctcaaaaattatgagcaaataaatttctgttgtttaagccattaaaaaaaaattaatatacccgctccctttttgggcgcgccggccctgaaaaaatttttaaacaccccttcttggggccggggccctggttagtgaaaccgtggccaacggggtccaaagaaaccgggccaggactggggtggttttccccaaaaaaaacgccgggggccccgcggttgaccaaccgagggctcggggcttccggcttcacaggcccgggcgnn

SEQ ID NO: 24778 - DNA, 3049 bp, Homo sapiens; identical to SEQ ID NO: 23930
  misc_feature 3049: n = A,T,C or G

SEQ ID NO: 24779 - DNA, 4623 bp, Homo sapiens
cgtccgtgcagcctcctgcgccccgccgagctggcggatggagctgcgcagcgggagcgtgggcagccaggcggtggcgcggaggatggatggggacagccgagatggcggcggcggcaaggacgccaccgggtcggaggactacgagaacctgccgactagcgcctccgtgtccacccacatgacagcaggagcgatggccgggatcctggagcactcggtcatgtacccggtggactcggtgaagacacgaatgcagagtttgagtccagatcccaaagcccagtacacaagtatctacggagccctcaagaaaatcatgcggaccgaaggcttctggaggcccttgcgaggcgtcaacgtcatgatcatgggtgcagggccggcccatgccatgtattttgcctgctatgaaaacatgaaaaggactttaaatgacgttttccaccaccaaggaaacagccacctagccaacgggatagctgggagtatggccaccctgctccacgatgcggtaatgaatccagcagaagtggtgaagcagcgcttgcagatgtacaactcgcagcaccggtcagcaatcagctgcatccggacggtgtggaggaccgaggggttgggggccttctaccggagctacaccacgcagctgaccatgaacatccccttccagtccatccacttcatcacctatgagttcctgcaggagcaggtcaacccccaccggacctacaacccgcagtcccacatcatctcaggcgggctggccggggccctcgccgcggccgccacgacccccctggacgtctgtaagacccttctgaacactcaggagaacgtggccctctcgctggccaacatcagcggccggctgtcgggtatggccaatgccttccggacggtgtaccagctcaacggcctggccggctacttcaaaggcatccaggcgcgtgtcatctaccagatgccctccaccgccatttcttggtctgtctatgagttcttcaagtactttctcaccaagcgccagctggaaaatcgagctccatactaaaggaagggatcatagaatcttttcttaaagtcattctctgcctgcatccagccccttgccctctcctcacacgtagatcatttttttttttgcagggtgctgcctatgggccctctgctccccaatgccttagagagaggaggggacggcacggccgctcaccggaaggctgtgtgcggggacatccgaggtggtggtggacaggaaggacttgggaaggggagcgagaaattgctttttctcttcctccctgggcagaatgtagcttttctgcttcactgtggcagcctcctccctggatccttagatcccagaggagggaagaaaatttgcagtgactgaaaacagtaaaaaaaaaaaaatttatgtatataaaagttgcattacacagtacaaaatagatggataatgtttatcctttatttttctatgtagaagtttttgaatttgtgtgtgtgcttgtgcgtgtctacacctagtattacggctgggactctccagctgtttttgttgttgttatgtttttaagagggttgaattcttccatcaggtgaacgaaaaaggcaacaaagtaataaatcagtgaatgtggccggcagctgtgtttagcccctccagatggaagtttcacttgaatgtaaaataataaagtttatattttgaatttctcttttcatgggggaaaaaaggtacgttaaaaaaatcaaaataatgatatgtcacttgcagctaccttttttttttcttttaaattcaatcagccaccttcatgtgcctttttcctttgtctttccccaaaattccaggaccagagatctggccctggcctattttctcttgctgtgtacacacacgcacacatgctgggtggcaggatctcgcccgctggagggtggtggagcccagtagaattggggtgactgggcataaacctgctgagactgcttccttccctggttgtgagtgatgtgaatgcctgccttccccggtcagcacttagaagcccttgataggcagcatttggcgacttgtggggcaggtgtttgggataaatcctaccttcatcctaggacttatttctgcatcagccttttaactcaggcacttcaggtaacgtgatctatgtgtgttttgactgaatctcatctcctgtgtttccctgtgcagtctagggaagcatgtctccagtctttgtccctgtcttgtcccaaccattaattctcatgtcacagcttctcactgcatgtgacaagagccaggcctatctgctagggccctgcggctgaggtctgacctggaccctcatgcccgagtcggaagacccctctccagaagccattctgcatccttgtctgctctgcgtcacccgagaacacaggcttcgcagcctcgctttctgaaatggtgtgtgccgagtcagattgccgctcagagaaaatacaagcccgttttccctagctgtgccatttggtgctctgccaggctgccgtgcaagggaataccgacgagacgagctgcactgtctctgatttggagccctcaccggagcttgtctttaaaaatgagcaggaagctcatgtatgtttgcatttcagtgagccgggtcctgacctgccgccacccatcacggtcagcgtggtgcatcttaccgaggaggcgcaggcctggattcttttgagtggtgctactgcctaggaagtaacacgtggagaatttccatcttgggaccatgcacacagtgccttggggagtagattttgccctaatagcgatgaagaattttatcagtcagtggagttcctttttcagatcagggatgggaaagagccaaactgggtacctcccacgtgtgccccgtgaacagccctttgcagctgggctgtggggcttggctgctgccctgtcccatctggcagttaacgccttctccctgctctgccccccactccccaaaaccagttgcagcctcaacccacatggggatgtagaaagccgtaaagtccacgctgctgttgaaaatgtttacatctccgctctcaacctgccttgggttcgtgttaaatggtgttaaattctgcaaatggaggggaaaaaaatcaaattctaaatttcaaagtagaatttaaagcaaatttgtaaaaaaattatcctaccaccccttttggtccacttaagatatgccacgctgaagcaaggtatttcctactggattttgctttcactggtgtttagaaaataaacttgatttctctaggagcactcctttggttagagggatgcaagaaggagaggtgaaggtggcgtgtggtggctcatgcctgtaatcccagcactttggggaggccgaggcaggcggatcacttgaggccagcagtttgagaccagcctggccaacatgatgaaaccccatctctactaaaaatacaaaaaattagctgggcatggtggcaggcacctgtaatcccagttacttgggaggctgaggcaggagaattgcttgaacccaggaggtggaggttgcagtgagctgagattgtgccactgcacttcagcctgggcgacagagtgactctgtcaaaaaggaaaggcaaaaaccggaccctggagctctgtgggccctgattgcaggcccctccctgtgtgatgagggatgagtcagcttggggagccacttggccagcctgcatgcctggtcatcaggaggttgagaaaagccttgaaagttgtgaagcactgagcagatacaagtgtttgttaattttgtagaaattaactttcccatctggcctttatctccaaagttggtattgttgctccacgcagactgcagtccggtttcttattgtgactttgacaatgcaaagtgcaaaataggaagaggcctccccaccccactatcccaccctggtgaccaattcagtgtaaccattgcatgtactcagtcattggtgtctttggagtgacatctgcagccagttagtgccacctgagtacagcactcgtacttttacatgatgtgtgtgtgagtagctcttctgtccaaaccatgatttgaggttcaactacctgtagatcaaagctttattttagaacgataaactgattttttccaaatgggtgaaatcttctccccatgactatgttttcttaactttgcattgaatctatttactgggttacattctatgtgtagtttgctttcttcatttttttttcttttaaaatgctcatgtcttattccaagcaccttcctccaaagtccccataaagctgcatctccaacacattgttatgccaataaggttttatttaactttatttaaggatgattgtgtctttgaatgacaaatgtactgctgcttcctacctgcaagacgcacaatgtatgtttcaagggtgagcaagtgttatttcttaaatttctcaaatgcctgtagtaactattgtttctgcctctcaattgttgccagctctttgaagaaggggagaattgtgtgtttttgtgtggggatgtttctgatatgctgctacagttgcaaaacactggagctagagaaaataaagtactg

SEQ ID NO: 24780 - DNA, 884 bp, Homo sapiens; identical to SEQ ID NO: 23376
  misc_feature 1, 2, 3, 4, 5, 6, 7, 8, 9: n = A,T,C or G

SEQ ID NO: 24781 - DNA, 785 bp, Homo sapiens
  misc_feature 778, 779, 780, 781, 782, 783, 784, 785: n = A,T,C or G
acacaaggtgaaactgctccagtttttctcgtagcagggtcagcaggaaagcaagtggtgcccctggtcccatctcacacaggtgagactgcaccgagaggtaacgtggccctcacagcccaccacgcctggccttcgcccaattctgaaacttcgtaggatagagctggaaagtgccacatggtgaagcgagatccagctgtctgggtggatgtcggagtccataggctgagcagagatggttcttagtgaggttctcgctgccagttgacggtgaaatcatagctgccatttacattttgtgagattatgaaaaacataagactaaagaaactaaatggggtattcctgggggcacaaaaatggtgggttttccagatgggggggggaccaaaaaggaaaaacatttcatcttaaaaactttccttagacaaaggaaaacaaaaaaccatgctcctacaacttcaaatttttcttaccaaagaaaaatttaatattcgatgagaggttgaaccaggcttaaagcagacatactagggaatgggtgcagcctgtaagaatgccagtttgtaagtactgactttggaaaagatcatcgcctctatcagacacttagggtcctggtctggcaattttggcctgatgtgatgccacaagacccaacagagagagacacagagtccaggataatgttgacagtggtgtagccctttaggagaaatggcgctccctgcggctggtattaggttaccattggcaccgaaagaaccaggaggannnnnnnn

SEQ ID NO: 24782 - DNA, 4219 bp, Homo sapiens; identical to SEQ ID NO: 21865
  misc_feature 1, 2, 4211, 4212, 4213, 4214, 4215, 4216, 4217, 4218, 4219: n = A,T,C or G

SEQ ID NO: 24783 - DNA, 1776 bp, Homo sapiens
  misc_feature 1774, 1775, 1776: n = A,T,C or G
acgcggggaaaccacaaggggaagaaggaagttaaaagatgttaagtagtgggggccgggtacgcacgcggggctagcactctgacctagcagtcaacatgaaggctctcattgttctggggcttgtcctcctttctgttacggtccagggcaaggtctttgaaaggtgtgagttggccagaactctgaaaagattgggaatggatggctacaggggaatcagcctagcaaactggatgtgtttggccaaatgggagagtggttacaacacacgagctacaaactacaatgctggagacagaagcactgattatgggatatttcagatcaatagccgctactggtgtaatgatggcaaaaccccaggagcagttaatgcctgtcatttatcctgcagtgctttgctgcaagataacatcgctgatgctgtagcttgtgcaaagagggttgtccgtgatccacaaggcattagagcatgggtggcatggagaaatcgttgtcaaaacagagatgtccgtcagtatgttcaaggttgtggagtgtaactccagaattttccttcttcagctcattttgtctctctcacattaagggagtaggaattaagtgaaaggtcacactaccattatttccccttcaaacaaataatatttttacagaagcaggagcaaaatatggcctttcttctaagagatataatgttcactaatgtggttattttatattaagcctacaacatttttcagtttgcaaatagaactaatactggtgaaaatttacctaaaaccttggttatcaaatacatctccagtacattccgttctttttttttttgagacagtctcgctctgtcgcccaggctggagtgcagtggcgcaatctcggctcactgcaacctccacctcccgggttcacgccattctcctgcctcagcctcccgagtagctgggattacgggcgcccgccaccacgcccggctaattttttgtatttttagtagagacagggtttcaccgtgttagccaggatggtctcgatctcctgaccttgtgatccacccacctcggcctcccaaagtgctgggattacaggcgtgagccactgcgcccggccacattcagttcttatcaaagaaataacccagacttaatcttgaatgatacgattatgcccaatattaagtaaaaaatataagaaaaggttatcttaaatagatcttaggcaaaataccagctgatgaaggcatctgatgccttcatctgttcagtcatctccaaaaacagtaaaaataaccactttttgttgggcaatatgaaatttttaaaggagtagaataccaaatgatagaaacagactgcctgaattgagaattttgatttcttaaagtgtgtttctttctaaattgctgttccttaatttgattaatttaattcatgtattatgattaaatctgaggcagatgagcttacaagtattgaaataattactaattaatcacaaatgtgaagttatgcatgatgtaaaaaatacaaacattctaattaaaggctttgcaacacaaaaaaaaaaaaaaaaaaaaaccaaggggagcccggtcggcagtctcgtccaagttgactctagactcgagcaagcttacgctgggcccgagaattcaactcactgtggcaattcgcctattgtgagtcgtatacaattcactggcggcgtttaaacgtctgcagtggacaccgtgggtccacattatcgcgtagaataccctttcacagtggannn

SEQ ID NO: 24784 - DNA, 726 bp, Homo sapiens
  misc_feature 1, 2, 3, 13, 28, 719, 720, 721, 722, 723, 724, 725, 726: n = A,T,C or G
nnnatgaagtccncacagaatcctaaanaagccaagtaaactgggcacttaatattaaattttcctgtctaataaaaaggtgagggaggcaacatgattccattcaacagaattaaaatgcatgtgcaatgaaagaagacattttggaatgggatccatcagtgattggtgttccttcaattggaattgttgtccaaaagggcagtgggtagaggcaagtggcctttcccctttctgtggtaccgcccctgacagccacaggtggacactagtgcgagcctgtcgttctgccattggggctaactcaagctcaaatggcaattccaatcaagcggcaattgttgctccaagtgctatgttgagaggttctgaggctgtgtctaggctcagtaggaaagatacgatgctcaatacataatgttggtcttggtcttggaggtggtagatggtggtaagtggtagtataatatttcggcttctggctcagtgggaaaacaaaacatagcacactctactgcagagcagggcaggaattctatggattataaatattatgttctggagaattcagttccaggaagttcaagtgggactgttttaagaaaaggaaaaaaaaattgagacatgaggacattgaagaaaaaacccacgcgtcctttgatcaaaaaggatgcatttattcttaaaggatgccaatgttccacagtgggagaaggcannnnnnnn

SEQ ID NO: 24785 - DNA, 1937 bp, Homo sapiens
  misc_feature 1, 1819, 1835, 1922, 1926, 1932, 1934, 1935, 1936, 1937: n = A,T,C or G
ngacactgtatccggttttgaaagtgtgaaaagtgcagtaggtgaaagagagttctggatggtgttcctcaatgagacagattcccttctcagagtcccctggtatcctcagaaccttctcgggtttcagcatctcataattcatcctgttcagcacatcactcattcccaagtggaaatttatgcaaactctcttctgaccataatgccctcagagacgtgactgtcattccctaaccaggtgtatcagccccttggcccttgtccttgtaatttaacagctggagcctgtgatgttcgctgctgctgtgaccaggaatgctcatcaaatttaacaacgctgttcagacggtcctgcttcaccggcgtgtttggaggagacgtcaatcctccttttgatcagctctgctctgctgggacgacgacacgtggtgtccccgattggtttccctttctgtgtgtgcagtccccccttgccaacacacccttccttggttacttctatcatggtgctgtttcccccaaacaggactcttcctttgaagtatatgtggatactgacgcaaaagactttgcagactttggttacaaacaaggagatcccattatgactgtaaagaaggcatattttactattccgcaggtgtccctggctgggcagtgtatgcagaacgccccagtggcatttcttcacaattttgatgttaaatgcgttactaatttggaactataccaagaacgagatggtattatcaatgcgaagataaagaatgttgccttaggaggcatagttacaccaaaagtgatctatgaggaagcaactgacctagacaaattcatcaccaatacagaaactcctttaaataacggatcaacccctagaattgtgaatgtggaagaacattatattttcaaatggaataataataccatcagtgaaataaatgttaaaatttttagggcagagattaatgcccaccagaaagggataatgacacagagatttgtagtaaaatttttaagctataatagtggtaatgaagaagaattatctggaaatccaggttaccaacttggcaagcctgtccgagctctaaatatcaacaggatgaataatgtcacgactttacatctttggcaatcggctggaaggggtctgtgtacatcagcaactttcaaacccattttatttggagaaaatgtactctctggatgcctgttagaagtcgggattaatgaaaattgtactcagctcagggagaatgctgttgaaagacttgattcattaatacaagcgactcacgttgcaatgagaggcaactccgattacgctgatcttagtgatggctggctcgaaataatacgtgtagatgcccctgatccaggtgcagacccgctggctagcagtgtgaacggcatgtgcctggatattcctgctcacctgagcatccgcatcctcatctcggatgctggcgcggtggaagggattactcagcaggagatactcggtgtagagacaaggttctcctcagtgaactggcagtaccagtgtgggcttacctgtgagcacaaggccgaccttctccctatcagtgcatccgtccagtttattaaaattcctgcacagttaccccaccccctgacaagattccaagatcaattatacagagtatgactgcaacagaaatgaggtgtgttgggccgcagcttctatatccatggactcagtattatcaagggggagctgcattctcagtgtgttgctaaagggcttacgggttgcctgttggttcctcacattgggccttggttcctcaanaaacccctgggaccangaatatgcaaagcctaatagttagacaaccaacctgggctttttaatttttttgagaatgggagttttgccccttgggtggcccaangccngaaatngnnnn

SEQ ID NO: 24786 - DNA, 874 bp, Homo sapiens
  misc_feature 1, 873, 874: n = A,T,C or G
ngccgtcgcggttgttggccatccagtgccttccgcagcgccgctaaagcgcagttctcgttggtgtaactttttcttttttttttcagccacttccggctcctgcgtcgctccggaagcctgcgagttccggaagccttggtaatccagattcggctaggaaaagacaagctttccagagaatgtttcagagaaagttacgtggagcgtgggcgtttcgcagactcctaagtggtctggaacctaacctgcagtgtctctgagcttctggcaagtatgaggcaaggatttcacagaagaacttggagcaaaaattcccactgtcatagctataggctgtccagtcttgagggagctgcaggaacaggaaaaagagaccttcagagaagacatggcttccagaaaagagaatgcgaagagtgcaaacagagtgctaagaataagccagttggatgcacttgaactaaacaaggccctggagcagctagtttggtcccagtttactcagtgctttcatggatttaaacctgggctgttagctcgctttgagccagaggtgaaagcgtgcttatgggttttcttgtggagattcaccatctactccacaaatgcccagggacgtcgtggaatataagtacaaacatggttttccgctaacttggatataagcacccgtaaaatccacaattggtttccgtttcaattggggcaggttaaaaagaggtaatggtggaccccttgttttggagtcgcggttcagttgtagactgaaacgggggaacatagactcggaggggacatagagctcatgtttctgaaccccgtcggtgtaagacttggcagtcactgtagggttgtgttcataaggagtcnn

SEQ ID NO: 24787 - DNA, 3595 bp, Homo sapiens; identical to SEQ ID NO: 22463
  misc_feature 1, 2, 3, 4, 5, 6, 7, 8, 9, 10, 11, 3592, 3593, 3594, 3595: n = A,T,C or G

SEQ ID NO: 24788 - DNA, 3244 bp, Homo sapiens; identical to SEQ ID NO: 23095
  misc_feature 1, 2988, 3242, 3243, 3244: n = A,T,C or G

SEQ ID NO: 24789 - DNA, 1802 bp, Homo sapiens
  misc_feature 1799, 1800, 1801, 1802: n = A,T,C or G
tatagggagtcgacccacgcgtccggccccacccctcggcgtgccctccccttcacttcccccaccccctgtcccctcccttccctcccttcccccccgtggcgaggcagcagcgacggcggcggcggcagcggcggtcgcggctgaggctgaggaggaggcggcggcggcgggcggggctcggctcgggctccgcgggcgggcgggcggacatggcggccaacatgtaccgggtcggagattatgtctactttgagaattcctccagcaacccatacctaataagaaggatagaagaactcaacaagactgcaagtggcaacgtggaagcaaaagtagtatgcttttatagacgacgtgatatttccaacacacttataatgctcgcagataagcatgctaaagaaattgaggaagaatctgaaacaacagttgaggctgacttgaccgataagcagaaacatcagttgaaacatagggaactctttttgtcacgccagtatgaatctctgcccgcaacacatatcaggggaaagtgcagtgttgcccttctgaatgagacagaatcagtattgtcatatcttgataaggaggataccttcttctactcattggtctatgacccctcattgaaaacactattagctgacaaaggtgaaatcagagtgggacctagatatcaagcagacattccagaaatgctgttagaaggagaatcagatgagagggaacaatcaaaattggaagttaaagtttgggatccaaatagcccacttacggatcgacagattgaccagtttttagttgtagcacgtgctgttgggacattcgccagagccctggattgcagcagttctgtgaggcagcctagtttgcatatgagtgctgctgcagcttcccgagacatcaccttgtttcacgctatggatacattgtatagacacagctatgatttgagcagtgccattagtgtcttagtaccactcggaggacctgttttatgcagagatgaaatggaggaatggtcagcctctgaagctagcttatttgaagaggcactggaaaaatatggcaaagacttcaatgacatacggcaagattttcttccttggaaatcattgactagcatcattgaatattattacatgtggaaaactactgacagatatgtgcaacagaaacgtctaaaagcagcagaagctgagagtaaactgaaacaagtatatatcccaacctacagcaaaccaaatcccaaccaaatatccactagtaatgggaagcctggtgctgtgaatggagctgtggggaccacgttccagcctcagaatcctctcttagggagagcctgtgagagctgctatgctacacagtctcaccagtggtattcttggggcccacctaatatgcagtgtagattatgtgcaatttgttggctttattggaaaaaatatggaggcttgaaaatgcccacccagtcagaagaagagaagttatctcctagcccaactacagaggaccctcgtgttagaagtcacgtgtcccgccaggccatgcagggaatgccagtccgaaacactgggagtccaaagtctgcagtgaagacccgccaagctttcttccttcatactacatatttcacaaaatttgctcgtcaggtctgcaaaaataccctccggctgcggcaggcagcaagacggccgtttgttgctattaattatgctgccattagggcaaatgttatctattatgtggtcaaattcacaccttggggggaccaatcggcaaaagggcgtaaatcnnnn

SEQ ID NO: 24790 - DNA, 2256 bp, Homo sapiens; identical to SEQ ID NO: 22505

SEQ ID NO: 24791 - DNA, 839 bp, Homo sapiens
  misc_feature 837, 838, 839: n = A,T,C or G
atattattccttctgaaactgatgtttagctcaaagcagttgcatttgtactgtgctagttagaattttcatcagttgaggcagtagctcagtagaactctaatcatcaaggctttttatttaagaattttgccttatgttttaatatgagtgtactttatctgttccaggcttatgtgataatcataggtactttataatgagtccacctctgaaatttttctttctgaattctatctcactttattatttcagtgataccaaaagacatcaatgtcacagtagtgatatacttatgtattagttatggaaattccacaggagttcaaggtcattatcactataattattttcctgactaaagccataaaggtgatttaggcaattattgtcatcttagctagtcctgttttatagcttatattcagcagacagctgtatgggaaggtaaatatgttgacaatgtccacaaagcctttatttatttatttatttgatctctgcatgtcctcgtagtaactggtctcatacttgacctggtcatctggtttaagacagaccaagtgtatgctcacggagctgaaatgcattagtcagttgtgcaatgaggagatgatggatgagaatatatagctcctatttattgcgcatctaatatataatctctactggacctttacagatgtatttaacatctttacaacaacttttcagggtaggtgttaccggcttcatcttacatatacagatactggcgctcagataaaccaagtaacttacctgtccctttggagtgggccttgagttgagatcaaacgggattcagtacgtctgacnnn

SEQ ID NO: 24792 - DNA, 2859 bp, Homo sapiens; identical to SEQ ID NO: 23222
  misc_feature 1, 2, 3, 4, 5, 2836, 2843, 2859: n = A,T,C or G

SEQ ID NO: 24793 - DNA, 1592 bp, Homo sapiens
  misc_feature 1, 31, 1590, 1591, 1592: n = A,T,C or G
nccggggctgggtgaaaccatataatcacanaaaacattgccttcagcatgttcagttcgcagcactgagggcactcttgagggtgcaatcaatatataacttagtgctagctagcgccacagactctagtagataatattatcatcataatggctggtgaaaccatataatcacagaaaaacattgccttcagcatgttcagttcgcagcactgagggcactcttgagggtgttgttaatgaagatttaatttttaaatacaggtggttccaagctttcaaataggttatgctccaaaagtgttatttgtaagttaatttttttacaagtcaaacaatgttggaagtggtatttaggttctagatcggtccacgaaagttagcccatatgtatatcttgaatagtataggggagggtattcataaagtccttatgtggttttaactaagtgaaattatggacaagagaaataattgtaaaatcgtcttaaaggaaaatttaatttttactcctgtttatgggacattcgttctattaactgtcagacacaatttctgttttcatctgagagccagttttcctttatttctacatctaaaataagaacatattgtacactattatataatacagaattgtcttaaactttaataaattcgcattttaaaggtgtttacagattattttttatatctgtagctgaatttgttaaagtctaaaaagctcaaggactttatgaagatctcattatatgaggaaaatcataggttaccattttataactctattgccataagaaaatacactctaaaatcttgatttgaaacatattagaaaccttgattcagtgctcagtggtctcctagtaagaagtcaccgacggtagcgtcatatgagaagaaagaaatccccaccacctcaacctctgctgagattgtgtgctaggaacagccttccctccgtttcccctcagtcaaacttgagccagcctctggatcgatgtgatcttattgcatgtttccatggggtgtacctatactttaagccaatcctgctgcattcactgctaagttaaataaaaagccaagaagattttgcactgtgcagatcctttgctatctgacttgcatctcttcccccacctgtcagctagccacctgcttgtttgtgttgggatattttttagcacctgaagcaccatctgaaaggggcaccattttcttcttccctttgatctcacatatgctccctaaaaatccttaagttgtcaatctgatccccagtgtgaggttaatgagcaaaattggtctttggggccctttttgtccaagccccactgaaaggcctcttcagaaaactattatctttaaagccctactttaactccttaattccagcatacagctaaaactggatgtatattctggcaagtaaaggctgaggactcctctttaatcctcagatctagataactcatgacattttatttgaccaacatagcacatgatgagatatcagggtaatacacaaggtgggtgcaaacaacactatctgggtaactgacaggtagcaacaatacaactcatgannn

SEQ ID NO: 24794 - DNA, 1040 bp, Homo sapiens
aaaccccgccagttgattgtatacggctccctatagggggaattgggccagtgagccgaattcgggccgcatgcataagcctgccgagtctaaagccgaggccaggcggccggcatggtttgtgagggaggaggtgttgtttccttgttgtgagtgtgggtgaggggtaggggggttgttttatttgaaagatcacacatataagtatttgttgcctgtgaatagatacagagaaaccaagtacaaatgtgcattaacaattcagtgacgtagctgtggatctctggatggctatgtaagctgtgagaaagtcccactggctttgcacttgctgcgcaccagaggtgaccatccaggcggtatcaacctgaagagggggtgaatcccagcagctgctcgatgggcttaaaccgccactcgtcagcctccagctcttctaccaaaccagctagtttttccatccgagcaacttgctgatcatgtttcacctgtttaagcgtggatgccacttgatagctaaaaacagattcgcagaggaatctctcagagccatctcagcggctttagcactttcccctacagccccacccccaggaccagcctgagtggctgcgctcaccacgacgaggaccgcggcgtgttccccgcgtactgtgatggggtcatcaaattattaatctgaaaatagcaacccagaatgtaaaaaagaaaaaactggggggaaaaagaccaggtctacagtgatagagcaaagcatcaaagaatctttaagggaggtttaaaaaaaaaaaaaaaaaaaaagatgggtggcctctgccttggtgatcctgagtccagaagggtacacaatggtgatttatatggagatgtcactcaccttagacaaccagaggcgggcatggaggctaccctccaacacagggcattctcagatgcctcagaaggcatcagtattgtcactcgggcccctttaaggagcaactccgggaagaggcaggagggaggggggcttggctgtggtggggacatggcaatcaagc

SEQ ID NO: 24795 - DNA, 1039 bp, Homo sapiens
acgcggggagtggtgtgtgagagccaggcgtccctctgcctgcccactcagtggcaacacccgggagctgttttgtcctttgtggagcctcagcagttccctctttcagaactcactgccaagagccctgaacaggagccaccatgcagtgcttcagcttcattaagaccatgatgatcctcttcaatttgctcatctttctgtgtggtgcagccctgttggcagtgggcatctgggtgtcaatcgatggggcatcctttctgaagatcttcgggccactgtcgtccagtgccatgcagtttgtcaacgtgggctacttcctcatcgcagccggcgttgtggtctttgctcttggtttcctgggctgctatggtgctaagactgagagcaagtgtgccctcgtgacggtgtgtgaaacccagctccacaggctgatgaccaagagtcccctcgcctttgacaccaggccctgggattcccaaaccctgctttggacccccctaggctcaggcttctgtctcacttttccgggggggggattagggcaaggagggcatgagggactgtctctccctaaaacccagacccctgttccccactcagttcttcttcatcctcctcctcatcttcattgctgaggttgcagctgctgtggtcgccttggtgtacaccacaatggctgagcacttcctgacgttgctggtagtgcctgccatcaagaaagattatggttcccaggaagacttcactcaagtgtggaacaccaccatgaaagggctcaagtgctgtggcttcaccaactatacggattttgaggactcaccctacttcaaagagaacagtgcctttcccccattctgttgcaatgacaacgtcaccaacacagccaatgaaacctgcaccaagcaaaaggctcacgaccaaaaagtagaggtgtgggctggcatgagtgggtggggactgttttcatggcctcagagtggcaaacggggatgggagtagggcagctgccaactataaatgctcttttctcttcctg

SEQ ID NO: 24796 - DNA, 532 bp, Homo sapiens
  misc_feature 519, 520, 521, 522, 523, 524, 525, 526, 527, 528, 529, 530,531, 532: n = A,T,C or G
acccatggtgcatctttcctggaatatggcacgaaatatcaaagtctcagatccaaagctttttgaaatgattaagtattgtcttttgaagattctgaagcaatatcagacattgagagaagctcttgttgcagcaggaaaagaggttatatggcatgggcggacaaatgatgaaccagctcattactgtagcatttgtgaggtggaggtttttaatctgctttttgtcactaatgaaagctatactcaaaaaacctacatagtaccagtcaaacgtcactcagatgcagtcttcactgacaactatacccgccttagaaaacaaatggctgtaaagaaatatttgaactcaattctgaatggaaagaggagcagtgagggagaatctcccgactttccaaaagagttagaaaaatgatgaaaaagacctttggagcaaagctgatgacaactttccagtgaattcttgaaggaaaatgatacgcaacataattaaattttgagttctacataagtaannnnnnnnnnnnnn

SEQ ID NO: 24797 - DNA, 1392 bp, Homo sapiens
  misc_feature 1, 2, 3, 4, 5, 6, 1262, 1263, 1264, 1265, 1266, 1267, 1268,1269, 1270, 1271, 1272, 1273, 1274, 1275, 1276, 1277, 1278,1279, 1280, 1281, 1282, 1283, 1284, 1285, 1286, 1287, 1288,1289, 1290, 1291, 1292, 1293, 1294, 1295, 1296, 1297: n = A,T,C or G
  misc_feature 1298, 1299, 1300, 1301, 1302, 1303, 1304, 1305, 1306, 1307,1308, 1309, 1310, 1311, 1312, 1313, 1314, 1315, 1316, 1317,1318, 1319, 1320, 1321, 1322, 1323, 1324, 1325, 1326, 1327,1328, 1329, 1330, 1331, 1332, 1333, 1334, 1335, 1336: n = A,T,C or G
  misc_feature 1337, 1338, 1339, 1340, 1341, 1342, 1343, 1344, 1345, 1346,1347, 1348, 1349, 1350, 1351, 1352, 1353, 1354, 1355, 1356,1357, 1358, 1359, 1360, 1361, 1362, 1363, 1364, 1365, 1366,1367, 1368, 1369, 1370, 1371, 1372, 1373, 1374, 1375: n = A,T,C or G
  misc_feature 1376, 1377, 1378, 1379, 1380, 1381, 1382, 1383, 1384, 1385,1386, 1387, 1388, 1389, 1390, 1391, 1392: n = A,T,C or G
nnnnnnaatatacctctaaattgtttgaagttggtcccagcagcataaaatgggttggccccaaagggttggagggtgggcttggtttaattttttaatttttttttttaataggggtgggagggagggtactttgccccaaaagggcagggtgtctgcactaaggatttagaaacactttggaagctcataacctcatcagaaactgcctttagccacactcctgaccttctagatgagtaacaaaaaaatgaaataagttcttggaaattaagccatttattttaatttgctatttttttcaatgttctaggtatctttaaatttgttattgtggaatcattttcctgccagatacctttatcaaaattattggcctcatgagagctgaagtaagtcagctttttggtgaactttagtggacttctgtgagattgtagttgtactttgtatctctaaatctaaagatagttttttaaaactcccaaagaaaatctgctctcctttctgatctaaaaactcatctttggggtaaagagttaagtgtccaaaggttgtcacagttcatgaggtcagagggagctagcctggcacctggactctgcccatccacagctgacagattccaacagaagtgtatttaaattctccagtagacaatgctgggtaagggagggggtagggctgggttattaagatacaggctgctgtattttacattggttgtgggggaaggggagcctggagaaaacaaagtcactattcccttttttgaaacaggaaaaaaaattattttttgttcagtaaaaatggtagagaattccaatgtccctagccacaagggaccagttccactgagaagtgaacagtgggaactcaaaatttcagaaacattgggggaagggaaaattggctttctcttaattggcagatgttccagtggggggggggggctctgtttttgttgggatgtgttatgttgtatgtacgcatatatggaccggagtctgctgagtttataaggttccaaaaatatggtaaaatcttggtttttgttaatttatctcaataaaagcccactggaactccaaaaaaaaaaaaaaaaaaaaaaagaaagaaagaaaaaaagaagagaaaagaagaaggagaaaaaagaaggggagaaaaaaaacaaatggggggggcaaaaaaaaagtgggggggaagaaagatataaaggtggagggtacaaaccggggggtagtgtattagagttatatgannnnnnnnnnnnnnnnnnnnnnnnnnnnnnnnnnnnnnnnnnnnnnnnnnnnnnnnnnnnnnnnnnnnnnnnnnnnnnnnnnnnnnnnnnnnnnnnnnnnnnnnnnnnnnnnnnnnnnnnnnnnnnnnnnn

SEQ ID NO: 24798 - DNA, 1130 bp, Homo sapiens
  misc_feature 1130: n = A,T,C or G
ctatagggagtcacccacgcgtccgggcggagctccttgttaacgacatccccaacctctgctaacgcgcaggcgcacttcctgaagctgaaggtcagcatagacaaagggcctcagaatcgcgcaggcgcaattgtgccctggttcgccaagatgtcgttcccaaagtataagccgtcgagcctgcgcactctgcctgagaccctcgacccagccgaatacaacatatctccggaaacccggcgggcgcaagccgagcggttggccataagagcccagctgaaacgagagtacctgcttcagtacaacgatcccaaccgccgagggctcatcgaaaatcctgccttgcttcgttgggcctatgcaagaacaataaatgtctatcctaatttcagacccactcctaaaaactcactcatgggagctctgtgtggatttgggcccctcatcttcatttattatattatcaaaactgagagggataggaaagaaaaacttatccaggaaggaaaattggatcgaacatttcacctctcatattaagtctggcaatgatgactatatgtattcctgcctaaataaatcattctaatcaactcattttacgcaccaagcaacacaccgtcagaagcagagacccagcgcagtcccaacacactcacaaccacacaacaccaattgctttgggccggccctcgccggcccatcgaaaaaagttttatcaacccacttcttgttgagtggtgggcgcccacacacagttgtgtcagtcacgaacaggttagtatctgggtttccaacagaacacctcgggtgctacggcacttgctgctgctgctccccaaacaaaaaacaggctgaggaacccgagttctttgaaacaaccacacaggcgcttgcgacgtaccgggctacacagggcccacaggcgctaataattcactcaccccgcgggggaacgcaacagccagaggaccacgacaacaaagccgagcagtgacgagcagcacgacgagccaagtacgaccagcaccgaccacctacccacagtagagctcagccaacgcacgacccacagcagacgcagacaacgatagccgaccatactagaccgatgacgtctcgaacgn

SEQ ID NO: 24799 - DNA, 2727 bp, Homo sapiens
  misc_feature 1, 2, 3, 2720, 2721, 2722, 2723, 2724, 2725, 2726, 2727: n = A,T,C or G
nnncgcagtcccgcgttccctcggcggctgccggcgtagtgagcccgccgccgtggagtgtagcggaaagggctcgccgtcctcctccgtttctcgctgcttcgggacgcgctctctgcggctctgtgagcgcccctgagcgccggcagcggccgcggtgggttcttcaggttatcttatgatgaggcttttgctatggctaatgatcccttggaaggcttccatgaagtaaaccttgcttcacctacttctccggaccttcttggtgtgtatgaatcaggaactcaagagcagactacctcaccaagtgtcatctaccggccacacccttcagctttatcctctgtacctatccaggcaaatgcattagatgtttctgaacttcctacacaacccgtgtattcatcccccagacgtttaaattgtgcggaaatatctagtatcagctttcatgttacagacccagccccttgctctacctctggagtcacagctggattaactaaattaactacaagaaaggacaactataatgcagagagagagtttttacagggtgctactataacagaggcttgcgatggcagtgatgatatttttgggttgagtactgatagtctgtctcgtttacgaagcccatctgttttggaagttagagaaaagggctatgaacgattaaaagaagaactcgcaaaagctcagagggaactgaagttaaaagatgaagaatgtgagaggctttcaaaagtgcgagatcaacttggacaggaattggaagaactcacagctagtctatttgaggaagctcataaaatggtgagagaagcaaatatcaagcaggcaacagcagaaaaacagctaaaagaagcacaaggaaaaattgatgtacttcaagctgaagtagctgcattgaagacacttgtattgtccagttctccaacatcacctacgcaggagcctttgccaggtggaaagacaccttttaaaaaggggcatacaagaaataaaagcacaagcagtgctatgagtggcagtcatcaggacctcagtgtgatacagccaattgtaaaagactgcaaagaggctgacttatccttgtataatgaattccgattgtggaaggatgagcccacaatggacaggacgtgtcctttcttagacaaaatctaccaggaagatatctttccatgtttaacattctcaaaaagtgagttggcttcagctgttctggaggctgtggaaaacaatactctaagcattgaaccagtgggattacaacctatccggtttgtgaaagcttctgcagttgaatgcggaggaccaaaaaaatgtgctctcactggccagagtaagtcctgtaaacacagaattaaattaggggactcaagcaactattattatatttctcctttttgcagatacaggatcacttctgtatgtaacttttttacatacattcgatacattcagcagggactcgtgaaacagcaggatgttgatcagatgttttgggaggttatgcagttgagaaaagagatgtcattggcaaagctgggttatttcaaagaggaactctgatgctctgcgtgggaccatgcctgaactccccgaataactgaaaaatggctgaatatttttatggttacttgatatttatttccaaggagtgagcctaagacttttttccccttttgcaaattgctctaagaagtaccatgatttcttttaaactgatctatgctgtgtttgcttattctttagttgaacacactatgaagaattccaggtgtactagtgaatgtaatttatagttgccaaaaaaaaaaaaacctgaaataaataaatgttagattgaatgtgtgtacattttctcttctagctctgacatggcatttagggttagcagaatgtattaaatagtaattttcaaactacacagtagcttccttccttgtgagaggcaagaaagaagtctgagtggatagtactcactttccaaggcccccacctctagaatggctttatttttatctgttttctatattgggtttcaaaaaagattttatttgaagaaatacttctgctgctacaaagtttgaaagttactattttaattattctgctctctgtaactgaaagaatccctttatttggttattcattaaaatataatagaaggcagtcagattttatcccagagatgtattcctgagtgtcttgatatagtgtattcatgttttatatgtgttgaccactatattgtcattggagggacatagatgtaaatgagtttgacgtgtgtcaaaggtgtttaaaggggtgtggacttgaatgaatggtacgtgcgaagtatatgctgattaatagaaccacttgatctctgcattccaaattgtaaaactgactcaactggagaaattataaccaagaggttgtggtagacatgtaatagtatgaaaacgcacacagaaacgagaaactggcttagttcctgttagagaacgctgctggtactaatttgtggtagtacgctttcgcgttcagatattcctacttacatatgcctattggaacacaagtagcgctttttggtttaaactaacatcaatttttcccggttacctaaaatcaaccccgttcgacatccacatcaagcgcgggaccgggctcgctcgcattcggggcgctccttgccccacggatcgggcggcaggccatcnnnnnnnn

SEQ ID NO: 24800 - DNA, 2468 bp, Homo sapiens
  misc_feature 1, 2, 3, 4, 2438, 2440, 2461, 2468: n = A,T,C or G
nnnnggccctcgaggccaagaattcggcacgagggaaaatatatatggaacaacagacagatgaagtcttgctgaaataactgaaaaagatgtaaacattattggaaccaaaccaagtaacttccgtgaccctaaaactgataacatttgtgaagggtttgaaaacccctgcaaagataaaattgatactgaggaactggaaggtgaattagagtgccatctggttgacaaagcagagtttgatgataaatacctgattacaggatttaacacattactaccacatgctaatgaaacaaaggagatactagaactgaattcacttgaggtgccgctttctcctgatgatgaatcaaaagaattcttagaactggaatctattgagttacagaattctctggtggtggacgcgcgtcttggggagctaagcccggtgccaccgaatgtgccactctcccaagagtgtgtcacaaaaggcgccatggagctatttacactgcagcttcctctcagctgtgaagctgagaaacagccagaactagaactacctacagcccagctgcctttagatgacaagatggatcctttgtctttaggagttagtcagaaagcacaggaatccatgtgtactgaggacatgagaaagtcaagttgtgtagaatcttttgatgaccagcgcgcaggatgtcattgcatctacatggagcagattgtgatcctaaaacacagaatgaaatgaatatatgtgaagaagaatttgtagagtataaaaacagggatgccatttcggcattgatgcctttgttctctgaggaagaaagcagtgatggaagcaagcacaataatggtttaccagatcatatctcagctcaactacagaacacctacactctgaaagcctttactgttggatctaaatgtgttgtgtggtcaagtctaagaaacacatggtctaaatgtgagattttagaaacagctgaagaaggaacaagggttttgaacctttcaaatggtatggaggagatagtgaaccctgagaatgtctggaatggcatacccaaattggataagagtccacctgagaaaaggggtttggaggtgatggagatttaaccgtggatctatagctgtggccaatcagtcagaagctgcccttgaaacaagtggcatcttacgcagaccaacagagtatttgagaaaattgaaaacatgtaaccacaagaagttgtcattttcaaaaacttctatataggtggaaaacaaattaggtctcaggttgatggtggggtgtgtttatagtgatcctgttatatatacagatctgggatctttcgtctttattgtcttacgtttctaattagttgggaggatttattttgctaaacagtttactaacacattacatttcaaaaactattttggtacctttcaaatacagtgtttaaattaaaatagaaaaataagggctcatgacaagtacattatttgattctacttaggatagctttttagcaggatctccttcagaatttttgtcttgactttgaatctttgcctgtttgtctaaacatttgactaacattctgtttgaatttggaagtattctaatacaagatttgaataaagtttatccttaaataaagtttatccttaatatgatggtctcattttattaaaaaggaaatagaactcttaaatatacttggttccatctctcctctgtaatggaggattggggaaagcatagtaatattaaatgttagctcttatgtattagtcacttagcttatactttaaatgcattttttcactttattcatcaactttgaagtgcatatcaatattatccatattttataggtgagaaaattgaagcttcataaagaggttaaataacttgcctaaggtcagatagctgatgagtctcagaggcttgatcaaacccagacctacctaactttgaagcccatgactttttaaacatgactttgcaaagcatagatcttagcttttagaaacagatctgagctatatgctgcttaacagatatgtgacatgggcaaattatgtaatattttgaactttgatcttcatctgtaaagtggtgataataaaacctttcttgcagtgtttttttaagatgagaaataattgatataaagtccctgaaaaggggtaggcatttgataaatgtgtctttctttaccctgaaaaatactcagtgtgcactatgttaggttatttctttttaaccttaacttattagatattttcaatagttattttctcctttcagcatcagcatgcgccatcaacaaaagactgtaaaaaacaaacaaacaaaaaagtgttgaatgggacatccatacagttggaatgcttatttctaaaatgaatagggaaaaggtttgttaaatgagactggggtaaaggtgttntnctgtgaagcattatcagactntgaagcn

SEQ ID NO: 24801 - DNA, 1844 bp, Homo sapiens
  misc_feature 1, 2, 1821, 1822, 1823, 1824, 1825, 1826, 1827, 1828, 1829,1830, 1831, 1832, 1833, 1834, 1835, 1836, 1837, 1838, 1839,1840, 1841, 1842, 1843, 1844: n = A,T,C or G
nncgtctgataaggggaagctgtgacgcagacacgcacagtaatacacagatggaggctcaaaagacacgagtttcgcgtcctgaaattccgcttccagggccaagctttcttttctgatactgtttgtccctcgcgaggcaccgttgggtcgcgcagtaggcgtgactaggggcgggaagtggggcgggagcagggccgcggagcctccggcctgggctgcggctgtcatggacgcctgggtccgcttcagtgctcagagccaagcccgggagcggctgtgtagggccgcccagtatgcttgctctcttcttggccatgcgctgcagaggcatggagccagtcctgagttacagaaacagattcgacaactggagagccacctgagccttggaagaaagcttctacgcctgggtaactcagcagatgcccttgagtcagccaaaagagctgttcacctatcagatgttgtcctgagattctgcatcactgttagtcacctcaatcgagccttgtacttcgcctgtgacaatgtcctgtgggctggaaagtctggactggctccccgtgtggatcaggagaagtgggcccagcgttcattcaggtactatttgttttccctcatcatgaatttgagccgtgatgcttatgagattcgcctactgatggagcaagagtcttctgcttgtagccggcgactgaaaggttctggaggaggagtcccaggaggaagtgaaactgggggacttgggggaccagggactccaggaggaggtctgccccaactggctctgaaacttcggctgcaagtcctgctcctggctcgagtccttagaggtcatcccccacttctgctagacgtggtcagaaatgcctgtgatctcttcattcctctggacaaactaggcctctggcgctgtggccctgggattgtggggctttgtggcctcgtgtcctccatcctgtctattctcaccctaatctatccctggctacgactcaagccctgaccttccggtacaggataaggaggggacctgaattggtgagatggaatcttagatcgtcccccatgtgccagcctcattcgaattctactctttggttaaagttagaaattcagagatttaggggtggaggaagagctttggggaagatgaggtaaggaaagatgactcgtgaagttaataggatgtctctaatttctagatgtgcctgagcttctgttcttttcctctttctttgtgtctctcttgaatatatttactttgtgtctcttaactctgtttaaggttctgtgtctatgcatctctctctttcttttttcaaccttctcattctcctatccagggatttaatcagcagaattactttttgataggggaggtataaggtttggcctgtaaggttctaactgccttcttttttctcacagaggtggcttatggcagatttttcctccttcaaactccaaacataatttttaagactatgtgccagtggactcttcccttatatctctgcaccacaagttgttggatgtttcctcttcctcccttatgtctacctcaccaacctcgctcatcatttggcccttatccttccttgtacacctaccttcagatttctgcttacactttgatttcagagctttattccccagtctgttcttactcctttgtcgcttatccagaatgatgctatgtgtagcatcttgctgtaaatcctgtacaatgattctgtgtaaatagctgtggcctatgccaataatgaagagcaagcctttcaggtaagcaaattaaagttcagtttgctcatcgannnnnnnnnnnnnnnnnnnnnnnn

SEQ ID NO: 24802 - DNA, 1893 bp, Homo sapiens
  misc_feature 1, 9, 20, 21, 42, 43, 1892, 1893: n = A,T,C or G
ngtaggtgntccattggaanncccattgaaaaactttcgaannccctttttctcgggacgcgcgccattgtgttggtacccgggaattcggccattatggccggggagtgtctccaagcaagatggcggaggagccgcagtctgtgttgcagcttcctacttcaattgctgctggaggggaaggacttacggatgtctccccagaaacaaccaccccggagcccccgtcttccgctgcagtttccccgggaacagaggaacctgctggcgacaccaagaaaaaaattgacattttgctaaaggctgtgggagacactcctattatgaaaacaaagaagtgggcagtagagcgaacacgaaccatccaaggactcattgacttcatcaaaaagtttcttaaacttgtggcctcagaacagttgtttatttatgtgaatcagtcctttgctccttccccagaccaagaagttggaactctctatgagtgttttggcagtgatggtaaactggttttacattactgcaagtctcaggcgtggggatgaaccacaaagaaaatcaacttgctactacatgaaatggattttcacggaagagacagctctgaaaagttttgatgcttgtggcaagagacttaacagatgtgatctatttagtatgtgtctactctatgtttatgcataagaaaacatccatagcatgaatggactcagaaaaatgtgatttgtattaatgcaccagtcatcataaaagatggtcatgatagtacacccattgctcctacttgttactattattgctgcagatctgcctccaaggttgaaaaggagactaagactgtataaacatcttcattgtcagttctcaaaatgactgaaattgttttcatggtaaaagttaatatactaaagggttcctttttttttaatgtttacatttatctctatgtttacctttttagtcacattgacctgctggctgaatacctcaaatagtccagtagagggcagtccaccaggcagaaaaggttaggcgttttggtttcacatctttgctggggaataataggggaaatggctgtttttgctaatttttagctaatatctagccaggagagcaagcacataggacagactgaaagactgtaattttacacaatacacatggcttaattattttattgggatacagaaaaatataaattctggacaaataagtcatatacctgttttcagtcctaacatttaaggattcttgagtcccaatcacataactgtggtgttactctgtcatttatatggtgtcaaaagcacttgatgagtaaacccagtagcatctttttgagtgtttcataatgcattttccaacttgaaaacaataattgaaaaatagccttattgtatattttatgccatgactaaaagtgccatttttactgatgctattagactgataatttcttgaagtgaaatttaacctttttttctctttagtattatgtttataatgccatatttttagaaagcattccagatcaggcatggtggcttacacctgtaatcccagcactttggaaggctgaggtgtggggattgcgtgaagccacaagtttgagaccagcctggttagcaaggcaagatccccaactctacgaaaaaaaaaaacaaccacagagagaaaaaactttggggggcgccgtggccctgaaaaggtttcaacaccatccggggggcggggggcccacgagtgtaaggacactggcacaaggcggcccaaagaacacgggccacgaagggcggtttccccaaaaaaaaccgcgggggaacccggcgtccgacaccccaggggtcggggccacgggctaacaagggcaacgggccgattaccgcccnn

SEQ ID NO: 24803 - DNA, 2837 bp, Homo sapiens
tagcacgcgtccgcggacgcgtgggcggccacgccgcgccggctctgggcactcagcatcgtttccttttcctccggctggagcagctatggcggcggtgaagaccctgaaccccaaggccgaggtggcccgagcgcaggcggcgctggcggtcaacatcagcgcagcgcggggtctgcaggacgtgctaaggaccaacctggggcccaagggcaccatgaagatgctcgtttctggcgctggagacatcaaacttactaaagacggcaatgtgctgcttcacgaaatgcaaattcaacacccaacagcttccttaatagcaaaggtagcaacagcccaggatgatataactggtgatggtacgacttctaatgtcctaatcattggagagctgctgaaacaggcggatctctacatttctgaaggccttcatcctagaataatcactgaaggatttgaagctgcaaaggaaaaggcccttcagtttttggaagaagtcaaagtaagcagagagatggacagggaaacacttatagatgtggccagaacatctcttcgtactaaagttcatgctgaacttgcagatgtcttaacagaggctgtagtggactccattttggccattaaaaagcaagatgaacctattgatctcttcatgattgagatcatggagatgaaacataaatctgaaactgatacaagcttaatcagagggcttgttttggaccacggagcacggcatcctgatatgaagaaaagggtggaggatgcatacatcctcacttgtaacgtgtcattagagtatgagaaaacagaagtgaattctggctttttttttacaagagtgcagaagagagagaaaaactcgtgaaagctgaaagaaaattcattgaagatagggttaaaaaaataatagaactgaaaaggaaagtctgtggcgattcagataaaggatttgttgttattaatcaaaagggaattgaccccttttccttagatgctctttcaaaagaaggcatagttgctctgcgcagagctaaaaggagaaatatggagaggctgactcttgcttgtggtggggtagccctgaattcttttgacgacctaagtcctgactgcttgggacatgcaggacttgtatatgagtatacattgggagaagagaagtttacctttattgagaaatgtaacaaccctcgttctgtcacattattgatcaaaggaccaaataagcacacactcactcagatcaaagatgcagtgagggacggcttgagggctgtcaaaaatgctattgatgatggctgtgtggttccaggtgctggtgccgtggaagtggcaatggcagaagccctgattaaacataagcccagtgtaaagggcagggcacagcttggagtccaagcatttgctgatgcattgctcattattcccaaggttcttgctcagaactctggttttgaccttcaggaaacattagttaaaattcaagcagaacattcagaatcgggtcagcttgtgggtgtggacctgaacacaggtgagccaatggtggcagcagaagtaggcgtatgggataactattgtgtaaagaaacagcttcttcactcctgcactgtgattgccaccaacattctcttggttgatgagatcatgcgagctggaatgtcttctctgaaaggttgaattgaagcttcctctgtatctgaatcttgaagactgcaaagtgatcctgaggattacagctgtggaatttttgtccaagcttcaaataattttgaaagaaattttcccatatgaaaaaaggagagaacactggcatctgttgaaatttggaagttctgaaattatagtatttttaaaaattgcactgaagtgtatacacataaagcaggtcttttatccagtgaacaggatgttttgctttagcagcagtgacataaaattccatgttagataagcatatgttacttaccttgttattaaatatttcttgaaaagcaaattttaatggtttaattttatgtggacgtatgttaaattatccaactaccctattgttaagcatttggttttaaaatttttatgctaatataaatgctcaagtaatttaaaatattgaaagcatccctgttggtataaatttctgagtaaatgcattggatcagttggactttgaacgcctttgaaatggctttgctaaaatgctcccgccacaaagttgtaggaaatgggaagaggagtcaactagaggcaagggagttgagagagctgcaactgtaaagggcaagaacaggcagaggtaaaaagatgatggaaggtgtggtgactaagggccacggttattgggtgaaatttgagattgtaggccaactgtattttcaagcttctgaacttaggcaaaatattcatcgcaaagtctctagcgtcatatttttctcacccaaattacgtttccacgagattatttatatatagttggtctatctctgcagtccttgaaggtgaagttgtgtgttactaggctgtgttttgggatgtcagcagtggcctgaagtgagttgtgcaataaatgttaagttgaaacctcaaaaaaaaaaaaaaaaaaaaaggggggcccctttaatattttttaaaaaaaaaaccccccccccccccccctaaccctaaaacaaaaaaaaaaccccatgggggggggaaactttttttttgcccctttttgggggtccaaaaaaacccattccctcccaattttccaaaaaaaaccctttttttccccggcttctaagggggggtggccccacccccaaaagtgtttttttttggggggggccccc

SEQ ID NO: 24804 - DNA, 1218 bp, Homo sapiens; identical to SEQ ID NO: 24726

SEQ ID NO: 24805 - DNA, 1505 bp, Homo sapiens
  misc_feature 1, 1505: n = A,T,C or G
nggagcaacatgctgttttaatgagcgcctgcatgcagacaggctgaggcctaaaatggcatcagccccaagtgaggatggggcaggggttttatagtcctctgtaaacaggaattgtcccagcctaacgtgactgctatgtagtaccagggcgacctccctcttgatcttcagggggtacgtgtcttccagccagctctcttcctgcctctgctatcttgctgctggtgcaagtttgtaccttgggactgggcctgaggaggaggagttattcatcccgcaagctttcaggccccgaggagaatcttccattcctgtctatttggttatagaaaaggggaaagggacgactttctcaataactacttcaggcgtgacataggggtggcgtgggcaccttggaaaaagaaaaacttaatttttggggtattcttgagagacgggttggtatccatcgtgccgctgtagcaggagcatcatctggattgtcaggaggttaactgtagtttcaacaagagttttaatgggataccacaggggagaaacaggaggaccccagtgatgaaaatgactgtccccaccagcattttaaatcctcctaaattagagaaccaccctcctagaaggtttgctgggtcccatccctcccaggtttggactggtacacgggctacttttctgatgtttgaagcgatttccagaacctcttctccattattgcctatgttaagacagcaattggagatgttaaacttaccacagcccgcaccctcttctgctaataagtagtctagggccagcctgttttgataaattgccgcgcgcatttggttttgttgttgcgcgagcatttctagggctgaggcagtttggttagtgattatctctagaacagcttgtagtctaatcgctctatttggcatatatatgggagtgcgataaccccatgaaccatcctctgcccaagtggcaggaccatagtattcaatgatccgttgcagaggccactcgtcctctcacaatctttggctccctcctacctccaaggatcatttttctctggttatcatacacagggactctgagggtgttgcccgcctgcttcggaagtaaaaagaatccaggttgaattgtgcctaggaagcaagtaccttgccagtgataaggtagctgtgagtaagcctgggttccccatatccacaggaatccgtcagtggcagtccattgtcagctggtgttcctaggattgtcgcatagtacacttaggcggaggtatgcggcagaagggttagtggtgtttgtacagtaccaggccttttttgacaagacacaattgaggtagctgaagttagagggagaccaggctccagggggtaaccttggccaccactcagctatggaggcattgactgttagggtttggtgacgggttttcacctacggcgcgatgggttttatcagtccacttgcgggatatgccggacgcggggcggacgcgtggtgan

SEQ ID NO: 24806 - DNA, 1244 bp, Homo sapiens; identical to SEQ ID NO: 23272
  misc_feature 1: n = A,T,C or G

SEQ ID NO: 24807 - DNA, 1640 bp, Homo sapiens
  misc_feature 1, 2, 3, 1636, 1637, 1638, 1639, 1640: n = A,T,C or G
nnngcccttccgtgccccttccggatcgcttcaaagacccattcctcccttcggtctcttaatgaagaaactggacaactggaaccacatcggtaaactttttgggagaagaactagatgatgcctgcaaatgctcttaggaaattggcctgtctacttccgtaatgggaagatttctaaaaaattcaactgaagggtacacccaaatcccactgttcatctaaccgcatgtaagcccttcccgccagcgagctgaaaccagttatatcctcccatggctgcataaggaatgtcctgtcccactggtttttcctgagccaatctttcttgcttagtttccactactgtgtcatgggcatatgcaggctgaccacaagcacaagtgaagcagctatggaatcctgaacacttggaacatgtattgcatgtaaagccaggcgcagcactgtgctgatcagcaaagtgtttgcacctgcagcgaatgggctggctaccattcaaggggacataaaggtaagccctgcactggcagccagtcacttggcagggcagatcaatggggcactgctgaggaatcgcttccaagtcagttttatgttgtttatacctatgtgtacaaaaacacagtgtctctgggcccacaagtttacaatccatccctgttggtgaccgccagctcacaaataatctgttttgtaagcgcagaggtaaaacttttcttttgtattcttcatattcttcaggagtaaaaagtttccctccatcatcctcaccaacaattctccggtactccaggtactcgtccaccgccgccgcgccgccgagaggcaacgtcaaccgctccattgccggtggggaagccaaaggcttccctgcggaccagctgacctcgcagcccgacccgccccgttccctcccggtaccgcgccccctcccgcccgcctcctgattggcccggcctgaagcccgaggaggccgcgcgcggcaactgcgcaggacgcgcgcccctactggctgccggcgccaggcaccagaacccggatctccgcaagcgcagcctcgcgccacatggagtgcagtttgccgccctccacaaaccttgcacctattcccctctcccttccctggaccggcgagtcttcttgtaaattaacaagtgacaagggagtgcagtgccttgcatataacaggcgcatagaaaatggcttatttctttgtacagctcttttcgcttaatccatctcttgaaatataagtagttttgagaaggttctgctttagtttgaggcctgcctctccttaactgtcggcctgtttccagtattggcgttttcaaaaactctgatgtaacaatcagtagttctgggtatctgggttcactttgggggttgctaaagctacatgttcttcaaaggaaccgaataactgatttaaggtgaagcaagtaaaaacaatttacgtgaaaaaaaaaaaaaaaaaggggagcccccttcctttttttaaaaaaaaaccccccaaatttgtgtgggggactaaaaaaataaaaaaaatgccatggctctttaaaaatggtttttgcagcttaaaaggggaaaaaaaaaacccattccctaccaattttaccaaaaaaaacaannnnn

SEQ ID NO: 24808 - DNA, 621 bp, Homo sapiens
  misc_feature 619, 620, 621: n = A,T,C or G
gcgtccgggcggcgccctgtgtgtcctacggcggaacagtttcgtaccggcttcttctctggggtaggggtagcctcgcccggaagcaaggcctctggaaaaccgcggcccctgagttgcaaacaaatgtcagatcccaggtaaggcctgtgaagactggaagcggcttacctctgccgcgcgaggatgtggagccagcgcggacaccttcccccagcgactcgcgtgccttcaggcagggactctaggatcttagatattaaggctaagacatactgcatttgtaataccaaagaaaaacgtccctacctcaaaacgtgaaacttacacagaggattttattaaaaagcagattgaagagttcaacatatgaaagagacatttagccaacatgatgggagaagatccagaaactttcactcaagaagatattgacagagctattgcttaccttttcccaagtggtttgtttgagaaacgagccaggccagtaatggagcatcctgaacagatttttccaagacaaagagcaatccagtggggagaagatggccgtccatttcactatctcttctatactggcaaacagtcatactattcattaatgcatgatgtatannn

SEQ ID NO: 24809 - DNA, 269 bp, Homo sapiens
ccctttcgagcggccgcccgggcaggtactttcttctctcattccgccaaaacagggctcagttattcatttgccaagcttcgtggaggaatgtaggtgacatcaatgtgataaagtctgtgttctgagttgtcagatctcttgaagacaatatttttcatcacttattgtttactaaagctacagccaaaaatatttttttttcttattctaaactgagccctatagcaagtgaagggaccagatttcctaattaagggaagttaggt

SEQ ID NO: 24810 - DNA, 1715 bp, Homo sapiens; identical to SEQ ID NO: 23747

SEQ ID NO: 24811 - DNA, 1091 bp, Homo sapiens
  misc_feature 1, 2, 3, 4, 5, 6, 7, 8, 9, 10, 11, 12, 13, 14, 15, 16, 17,18, 19, 20, 21, 22, 23, 24, 25, 26, 27, 28, 29, 30, 1089,1090, 1091: n = A,T,C or G
nnnnnnnnnnnnnnnnnnnnnnnnnnnnnntttttttttggatttcataaaatgattttaatagaaaagtacaagatatgaacaaaaataaataatctttatctcatttctagcccagcaaattgtacactgcatataaaaatggtctaagatgcaattttcctccattccttttttgcttttaaaatactgagacagcattttaattcaatattctaggttcaaactgatacattaaaaaaaaatcataccaacctttaatcattctacatccattttttaaagttagctaacaagatgatgtttcactaaaataaaatatccaatcatcagattaaagtgtaaagtttgtgtgaacagggaaattagatcatttctctaagttttaattcctatgtttctgaatgtttcttgaattaaaaattcatttcatcatcttactttcaaaacacggcatctctctttcaccattccacagagagagaaaagactagaaaatactttaaaaaaaataaatattttaaaagtatagcttacagtgacaatgtagtattttagacctgtgccttcgtgcctatttgcattaaatacatgcttcaagttataactaccttttctatctctctatatattgtgggccactaagtgtttgtggactgatgctgctaacgatctcttggagttagctagtaccggtctcttattcagagtatttactctgctatagcgtcatatttgataattctagtggcttgaataatgttttgtaaaaacaaattgaaacttggtattggcaaaattgtacgagaaaagagctagggtaggcaactaaaacttacacagtgccagtctcaggaggtcagtagctcacagaactcaacagataaactggattaaaacttaaaagtcttctttctatttgagcccataatgactattttgaacatggctcttttgctgctgcctatatataaattttttattaattttcttgtattgggaagatcttgaatacgctccaggatgagaagaaaaaatacgctgacactgctaaatcgggtatatgtttttgcaataaagaacactggnnn

SEQ ID NO: 24812 - DNA, 1610 bp, Homo sapiens
ttctagaattaattaacgcggggtccaatagattattaataaacattttagatagctgtaaaaaaattgtgttctctagagttcataaaaattatgagcttaatttcaatccaacagaaataattctgaaaactctaatgttgtgatgctaataattgggctaagaattttcaaactattgactggcaaaaacatggataaattgtaatatatgaacttcaaagaataaatgcacaattacaaaacttgatatagcaatttatttttaaaagccatttgaggaatcaccaaataatttcaaaatcatgactagaaaaccagcaatgaaatttgagactactggtatgacaaatcctgtttcaggccttgttgatctagagttacttgcacaaccagaatttgccaaaacaggaaataggtgtttcatatatacggctctaaccttctctctctgcaccttccttctgtcaatagatgaaacaaatacttcatcctgctctggaaaccactgcaatgacattattcccagtgctgttgttcctggttgctgggctgcttccatcttttccagcaaatgaagataaggatcccgcttttactgctttgttaaccacccaaacacaagtgcaaagggagattgtgaataagcacaatgaactgaggagagcagtatctccccctgccagaaacatgctgaagatggaatggaacaaagaggctgcagcaaatgcccaaaagtgggcaaaccagtgcaattacagacacagtaacccaaaggatcgaatgacaagtctaaaatgtggtgagaatctctacatgtcaagtgcccccagctcatggtcacaagcaatccaaagctggtttgatgagtacaatgattttgactttggtgtagggccaaagactcccaactcagtggttggacattatacacaggttgtttggtactcttcatacctcgttggatgtggaaatgcctactgtcccaatcaaaaagttctaaaatactactatgtttgccaatattgtcctgctggtaattgggctaatagactatatgtcccttatgaacaaggagcaccttgtgccagttgcccagataactgtgacgatggactatgcaccaatggttgcaagtacgaagatctctatagtaactgtaaaagtttgaagctcacattaacctgtaaacatcagttggtcagggacagttgcaaggcctcctgcaattgttcaaacagcatttattaaatacgcattacacaccgagtagggctatgtagagaggagtcagattatctacttagatttggcatctacttagatttaacatatactagctgagaaattgtaggcatgtttgatgcacatttgatttcaaatgtttttcttctggatctgctttttattttacaaaaatatttttcatacaaatggttaaaaagaaacaaaatctataacaacaactttggatttttatatataaactttgtgatttaaatttactgaatttaattagggtgaaaattttgaaagttgtattctcacatgactaagttcactaaaaccctggattgaaagtgaaaattatgttcctagaacaaaatgta

SEQ ID NO: 24813 - DNA, 1883 bp, Homo sapiens
  misc_feature 1, 1769, 1770, 1777, 1800, 1812, 1835, 1847, 1860, 1864,1881, 1882, 1883: n = A,T,C or G
nagtatccctcctgacaaaactaacaaaaatcctgttagccaaataatcagccacattcatatttaccgtcaaagtttttatcctcattttacagcagtggagagcgattgccccgggtcccacgttaggaagagagagaactgggatttgcacccaggcaatctggggacagagctgtgatcacaactccatgagtcagggccgagccagccccttcaccaccagccggccgcgccccgggaaggaagtttgtggcggaggaggttcgtacgggaggagggggaggcgcccacgcatctggggctgactcgctctttcgcaaaacgtctgggaggagtccctggggccacaaaactgcctccttcctgaggccagaaggagagaagacgtgcagggaccccgcgcacaggagctgccctcgcgacatgggtcacccgccgctgctgccgctgctgctgctgctccacacctgcgtcccagcctcttggggcctgcggtgcatgcagtgtaagaccaacggggattgccgtgtggaagagtgcgccctgggacaggacctctgcaggaccacgatcgtgcgcttgtgggaagaaggagaagagctggagctggtggagaaaagctgtacccactcagagaagaccaacaggaccctgagctatcggactggcttgaagatcaccagccttaccgaggttgtgtgtgggttagacttgtgcaaccagggcaactctggccgggctgtcacctattcccgaagccgttacctcgaatgcatttcctgtggctcatcagacatgagctgtgagaggggccggcaccagagcctgcagtgccgcagccctgaagaacagtgcctggatgtggtgacccactggatccaggaaggtgaagaagggcgtccaaaggatgaccgccacctccgtggctgtggctaccttcccggctgcccgggctccaatggtttccacaacaacgacaccttccacttcctgaaatgctgcaacaccaccaaatgcaacgagggcccaatcctggagcttgaaaatctgccgcagaatggccgccagtgttacagctgcaaggggaacagcacccatggatgctcctctgaagagactttcctcattgactgccgaggccccatgaatcaatgtctggtagccaccggcactcacgaaccgaaaaaccaaagctatatggtaagaggctgtgcaaccgcctcaatgtgccaacatgcccacctgggtgacgccttcagcatgaaccacattgatgtctcctgctgtactaaaagtggctgtaaccacccagacctggatgtccagtaccgcagtggggctgctcctcagcctggccctgcccatctcagcctcaccatcaccctgctaatgactgccagactgtggggaggcactctcctctggacctaaacctgaaatccccctctctgccctggctggatccgggggacccctttgcccttccctcggctcccagccctacagacttgctgtgtgacctcaggccagtgtgccgacctctctgggcctcagttttcccagctatgaaaacagctatctcacaaagttgtgtgaagcagaagagaaaagctggaggaaggccgtgggccaatgggagagctcttgttattattaatattgttgccgctgttgtgttgttgttattaattaatattcatattatttattttatacttacataaagattttgtaccagtgacatggccgcgaaatcggggaggccnngtccaantggcctataggggcgattacatnactggccgcgtncaacgtctgattggaaacccgcnttccaactattngcttgagcatccntttngcagtgctatacgaaannn

SEQ ID NO: 24814 - DNA, 343 bp, Homo sapiens
ttccagggaacatactgattggtcttaaaagactagacagttaagtaaaaggtggctggaacatctatttttctacaaaactggaaaaatgaacctggttctagaagaatgtactcattcccccgtggaaccgtgatgtatacctcagcaccttcactcacttctaaaagaagtggattcatgctgagcattttgaattgctggaagactttatggaggatttggagggacacagtagtgtcacactgagaagcaggtggcttccgtgacttcttcctcttatccctttccaaagtaatgagtaaatggctgaccctgtctgacacagagcagttctgtaggt

SEQ ID NO: 24815 - DNA, 1985 bp, Homo sapiens
  misc_feature 1, 1982, 1983, 1984, 1985: n = A,T,C or G
ncgtccggcgtccggatgcctctcttttcagcgttttcttatgtattcaggacagttaagactaaagaggcattagagttcagatagaacacgggaaaaattggtaggcattggaggtatgttactattaaacttcttgtgtcttacatttctagaaagaatattaaaaaacaactgtgtgaagccattgttggagcccagtgtggcaatgcagttttaagaggagccatgtctatgccccaggaattgtgtcagcatcacaatttatgaaagctggagatgttatttctgtatactctgatattaaaggaaaatgtaagaaaggagccaaagaatttgatggaacaaaagtatttcttggaaatgggatttctgaactaagccgcaaagaaatcttcagtggattacctgaactgaaaggcatgggcataagaatgacagaaccagtatatctcagcccttcatttgacagtgtactgccccgttacttatttttacaaaatttgccatctgccttagtaagtcatgtactaaatcctcaacctggagagaagattctagacttgtgtgcagcacctggagggaaaacaacacacattgcagcactaatgcatgatcagggagaagttatagcactggataaaatcttcaacaaagtagaaaaaatcaaacagaatgccttattgttagggctgaattccatcagggcattttgttttgatggaacaaaggcggttaaacttgatatggtggaggacacagaaggagaacctccatttctaccagaatcctttgaccgaattcttctggatgcaccctgtagtggaatgggacagagaccaaacatggcctgtacttggtctgtgaaggaagtggcatcatatcagccattacagcgaaaactcttcactgcagcggttcagctgctgaagccagagggtgtgctggtttatagcacgtgcactataacactggccgaaaatgaagaacaggttgcctgggccctgacaaaatttccttgccttcagcttcagccccaggaaccgcagattggaggagaaggaatgaggggagctgggctctcatgtgaacagttgaaacagctgcagcgatttgatccatcggctgtgccattaccggacactgacatggactctcttagagaggccagaagagaagacatgttgcgtctggctaataaggactctataggtttttttattgcaaaatttgtaaaatgcaaaagcacataggagagggatggatgctcagaaatgaaaattccaaacatttgctgtctgtggtttttttttttttttttttaaccaaagtgttgtcaggccaactgaatgatgatgtggttgctatggaaacagaaaaggctgccagctgttttaccagggatccagagacatagaggaagtagggggtggtatgagattatattttctgtttttaaaagattttttttttttatgtatttagtagagtataaagaaaagcagatgcctatagatgtctggagcatattttcatttgtgatctaatgttttaatttgtaaagtgtacaagtcatttttaatgttaaaaattagtgaatctaacaaaaggaataaattagcaatatttgatgtggttatgaaaagttgtttttgtttctaggttcctagtttcttaaggattcagggcatgggaagtaaaacattgactatgtgccaataatggaggtaagtattttacctgactctctgtctgcttatttagtaagtcaaccccctttcaaatgaagtctggacctcctctgaatgatagtgtgaagtgatagtctaaagactatcgtagtctaaatggtagtctatgttcaatgtttttcataattttaaacgaaaaagtaaagttagtattttctttactttgtagatttagaaaatgagattattctacaatttggataacttatcatgtatttgaaacatatcagnnnn

SEQ ID NO: 24816 - DNA, 4414 bp, Homo sapiens; identical to SEQ ID NO: 24618
  misc_feature 1, 2, 3, 4386, 4387, 4388, 4389, 4390, 4391, 4392, 4393,4394, 4395, 4396, 4397, 4398, 4399, 4400, 4401, 4402, 4403,4404, 4405, 4406, 4407, 4408, 4409, 4410, 4411, 4412, 4413,4414: n = A,T,C or G

SEQ ID NO: 24817 - DNA, 309 bp, Homo sapiens
ggagtcaagggttctatttgcctcggcctctcaaagtgctgggattacaggtgtgagccacggctcctggctccttgctccagaatcagttttttaatggaagatagctcatactttgtttttgtctcaaaaaaaaaaattacatataagcccggtttaaagagaggataatatgcaaccaccctagttgaaacagagtgtatcacttctttctcaccctaaatttaatgcctagtttgaaaatcagtagacaataataaagttgataagctttaggttggtaggaaagctatgtaatctatatagtgt

SEQ ID NO: 24818 - DNA, 3077 bp, Homo sapiens
  misc_feature 1: n = A,T,C or G
naagttcttacaattctcctaccagacctccaatcttcccattgcctctctaatccgccaaagaccttgggtggataccactgcaggcttcttttccaccactttagagcctttcgacccattctgttaatgttatatttaagcactctgaattcaatcaatgcccacacctccacgatcctgaactatgaagtcttcctttttggaaagaatatcattattgaaagtgctgcaagagttgcttcgtccgtggtataaatcagcatctagccataaaccaatcgtccccttaaaatgagggctgaatgtgtagagaaaagtttcgcctgtgccataatagtagtcactgaacttgaaaggatgagttgcatatgctccaaaatctgattatccatatctttgatgaccaataggacaggactgtctagtgatgccgatttccggtagagcgtctttaagctggtcccgtgctctaacgtgctataggccagtctccatggatacccttgcacccttgcaggaaggcgtcgggccagctgctcgatgtgcatattctccaggagcgcgctgtggggccgtaggacaggcagcacctcttcgtcctcgtcttcatagtagctgcatgtgctcttcctgcgctttgcctcttcaacagtgatgatctcccagctcttggttgttggctcactgaagaagttgtcaatcatgttcagttcttccttctccaccaccacaaagccttgctctttggcatcttttccatagacatcgggagaccactgaacaaagaatgtgtacaaatgatccaccctctcccgaggaacagcaaaccagtactctggctgctttctccgtttgccgtactgctggaccatggctgcagtgtgagtggcaaaggattttctcattggttttcccactttgatgcacaggaacatgggtggggtcttgcttttttcttcttttgaaggaagtatatcttcaatgggtacctgaattctctttaacagccacaactgaacttcagatttattatccatttgtgcaccttgacagctgttgtccagagtagattgccaaaggttccaggagattaggcctcttacacttgcttcgtagagattcatttaccggagggctctcccttttcacccggtctttatctgctcttattgccctcaattatggtatccacccgccctgggaaagagaactactaaggttaatgtctatttccccctggttcgatactttttgccatcacttgaattctgttttcgccaaattttcagatacctgtggcccttctttgttcttagtcaggtaatattccaatgagtttaactttatctaaatcttcatgtatgttcagtgtgttttctactcggctttctggcgaaccagactgcttgtccacttctggcattatatcttgcttctcacaggtttctaaatctagcgcccccttcagttcaacatcattctctgttcccaaaaggctagggctgactgcacctgcatttccacggcagaattgtttatttgtgactcagctttctttcgttcctctgggtcaagagaaaggcactccttcaaggtgtcttttttgtgcattccaccaccagtttgagaagaaagttcttccaagtcaacaaaatcatcatcttcccctagaaagttttctttggctgtagattcaaatgcagaagaagtgtcggaaggttccttgctgagcttagtcactgtgggagaaccatgggatgtctccctagaggagtccagtttctttaatttctctgacacagagctgcctgagggctttgtaggtgtatgtcctgtggacttctccaaaggtactattggtctggaatccgaagtcataattttctctccattctgctgtcgtttttccttgttgatagatttgaacttactgaatgggttgatatccttttctgaagccaggtcttcccattctccaggcctgtacagaggacaaagatcctgaggtaggtcagatggcaaggcatctttgcccacgcttccgcggacgtcattgtagagcgcaatggaaacaacctcttccatggggcagatgagaccatactcctcacacccattttcaataaccagaggatcagatttatgagggtcaaacatgatgttgttaggagtcactatcataacaccgccaaccacaccctttccatcggtgaagtatcgacaattcatttttaaaaatttcaccacacctggctcatcttcttcagaagtagacgataagactctttcaatgggtttcaaggcctttcgtgctaagtcagcatcaggcaatttatcatattctgcatctgatgatgaaggagagacagtagcaccaggactggatgatgatagccttaaggtactggaaggagagttggcatctggcacaaaaaggacctggcctggaacaatagtatgtgtgaaaagtttattcagttccaccaatttattgggagtgatgttaaatttcagtgctatggagtttagggtgtcctggtttccagcagtgtattccatagtcccatggggcttctgaaccaccatcttcttctcttttttatcatgtgttttgttttgattgtcatcaatactataatatctctttagttctgtacgcctgatctcctttaactgattactttttctcttttttttctcatcagtcatatattcctcttccacagcaatgttgcacttgtctggctctaaaactactgtattattatcttccttcccagtatgagtccttgtagctacagctgaggctgtctctgcattttgtttggcttgttttttctttttcagtcgagcaaaataactttgtttccgttccttcttctcttccttggtatccataatacacaatcaaaagtgcaaagtatttgaaaaagtccctctttttaatcagtgagtcgtaaccctacagggcgggggcggccggctcctggcggcccgggagaaggggatcaggtcgcatgcatttctgggagcggtggcctctgctgctgggccggacgcgtgggtgactccct

SEQ ID NO: 24819 - DNA, 1069 bp, Homo sapiens
  misc_feature 1, 1067, 1068, 1069: n = A,T,C or G
nccgccgcctcttcagtttaaaatcgtttcccgactcgctctgcggccccacgcaggaagcctccttggcgcctcgccgattccgtatcagtgaagcaactaaaattgccattttaactgagggcaaggccgagccacttaaccactatcgtcaacctttccaatcgtgctcggttgctcctcagttttcctaccggtgcgaagctttctctcaaatttccgcccgtagtaggcatggcggcggcacctcaccactgattcgttgaattccttcccggtaatcttgggcactagcgggcggagttgaagggcgcttggaccccagcggcgatctgtgtttgggttcgcgctctgggagaattttggctttgctcgccttcctctttcagaagactcgaaatcggccagcaggtctgcgagatttgaaacgcgactgttactccttgttttccggttctggccgcgggagcctctcgagaagcgtggaaagaggagaagggcgtataccttgtgaccgcctctggttgtcttgggctcgcgcctggcgccgctacgtggagtcgctctctcgtcgtcacttttggctgccgacttgttgagtagaagtgcagactgatgctttaagactcagggagaggtctttcccttatctccaccccagcaagcaccccagagaccttggagatttgtcttgtttctagacacgtgtactccaatgttgtgcggaggaggccttaaatattcgagaagagagtgggaactcctggaattttaagggatttctgtgtatttccaaaactgacttttaactaccggcagcgtgggatttcgtgattgtttttcgccatcgtgtggctccaacatgtacttcccttcttggttaagtcagctgtacaggggtttatccagacccatcagaaggaccacccaaccgatctgggggttctctctacagaagtctgttgcagagttcacagaggagaattccagaattcagtagctttgttgtccggaccaacacatgtggagagttgcgttcgtctcttagggcagaagtcaccttgtgnnn

SEQ ID NO: 24820 - DNA, 1176 bp, Homo sapiens
  misc_feature 1, 2, 1158, 1159, 1160, 1161, 1162, 1163, 1164, 1165, 1166,1167, 1168, 1169, 1170, 1171, 1172, 1173, 1174, 1175, 1176: n = A,T,C or G
nnaaatagcctgaaaaacaaagatgagcttattttagaaacaagtttttattttttattcctgctaaaatctttgctaatctaagcctgacaaagctaaaaattaagcgctgactttttttctttggaccaaatcaggtttgaaatatcgatgatatatatgagaattttttttaaattctaaaatatagcaacattgcacaggaagatactcttacttcttagagtaactacagagtgattttttttttttcttgagtgagactctgaagaaccttttcgataatgtttggacttggactaaagcaattagaattatgaagcaatgataacctttagaaaatttttctatcacatgttgaatattttcaaaccttactttaataatctaaagttacgggattatatcttatattaattttgcagttttgagtagtatgataaaagaaataagaattcaaaccattaagtacctacctaaatactacatgtaaggcactgtgcttttatttcattcagctgaggtataagcagctgtactcaaatgttcttaaaaatgagaaccagtggggaaattgtttataatcattggaaatgaagaaattccaattggctatatctttacttcagcttttcttgaacaatttacagcattgattttcaaactgtgtctactggcacccttcccctttgtatcagagcagttctgcttttaactgttttatatgttggggttctctatgagatttcattggaacaaagagtttcactgatattcgagtttgaaaaccattgattaagtgaaaaaacaccttagaagataggaaatatgtttaaaaaatgaatgtattaaatcttatgagtaggaagatgaaatacaggtttattgtatagatacattatttatgaaggataaagatctatacatgaacagcagaatgtataagctagcatttactagcatgtctctgatgcttttgttcatttctgttaatcgtcatttctgtcccctctgcatggaattttatacttgtctagggtaagagtttgtagactctttcagcagaacagattttaataaccaatttatttgttttattttaaaaatttatttttgaataaccaatttaatagtaaattttatatgaacatttggcannnnnnnnnnnnnnnnnnn

SEQ ID NO: 24821 - DNA, 302 bp, Homo sapiens
  misc_feature 298, 299, 300, 301, 302: n = A,T,C or G
acgcgggattttgataaactttattgcactagagtgcttcagtgttgacacgagtttcaaaatctccagagacaccaaagaaatgtgactcaattggaaaaaatggagtttttgacacaatgttagagaaagtagggtatgtagttctcaaaggaaatctgaccaaaccttcctgttttttacaaatgtgatctgcttcctatgtccagggtggacaacactatgatccttagctagagctttcttctcttattctttcaacatgtattcacggggtacacactatgtgccaggctcnnnnn

SEQ ID NO: 24822 - DNA, 884 bp, Homo sapiens; identical to SEQ ID NO: 23376
  misc_feature 1, 2, 3, 4, 5, 6, 7, 8, 9: n = A,T,C or G

SEQ ID NO: 24823 - DNA, 282 bp, Homo sapiens
  misc_feature 282: n = A,T,C or G
acctgtaatctcagctactcgggaggctgaggcaggagaaccacttgaactggggaggcagaggttgcagtgagccaaggtcatgccattgcatttcagccctgggcaacaagagcgaactccatcatacatcttaccaccacatcactaaaggcctgtgtactttgaccagcagggtatgttggtgctcatactccccaccctacatgttcccaggttctgtcccatggcacaggtgatggtctcccctctcagactctgggttccattctcccttggccn

SEQ ID NO: 24824 - DNA, 602 bp, Homo sapiens
  misc_feature 1: n = A,T,C or G
ncacgcgtccgcgaggaagctcactgagaattatcctgagctgtgttaacaaactgacagaacacagaatttttactcaaaatggattggttaaacgtctttaaagattttttcagcattggaaaagtgaaaagaaaacctagtgtgccagattctgcatctcctgctgatgatagttttgttgacccaggggaacgtctctatgacctcaacatgcccgcttatgtgaaatttaactacatggctgagagagaggatgaattatcattgataaaggggacaaaggtgatcgtcatggagaaatgcagtgatgggtggtggcgtggtagctacaatggacaagttggatggttcccttcaaactatgtaactgaagaaggtgacagtcctttgggtgaccatgtgggttctctgtcagagaaattagcagcagtcgtcaataacctaaatactgggcaagtgttgcatgtggtacaggctctttacccattcagctcatctaatgatgaagaacttaatttcgagaaaggagatgtattggatgttattgaaaaacctgaaaatgacccagagtggtggaaatgcaggaagatcaatggtat

SEQ ID NO: 24825 - DNA, 4231 bp, Homo sapiens; identical to SEQ ID NO: 23314

SEQ ID NO: 24826 - DNA, 2087 bp, Homo sapiens
  misc_feature 2086, 2087: n = A,T,C or G
tcgacccacgcgtccgatttcagactggcaccacctcctctggctgtttccgaggccatctagaggccagagcccagtcagattaactgaaagtaaagagaggactgcgggagtttgggacctttgtgcagacgtgctcatgctcgttcgtgtagagggcgggagagaggaaaggaaggagggcattgggagctgaggccccacctttcatttcagaaaagtgcacaggcagagcgggctgagtcacaggcacaggtgaggaactcaactcaaactcctctctctgggaaaacgcggtgcttgctcctcccggagtggccttggcagggtgttggagccctcggtctgccccgtccggtctctggggccaaggctgggtttccctcatgtatggcaagagctctactcgtgcggtgcttcttctccttggcatacagctcacagctctttggcctatagcagctgtggaaatttatacctcccgggtgctggaggctgttaatgggacagatgctcggttaaaatgcactttctccagctttgcccctgtgggtgatgctctaacagtgacctggaattttcgtcctctagacgggggacctgagcagtttgtattctactaccacatagatcccttccaacccatgagtgggcggtttaaggaccgggtgtcttgggatgggaatcctgagcggtacgatgcctccatccttctctggaaactgcagttcgacgacaatgggacatacacctgccaggtgaagaacccacctgatgttgatggggtgataggggagatccggctcagcgtcgtgcacactgtacgcttctctgagatccacttcctggctctggccattggctctgcctgtgcactgatgatcataatagtaattgtagtggtcctcttccagcattaccggaaaaagcgatgggccgaaagagctcataaagtggtggagataaaatcaaaagaagaggaaaggctcaaccaagagaaaaaggtctctgtttatttagaagacacagactaacaattttagatggaagctgagatgatttccaagaacaagaaccctagtatttcttgaagttaatggaaacttttctttggcttttccagttgtgacccgttttccaaccagttctgcagcatattagattctagacaagcaacacccctctggagccagcacagtgctcctccatatcaccagtcatacacagcctcattattaaggtcttatttaatttcagagtgtaaattttttcaagtgctcattaggttttataaacaagaagctacatttttgcccttaagacactacttacagtgttatgacttgtatacacatatattggtatcaaaggggataaaagccaatttgtctgttacatttcctttcacgtatttcttttagcagcacttctgctactaaagttaatgtgtttactctctttccttcccacattctcaattaaaaggtgagctaagcctcctcggtgtttctgattaacagtaaatcctaaattcaaactgttaaatgacatttttatttttatgtctctccttaactatgagacacatcttgttttactgaatttctttcaatattccaggtgatagatttttgttgttttgttaattaatccaagatttacaatagcacaacgctaaatcacacagtaactacaaaaggttacatagatatgaaaagattggcagaggccattgcaggatgaatcacttgtcacttttcttctgtgctgggaaaaataatcaacaatgtgggtctttcatgagcagtgacggatagtttagcttactatgtttcccccccaattcaatgatctataacaacagagcaaagtctatgctcatttgcagactggaatcattaagtaatttaataaaaagattgtgaaacagcatattacaagtttgaaaattcagggctggtgaaaaaaatcaactctaaatgatgataattttgtacagttttatataaaactctgagaactagaagaaattattaactttttttcttttttaattctaattcccttgtcatatggggaggagacnn

SEQ ID NO: 24827 - DNA, 493 bp, Homo sapiens
  misc_feature 1, 493: n = A,T,C or G
ngaatgaaagagacacaaaaatagtcaatagaagacagacaaatattcaagtatttgtttctttctttccccgcttcaaatccttggttccaagtcaggcagggagaagagtatgcaaattcatgggtagcagaagttttaaattacctatcaagccttccatgactataaaagcgacgccaacctttccccaggtttcatctggatattttatcaggaatgacagagtggggaggttaaaaaacagtattgttttctacccttaaagtgttataggttttactggctggggataataaatagggaaacactgagggagatagaagaaaaacaggtgcatttgggaggctctctctcacaatattatctagagcaaagctccctggaatgtatactgtatttggaattaagataaacgtgaacttattgaggatccactgagcagcacagggtcttaacgtgctggtctgtaggtgccttgattagcttcagn

SEQ ID NO: 24828 - DNA, 310 bp, Homo sapiens
  misc_feature 310: n = A,T,C or G
acaagaatttttatggcagcattatttataatagccaccaaaccagaaatcacctaagtgttccatcaatagtattcatgcaacaaaatactatatagcaatgaaattgatccaactatacccatatgtagcaacatggataaataaggttttttttgtactttcctaattgggaaagtagtgcttaagtttgcaaattaagttggggagggcaataataaaatgaggggcccgtaacagtaaccagtgggtgtataacgaaaaccatgtataaaatgggcctattacccttgtcagagatataaattan

SEQ ID NO: 24829 - DNA, 5570 bp, Homo sapiens
  misc_feature 1, 2, 3, 4, 5, 6, 7, 5570: n = A,T,C or G
nnnnnnngactgcagaagcctacttcacaccgccttctcttattttgcggggcccccccccccccccaaaatttttttgggcaacattttaaaaacctctccccatattttgcaaagaggaaattcacagcaaaagtccacattatgtcagctttctcatattgagagctctgctatgccactgttgaatttttcccaagattcctgtccctagccctcacttcaaactctgcttccttggacagatttggcaatagcttttgtaagtgatgtggacataatttgcctacaataatgaaaacctacaggaatttttttatttttcattttccccttaggcatatttagtatttttcccccaggcagatcattctgagtgtgcgagtgtgtgtgcacatgttacaaaggcaactaccatgttaataaaatattcaatttgaaatccttttcggtatttgaattgcttttgaataatgttttttatctggatgtaacattgttgcattagctttttaactttcccaagtaattgaatacattttattacttggacttttataaactctttccctacccactataaatgagacattcacagcgttcaagtttgtattaaaggaaaggattagtttgaccccttcttttgatggttaatgcatacatgcagttaaatccctttatgcaaatgtgacactgctttactaggtcttttagttatttatttatttttttttttttttgccaatttatattgtaacatgatttcttgaacacagtaagttgttttaaaataaaagaacagcatactgtagtttttataagtaaagcgtaatgaaattgtacccctagagaaaattccattaacttgttaaattagtggaattaacaacaaataaagcatgtttgagacctggcaaaaattcctctggtagtatttataaatagagctgcatgcctctagtatgaaaaccgtatcagttgcaagtgccacttctacaagttactcagtttactctttgtatcagtaactttaaaggttggatgatccttgctggttaaagctaaatctcaacctagcaactaaatgaaaatatttagaatcatcagaatctgaacagactaaaattatcagcgataagcagaatcaagcagggtataagttttatctcaattatttgaaattgactgagttttcttaagtgtaaagctgaaatttgctaaccatgtttttgatgaaccacagtgcagcattgtgtgggttttagattgaatgactctctgctataattatcatgactttgaaatttttcatgagaataaatgaggaatggaggcaatttgtgggtttatccaaagcccccttgatgttgagtgttgccattgatcaaagatagcctcttttagattgtgatttctctctaaataagatactttgtatatttaatgacaagtctcttccctataattttgctcctcagaaaagaaaagcctagacagactgtatttccagtcacagaacataaaacttaatctaatgggtgttttgttttgttttgagacagaggctcactctgtcacctaggctggagtgcagtggctcgatctcagctcactgcagcctccacctcccggattcaagcaatttccctgcctcagcctcttgagtagctgggattacaggagccctccacgaggcccagttaatttttgtatctttagtggagacgaggtttccccctattggtcaggctggtctcaaacttctgacctcaagtgatccactcgcctcagcctctcaaaagtgctgggattacaggcatgaggcgccgcacttggcctagtgttttcttaactgtgaaattcccattcatttcttgaatgaggctacatcttatggacagagcaaagttattgtcctacagattcttaaaactataattatggctattgcatgaaatttaaatagattttattatgtctgcaaatctctgggcttttatttttctggaaaatataggagctttaatcaaaacataatagttctttttgtaattccatgttaataaaaacaaatactagcaattgcttgaattttaatgaatatttaaaagttcaagagccacggaaatcacttccagagataagagttccctttctaaatagaacacatttttaaaaaataagttatgtttgctactaaaacatttacactgttagactattatgtgcatgttgccaagactcttaagtaacttggatatcaactgtgaagggcctacctctaaaaagtaacaggtcatacaaatacaaatgtaactgtaaaaattccactggattcttgcatatttgcaagattagattattcaaaagaaatttcagtgctaaaattaaccagcaacataagttctatgggctttgaaaattgttctcatctttttaaagttgatgcattttcaatcctgcttacacaggctgttcatttggataagtaaataaaatgtctaaggtgaacttggcattatgtggagatgttggaccgttatagagcaatacaaattcctatgctgtcattctgttttctgcaaatgcaaacgtgcttatatggtcaacagtgcaaaaatagggtagttggctgcatatttagggtattacctaagcatttgttctctaacgttgctctactagaatgatttttttcttgcatcttttcacattaatgatgttctttatataactttcatgcgattatttagttttttaaattaataaagtgaatttaagaaatattgaaataaacatctaagtaattgccattttaaacccttgtttcttactgtgggagagggggaaatacagcactcatttcttgtttttaatttgcagaagtaagtgaaaatctatgtaaaatcaaaccaaaagagttggactgagtgtgtattgtcttgagattaagtgacaaatagtaaagtgttactgagtaattaagcccatgtattttttttttgtgagttgaaaatctttgaaatatgtgataaccgaatgtcaaaagttcctaaactctaacagtgcaggttgttcactgtaacgaggtaactcatatttgctggttacataaactacaagtactgctctcacaatatgggactttgaactgtgatgtagttcaacagttgccggcatcctctcagctgatacgctgcgaatattttgggttagacttgcagccagatgcagttttgcaacccaagaaaaaagttgaacctatgatcaaaaactgctcccaagatgaacctggaaaaaaatcagctaagctcccttggcgatctgcaggaacactagtaatgactggaattactccgtgatctttgatgactattacacataacagcactctagcaccttttcttactggcatggacttcctcatggactgctacttcatggatgatagcttcattgctttgggtagggatttaaggtagtcaaggggaaaatacgcagttttattacaggtcttaacatcaggcaactttcaactttaaaaccctttgtgaaaaatgtggttatagcactatagctctgattttaggatggttaaatgttatattcattgttggcttaccttatcaaactgtgccattaatcctttcacagacataggtaaggaagagaacaaccagtggattcaggggacaattatctatctccaaataataggcttttatttcttgcagctaactttttcagtgattctagcagatgccatctagtacatccttgatcttgtttctttcgtgagagatctcgccatggcagcatcttgttaagtaagtgtaattgcacatgcacaaaagacttaactagctttacatttagcagtcagttggttagattaggtttcatagtaaatgaataggaatagaaagaataggaagtgtttttattttccagtagtaattccgtggattccatttgacccagtttactatcagttcagttcaggtagatttggttcaacttttggtggtttttggctctaggatattcttgactttaatatcctagaacttactgagtcttcccttcaataaatacacttctcacatacctctaatcctatgcttccttgaaacaataatgctagctgagttgtttactaaggattattataagggcctgaaggtgtgggagtggagattaattaaaacctttatgttctccaatataagggaaaagcaggttggtactacttctgattaggcagaaaacaccaggattccttaagtgatccttgaaatggttattgttttctgccttgtcacatttgccactgtgccctttaaaacgatgtggaaacctcaggtttgtggacagcacaggtggaatgacatcttgtgcttcctgaggctcccctctaccaggcacattagcttagtgcttcagatgtcagcccaagtccttgttacctccttttcctgctgcccagggaagagtgtgtgtgctggagctggagcgcttgcactcttcaggtgactattctcacctccatttcctccacatgcattaggtgaaactgaggtctaagcctcctgcaaggtctacattttaaggactcacacatcaggctctcagaaatgtacacaggtattagttctgtttgttctaaaggaaatgtgggtatctctcaggccaggacttagtgactagttttcgctagacagcaggttaatacctagatctcatttaaaaaaaaaaaaaaaaaaacaggattaaagggaactgatcaggtttgttgagttttttagcctaattccaaagcatggaagagtgctctaggtaggaaagaaagctttttcttacgatttgtagctacctactgtgcctgacttggtgcctgtgtgaggattaagcccttagtctgctcttgcaattattcaaatgacaaattaaatttgcttttgtaataacaataaaagttgtcatcttcccgtcagtcgtctcccattatgtaacagaacacagacacaaacgagcagcaacagagcaacaacacacgagaacgacaaagacaacaaaacagcgggggacggcacacgaacgaagaagaaaacacacccccagagagggggcccaccaccacggccccggagcggcacgccaacccggacgagagcgacgtacagcaggagggggccaccccaagactgagggcgccacgcatcccatctaaagccacgccgcgagcgagcccggccacgaagtccaccacaaaaacaagcgcggaaaacgggcgagacaaacacgcgtcaccagcccggcggcatcacctctggtggcggcaagggagcacaacctcacacacccgcgagcggggcgacgcacaccaagcggacacaaccacacctcccaccgaagcgctcaacgcgccctccaccgggcgacccacacacacaaacctcactaggacggttacacagggcgacaacgacactcagcggtcaacatcccacgcgtcgagtcgacaggcgtacaggggcaataactcgtcgaccaactctcacccacagaan

SEQ ID NO: 24830 - DNA, 1028 bp, Homo sapiens
  misc_feature 1, 2, 3, 4, 5, 6, 7, 8, 9, 10, 11, 12, 13, 14: n = A,T,C or G
nnnnnnnnnnnnnnaaacgagggttctacggcgaaaactccctaacccctggaaatgtttgcttacgcccagatgttgccagagccatagttaccggcccttgcacgtccagtgctaaggaatcacaagtagatttgaggaaagcttcaatagaaggaatagaggtagtggaaactgattcatgaacccttctgagtaataacaaatactttaaaaaaccatatcatgagttctaatataattttcttgtctggaatcagctactttcaggatcacttgttcttttaggcttctgaacttttacactgaagactgtggcgtcatcagaaaaaagatcacaacacttggaatccctgattacctaatcctccagcagttaaggcccaaggaaacagcctctaggataccaattcatcaaaaagtgttccaggttcattctaattcaataaattatgttgagattaagttatacataatagatgttaatactaccattattaatattgttattattttcaaacctcaaagtttatttttgaaatacagattgatttttttccctaaaatgctaaagcttttacatacatacaaaagtatgacctggggtttggaaatttgctttgcagtctgggaggttgtagttaacttaaagaattttaaatgcaattagtactttcagacaatcgatgtcagattgtcatatcttattctttggggtatgaagcaaggtattttacaatgcccaaaaataactttcaaaatagtatttagcaaactgtctggagcctctttccccccaaattagagtatccaacacagatgatacacaagatataacttgaagattactgattttttaaatgcctccccagaatttacatattaaatcgattattttctccttcataatagttaccttttgacacttacacattcaccccaagtacaaattcactaattatcaaggcctaggcactattataattcgggcatataaatcttaaatccggacgcggggtcgactccct

SEQ ID NO: 24831 - DNA, 3302 bp, Homo sapiens; identical to SEQ ID NO: 24772
  misc_feature 1, 2, 3, 4, 5, 6, 7, 8, 9, 10, 11, 12, 13, 14, 15, 16, 3301,3302: n = A,T,C or G

SEQ ID NO: 24832 - DNA, 1861 bp, Homo sapiens
  misc_feature 1858, 1859, 1860, 1861: n = A,T,C or G
actttctggggtcttagatacagaactacgatataagtcagacttgaaagagggctccagaaaaagacgcgtgggaccgtacttcagctactctggtgccttcaagtgtctgagagacggggctggagacgtggcttttatcagagagagcacagtgtttgaggacctgtcagacgaggctgaaagggacgagtatgagttactctgcccagacaacactcggaagccagtggacaagttcaaagactgccatctggcccgggtcccttctcatgccgttgtggcacgaagtgtgaatggcaaggaggatgccatctggaatcttctccgccaggcacaggaaaagtttggaaaggacaagtcaccgaaattccagctctttggctcccctagtgggcagaaagatctgctgttcaaggactctgccattgggttttcgagggtgcccccgaggatagattctgggctgtaccttggctccggctacttcactgccatccagaacttgaggaaaagtgaggaggaagtggctgcccggcgtgcgcgggtcgtgtggtgtgcggtgggcgagcaggagctgcgcaagtgtaaccagtggagtggcttgagcgaaggcagcgtgacctgctcctcggctccaccacagaggactgcatcgccctggtgctgaaaggagaagctgatgccatgagtttggatggaggctatgttgtacccttgcaggcaaatgtgggttggtgccttgtcctggcagagaactacaaattccaaacaaaagcagcgaccctgatccttaactgtgttggtttgacttgtgggaaggtatcttgctggggcgggggttaggagaatcagacactagcttttactgggactctggtgaaggcacgacgtctgcccatcgccgtgggacggacttgcggtggaattccctggcggtcttcaccgacggtccgccatgtggatttcgcaactcggcccctgggtctgacccgagatttaatctctgtgctctgtgtatggcgaccagagacagggtcccacacaagtcgcgtgcccgacggcaacgagagattctacggctccacataggggctgcccggtgcctggctgagaatgctggagacgttgcatttgtgaaagatgtcactgtcttgcagaacactgatggaaataacaatgaggcatgggctaaggatttgaatctggcagactttgcgctgctgtgcctcgatggcaaacggaagcctgtgactgaggctagaagctgccatcttgccatggccccgaatcatgccgtggtgtctcggatggataaggtggaacgcctgaaacaggtgctgctccaccaacaggctaaattgggagaaatggatctgactgcccggacaagttttgcttattccagtctgaaaccaaaaagcttctgttcaatgacaacactgagtgtctgacagactccatggcaaaaacaacatatgaaaaatattgggaccacagtatgtcgcaggccattactaatctgaaaagtgctcaagctcccccctcctggcaggctgtgaattctcaggaagtaaacgaagaagatggccagtccccaagaaagctcaggcattaatgccccagtcttctcccaggtgtgtggggctggctcccgtgaaggggggttgccatcattggttaaatccctgggtgttaagcagagtaaaggggattgggattgtcaaaaaaaaaaaaaagtggggcgccagaaattaacactgggagcgtaaaagaaggcacacggcggagggtcacaaggcgaaggaacagaggtgacagagcaaacacagaaaagaagaaaagcaggaagtctagnnnn

SEQ ID NO: 24833 - DNA, 2846 bp, Homo sapiens
  misc_feature 2841, 2842, 2843, 2844, 2845, 2846: n = A,T,C or G
cgtccggccttctctggggctgcaaggacctgagctcagcttccgccccagccagggaagcggcaggggaaagcaccggctccaggccagcgtgggccgctctctcgctcggtgcccgccgccatgtgggccgtcctgaggttagccctgcggccgtgtgcccgcgcctctcccgccgggccgcgcgcctatcacggggactcggtggcctcgctgggcacccagccggacttgggctctgccctctaccaggagaactacaagcagatgaaagcactagtaaatcagctccatgaacgagtggagcatataaaactaggaggtggtgagaaagcccgagcacttcacatatcaagaggaaaactattgcccagagaaagaattgacaatctcatagacccagggtctccatttctggaattatcccagtttgcaggttaccagttatatgacaatgaggaggtgccaggaggtggcattattacaggcattggaagagtatcaggagtagaatgcatgattattgccaatgatgccaccgtcaaaggaggtgcctactacccagtgactgtgaaaaaacaattacgggcccaagaaattgccatgcaaaacaggctcccctgcatctacttagttgattcgggaggagcatacttacctcgacaagcagatgtgtttccagatcgagaccactttggccgtacattctataatcaggcaattatgtcttctaaaaatattgcacagatcgcagtggtcatgggctcctgcaccgcaggaggagcctatgtgcctgccatggctgatgaaaacatcattgtacgcaagcagggtaccattttcttggcaggaccccccttggttaaagcggcaactggggaagaagtatctgctgaggatcttggaggtgctgatcttcattgcagaaagtctggagtaagtgaccactgggctttggatgatcatcatgcccttcacttaactaggaaggttgtgaggaatctaaattatcagaagaaattggatgtcaccattgaaccttctgaagagcctttatttcctgctgatgaattgtatggaatagttggtgctaaccttaagaggagctttgatgtccgagaggtcattgctagaatcgtggatggaagcagattcactgagttcaaagccttttatggagacacattagttacaggatttgctcgaatatttgggtacccagtaggtatcgttggaaacaacggagttctcttttctgaatctgcaaaaaagggtactcactttgtccagttatgctgccaaagaaatattcctctgctgttccttcaaaacattactggatttatggttggtagagagtatgaagctgaaggaattgccaaggatggtgccaagatggtggccgctgtggcctgtgcccaagtgcctaagataaccctcatcattgggggctcctatggagccggaaactatgggatgtgtggcagagcgtatagcccaagatttctctacatttggccaaatgctcgtatctcagtgatgggaggagagcaggcagccaatgtgttggccacgataacaaaggaccaaagagcccgggaaggaaagcagttctccagtgctgatgaagcggctttaaaagagcccatcattaagaagtttgaagaggaaggaaacccttactattccagcgcaagggtatgggatgatgggatcattgatccagcagacaccagactggtcttgggtctcagttttagtgcagccctcaacgcaccaatagagaagactgacttcggtatcttcaggatgtaactggaataaaggatgttttctgttggacatgtactgaaaattaacacatgtagtagccttaaaattttagacttctcgaacatgaggctgttacagtaatttttttaacactgtgcattgtacttttctaccttaaaaaaatcagtgaggatatttatttaatgaacatcaattccttttaaattttcttagagaaatttctctgtggctcagttttaccacccataaagcggagacagtaatttatggttatcctttctgacccacaaagtatgaaaagttctgtaatctgtaaactcagttctgtaatctgtattattgagatgattaatataaagttgtattttcactgaaatgattgttttgctggttatgcttggtgatattttagcgggcttatttttgaaaggcatctgttacttcagtggcataaagtgccctcacactgctgtgcagccatcaccaccattcatctccagaatttgttctcagtcccaaactgaaactataccattcaaacaacagcgctccccatttccccctcccccgagcccatgacatctcctatatatcatactgagtctgagaaagcgatgtaaccacaatagacacaaaccagacaatacgaaagaataaatacacgactccaccgaagcaacacaacacccagaagatcaaacaagactatgcgccaccacaccacccaaacagcaggaacaaagagaacctaagaaaaacaccacaaacaagaatctacacaacaaacgcaacatcaacaagatagccaaggatagactacacaaaaagccatagaggaacctcggactggtcaccaagagcagaacaaccgacaacacacaatacagtacaaacaagacaaacgctggacaagcgagtaaaaagatgaagaaaaaacgaagaatcaacaacaggagaagtatatgaaaacaacaccaacgcaagaacacaacagtctgaacgacagagacaaatactaaaacgacaaacgtcagctactattaaccnnnnnn

SEQ ID NO: 24834 - DNA, 483 bp, Homo sapiens
  misc_feature 478, 479, 480, 481, 482, 483: n = A,T,C or G
acatgtgtggctgcaaatgttctcagtgatttcagagttcatggacccttttcaaaggtctcccagtggtaactatccaaaaatggatgagtaatgtaggctacagtttattcacagttggcttcagtttataaaaacaggctgggcgtggtggctcatgcctgtaatcccagcacttcaggaagctgaggcgggtgatcacccgaggtcaggagttcgagaccagcctgcccaatatggtgaaaccccatctgtaccttttttctaaaattaccaaagatattacacaaaggtaaattatgttctctgttttatgctttatctgatgaagccaaatatcctcttattgttgatcaaaggaggcaaaagaatttagaggcaaatgacaagcgataggctattgcaacctgagaaagagaactgctgcttcatcgtaaatttagaagaccaagtagataatggaaccaaagttgttacnnnnnn

SEQ ID NO: 24835 - DNA, 319 bp, Homo sapiens
  misc_feature 1, 2, 3, 4, 5, 6, 7, 8, 9, 10, 11, 12: n = A,T,C or G
nnnnnnnnnnnncttcaatttcagcctcgtataaataaaaaaaaaaattaaagtacaatacttatctaaaactatacatttagaatggagcagtttaatactagatctcagaagttttgaaaaatagcaaagaagactggatttggaaagcatggtctacaattggttgttaaattctgaagctatgaagaataaatgtttcaactttggattatgaaaccccatttatgattttttaaatacacttgaaataaaaatgattaaactaaattttggtccagtgacattactttgcactgcataatccattatacgttgt

SEQ ID NO: 24836 - DNA, 905 bp, Homo sapiens
  misc_feature 1, 2, 3, 4, 5, 6, 7, 8, 9, 10, 11, 12, 13, 14, 15, 16, 22,28, 904, 905: n = A,T,C or G
nnnnnnnnnnnnnnnnccattnaaaaanttaccgccacacaaatgtatatttattagcaagaaaaggcgttccacaatatattgataaaagggaaaagttgaagtttcctgccagtttgtgagaggcagctgttgcttagtgatcaataattaagaacacacaggctgtgtggaggcagacacatggatccactaattcactgtgaccttgggttaattgttctaagcctcagtttagtcatctctaaaatggggataaaatagcatccctcatagctgtggttaagtgagattatttgcacattcaattgacaatatttattgaacatctctgtggcagggaaacaaatggttcctgccctctgagagcttccagtctagcaaaaaaaaaaatcagaaatcccacacccgtattaaacataaaaataaattacagatgatggtacaagtgatcaaggaaaggtaatggatgtgatgaaactaacaagggccctgacttgtgctgtcaagaagcctctgaagaagtgacatttaagatgaaacctaaaattatgagagaactgcagctgttacagccaaaggggaaatgatgacatggacaaaggcctcgaggcaggaggagctgctggcagccagctctcggcataagctttggcatacagtaagtgccttgcatactgctgtattgcaattgaaaaaataaggatctggccaggcgcggtggctcacaccggtaattccagcactttaggaggccgaggtgtgcaaatcatttgaggtcaggagttggagaccaacctgaccaacatggtgaaaccccgtctctactaaaaatacaaaaattagccgggtgtggtggcgcatgcttgtaatcccggctaaccggtaagaaaactgtcggaann

SEQ ID NO: 24837 - DNA, 2745 bp, Homo sapiens; identical to SEQ ID NO: 21375
  misc_feature 1, 2, 3, 2734, 2735, 2736, 2737, 2738, 2739, 2740, 2741,2742, 2743, 2744, 2745: n = A,T,C or G

SEQ ID NO: 24838 - DNA, 450 bp, Homo sapiens [sequence omitted]

SEQ ID NO: 24839 - DNA, 239 bp, Homo sapiens
  misc_feature 236, 237, 238, 239: n = A,T,C or G
acacccaaggattctgttctgcaactccatcctcctgtgtcactgaatatcaactctgaaagagcaaacctaacacgaaagaggacaaccccgataaggctgtgtccaacggagttcacctccactacaagaacactatgctggccttggaatatggccaaggctctctctgtccctgaaaaagaaaggggcccatattccccaggaaaactgcttcaagcagaaacaatcttgannnn

SEQ ID NO: 24840 - DNA, 1162 bp, Homo sapiens; identical to SEQ ID NO: 21517

SEQ ID NO: 24841 - DNA, 4385 bp, Homo sapiens
  misc_feature 1, 2, 3, 4, 5, 6, 100, 120, 217, 4385: n = A,T,C or G
nnnnnncacaaggtcgttttactaaacggaaacttaagaaaaagaaaagccacatcagccggcacaagcctctctaactttgtgtgccctgaggctcatnagatgcgaagtcctggcganaagatagggtcgcccgcagtggcttcctaaagcgcagatccaggccggctcccagcgtggaatccgacccatgtacttcgcctctccacgtggcatnagatgctctgccggctgtcaccgtgaactccagccctcgcggagccgacactgacctggctacttcagagttcggagggaaatagcgtctccgtaccctcgccccacctgggctgctcctcggaccgccgctcgtcccagactccaggaggcgccaccaggcctcgctgaccccgctccatatctccgggagccctcagctggtcggccgcggcgaccggaagctccggactgaggtactggttccgcccgccgctcttccagccgagactcggcagcggcggtcggagcggctgccacgccgcacctgcccgcgagggggcgcgccaggcccaggccgcagccgactgccgcgctctctgcccccgccctccgccatccccggactgcgctcacctgtctgggccgctggcctgggaggcgggggccggcgggagccaagccgaggaaagggcggagcggctctccgggcgcgtcatcggagcaccatggcggagctaggagctggcggcgacggccacaggggcggcgacggcgcagtgcgaagcgaaacagcacccgacagctacaaagtgcaagataagaaaaatgcctccagccgccctgcctctgcaatttcaggacaaaataacaaccactcaggaaataaaccagaccctccgcctgtgttacgtgttgatgaccggcagcggctggcccgggagcgacgtgaggaacgggagaaacagctagctgcaagagaaatagtgtggttagaaagagaagagcgagccaggcagcactacgagaagcacctggaagagcggaagaagaggttggaggagcagaggcagaaggaggagcggaggagggctgctgtggaggagaagcggaggcagagacttgaggaggacaaagaacgccacgaagctgttgtacggcgcacaatggaaaggagccagaagccaaaacagaagcataaccgttggtcgtggggaggctctctccatgggagccctagcatccacagtgcagatccagacaggcggtcagtttccaccatgaatctttcgaaatatgttgatcccgtcattagcaagcggctctcctcttcatctgcaactttactaaattctccagatagagctcgccgcctgcagctcagcccatgggagagcagcgttgttaacagactcctgacgcccacacattcgttcctggccagaagtaaaagcacagctgccttgtctggagaagcagcatcttgcagccccatcatcatgccctacaaagctgcacactctagaaattcgatggatcgaccaaaactctttgtaacaccacctgagggctcttctcgcaggaggatcattcatggcacagcgagctataaaaaagaaagagagagagaaaatgtactcttcctcacatctggcacccgaagggctgtatctccatctaatcccaaagcaagacaaccagctcgctcccgactttggcttccgtccaagtctcttcctcatttgcctggcacacccagaccgacatcctccttgccacccggctcagtcaaagctgctcctgctcaggtccggcccccatcccccggcaacatccgccctgtcaagagggaagtcaaagtggagcctgagaagaaagatcctgagaaggaacctcagaaagttgccaatgagccctcactaaagggcagagcacctttagtgaaggtagaagaagccacagttgaagagcggacacctgctgaaccagaagttggccctgctgctccagccatggccccagctccagcctcggccccagctccagcctcggccccagctccagccccggtccccaccccagccatggtctcagccccgtcatccactgtgaatgccagtgcttctgttaagacttctgcaggcaccaccgacccagaggaggccacaaggcttctagctgagaagaggcggctggcccgagagcagagagaaaaggaagaaagggagaggagggagcaggaagagcttgaaagacaaaagagagaggaattggctcaacgtgtggctgaagagaggacgactcgccgtgaggaggagtcgcgcaggctggaagccgagcaggcccgggagaaggaggagcagctgcagcggcaggcggaggagcgggcgctgcgcgagcgggaggaggcagagcgcgcccagaggcagaaagaagaagaagctcgcgttcgtgaagaagcagagagggtccggcaggaacgagagaagcatttccagagagaagagcaagagcgcctggagagaaagaagcgacttgaggagattatgaaaagaaccaggagaacagaagctacagataagaaaaccagtgatcagagaaacggtgatatagccaagggagctctcactggaggaacagaggtgtctgcacttccatgtacaacaaacgctccgggaaatggaaagccagttggcagcccacatgtggttacctcacaccagtcaaaagtgacagtggagagcactcccgatttggaaaaacaaccaaatgaaaatggtgtatctgttcagaatgaaaattttgaagaaattataaacttacccattggatctaaaccatccagattagatgtcaccaacagtgagagcccagaaattcctttgaatccaattttggcctttgatgatgaagggacacttgggcccctgcctcaggtagatggtgttcagacacagcagactgcagaagttatatgagtgtttcttctgaagaaccaaagctgaaatttaatgagaatttctacaattaatggaattcctttcctgctataaaggagcatcccctccacccgttttctagagttcttgaccatcattttgaaaagatttattaaaactagctaaagacaacagactggatagcttttctaataattttcatcaataggaaaaaagaaatacgtctcattcttcaatactttaaaatggctttttccagtgtgctccttcttagcaatcaatatttttctgcattctttaaaagacaagagaatttggttataaaagaaatgggctgactaggcatgatttttttggtcttaaaagcttaacatgtaaaattggcaaaaaaaattttttaccttttataatacttgaaaaataagtacctctttgttctacaagtagaatgaataggagaagagtttaagcctgtttttttaaaatattattgcaaagagctctatttgtagaagcaaattataggcagattaccaggttcttataaatacagcttgtacatggacattctgcaaacccagctgtcacatttttcttgcaactccttttgcaaaagcagactaaaatgttttaaaatgtgaaaaaacattattttttcaaagcaagaaaataatttactgccctcttacataatgtatttataaagtttttccagataaactaatcaaataaattagaataatgtgacaacattacaaatttaatttgttagctgcattccttctgatgttaccacgatagaatgttactgatgattcagggctatttctgaagtctgtatgttgctgctgtccccagtgatggtggacttatctttgccttacctgatcacaaattatgttggggaaaataaagatttaatatttctttaaatagaaaaagaatttggttttgctcgtttaagagcaatgagaaaatgatggaatgttgactgtgtttggcacacaggacacggaccttcatggaagtccttgctctgcgtggcatctgtcagcttttcacctttcattcttattcttcacttttgctgctgagcctagctgtacaaacttgcactttcatttgctaatataaattcagttttattttaccattttagagactactaatgattaaatgtagaaggagagggtgcacatgtttttatgtggagtgtttaaaagataaatttataccactgtaatgtgcagcttttattaaaagagaaattggttgaactgctaggtcgaatgagagaacttcatctatggactaattttttttaatcccggcctaatggtcttaaaaaggcttgtatttgggaaaacttattcgggggcttccccggtttccgtggcaggttccctattctttttcaaaaaccctcccaccgtttctttttctccctcn

SEQ ID NO: 24842 - DNA, 3246 bp, Homo sapiens
  misc_feature 1, 2, 3, 4, 5, 6, 7, 3245, 3246: n = A,T,C or G
nnnnnnnaaaaacgagagtgttatttctttatttgtgggaaattacggtatctattttcttccaaacgtaataataattcttagaaaatagggactcctttttgcggaataatccatagggggcgaggccaactctcgcgagtcgaggtatcttctccccaaccactgctcttattttaattattgcagacggaagttgaagactattgacatagtaaatagctctgggtggcttgaaacgaaagtttaactttgcggacaaacaggacttattgtagggggtggtcaaaatagtcccggcggggcggggccatgacccctgacgtcgccggtccggcgcgcagttcagtttggcggttccggtaccgctctcacattggggcgggatgtgggagcggctgaactgcgcagcagaggacttttattctcgtctccttcagaaatttaatgaagaaaagaaaggaatccgtaaagacccatttctctatgaggctgatgtccaagtgcagttgatcagcaaaggccaaccaaaccctttgaaaaatattctaaatgaaaatgacatagtattcatagtggaaaaagtgcctttagaaaaggaagaaacaagtcatattgaagaacttcaatctgaagaaactgccatatctgatttctctactggcgaaaatgttggaccacttgctttaccagttgggaaggcaaggcagttaattggactttacaccatggctcacaatcctaatatgacccatttgaagattaatctgccagttactgcccttcctcccctttgggtaagatgtgacagttcagatcctgaaggtacttgttggctaggagctgagcttatcacaacaaacaacagcattacaggaattgtcttatatgtggtcagttgtaaagctgataaaaattattctgtaaatcttgaaaacctaaaaaatttacacaagaaaagacatcacttgtctactgtaacatccaaaggctttgcccagtatgagctctttaagtcctctgccttggatgatacaatcacagcatcacaaactgcgatcgctttggatatttcctggagtcctgtggatgagattcttcaaatccctccactctcttcaactgcaactctgaatattaaagtggaatcaggagagcccagaggtcctttgaatcatctctacagagaactgaaatttcttcttgttttggctgatggtttgaggactggtgtcactgaatggctcgagcccctggaagcaaaatctgctgttgaacttgttcaggaatttctgaatgacttaaataagctggatggatttggtgattctacaaaaaaagacactgaggttgagaccttgaagcatgacactgctgcagtcgatcgttccgtcaagcgtcttttcaaagttcggagtgatcttgattttgctgagcaactgtggtgcaaaatgagcagtagtgtgatttcataccaagacttggtgaagtgtttcacattgatcatccagagtctacaacgtggtgatatacagccatggctccatagtggaagtaacagtttactaagtaagctcattcatcagtcttatcatggaaccatggacacagtttctctcagtgggactattccagttcaaatgcttttggaaattggtttggacaaactaaagaaagattatatcagttttttcataggtcaggaacttgcatctttgaatcatttggaatacttcattgctccatcagtagatatacaagaacaggtttatcgtgtccaaaaactccaccatattctagaaatattagtcagttgcatgcctttcattaaatctcaacatgaactcctcttttctttaacacagatctgcataaagtattacaaacaaaatcctcttgatgagcaacacatttttcagctgccagtcagaccaactgctgtaaagaacttatatcaaagtgagaagccacagaaatggagagtggaaatatatagtggtcaaaagaagattaagacagtttggcaactgagtgacagctcacccatagaccatctgaattttcacaaacctgatttttcggaattaacactaaacggtagcctggaagaaaggatattctttactaacatggttacctgcagccaggtgcatttcaagtgaagtgtgctgatgaagtcctctataagcacaaaaagagaaaaaaaggtaattattgtagaacctgaaaacagcaatgtatggaaacccctcaaagcagaaaagggaggaagatcctgaagattctcttatgaagctccaaaattgataatcctgtctcagctctgcctcctcaggaggagcattagtagaacagcagtgatgaggacacagagggagcagacagtgggtaccacgatctccgtaaccatttgcatgtgacttagcaagggctctgaaatgacaaagagaacgagcaccccatggaaccgatctttgaaaaacggttttcccaagttagggtttggggaattcaaaaaatagcatcctcaaattttctgattcttatttgccatgaaatagaacttagtaaattaaatgttatttgaaaatgttataagagctttgtaaatatttcagaaaatatgggataaatgcctgaatttggttcttctacaggtgctataataaagtccatctctcaatacttatactttctaaattcatctcagaatattagcagccatattccacagttcctataatttttactgggggggatttgtgataggaaagtccttgggaaacatttccaatctttcaaaatattattgtgtatcttaagaagtataggaacttgtatgttgaaatgttgtatggtagttcttgtatagttaaataataatctttttaagagttaatgataagcatatgttatgtgcattattaataaaatagtggccacttaggtaatacccacttttatcttgtgtgctgggtactctggttactgagataaataaggcactggacatcctcacgtggagttcacaggctcatcagtgaattctgtaccacatttcaaccttgtttattttagtttaatggaatatacattcttagtattgcctgattatttaaatttgttgagggggatggcatgttgctttatgggcctgtaaaaatagctagtttggtaagattgggtctcgcaccttccatctttgctaccacattaaagatgagcttaactccaagggaaagcann

SEQ ID NO: 24843 - DNA, 990 bp, Homo sapiens
  misc_feature 59, 60, 61, 62, 63, 985, 986, 987, 988, 989, 990: n = A,T,C or G
catactggcctctgtgattacatagatcagccattaaaataaaacaagccttaatctannnnnacatgaaaatttgaaatggtaccatgtaaaattcttctatgtcaactttttctgatgtatgccagttcatttactgacaaatgtgttactaagtgcttattaagaagtgtaaatacgctataacaaagttaatacttttgttcagatgtaaggcaacagatcattgaatgccgtttcagatgtactgattgtatttataactttcacgttggtgggagtacctctttgaggaaactttgtggatgagaattaggtacgagatacaaacccccaaaaagtttattcttaccaaggtacaagttcttgtggtcaatggggccagggacagactctattttacccagaaatactagagacctcaaaacaaacataagaggtaacttggaggagggctataatgcttgcatctcagtatttcatttcacttcatcctttcataatacgccttgatatatggtagcagctaaactattacagcaccttccggctatggtaacatgactatgaccatattcatctcaacgtctcaaaacatctagtatgttaatatacaaattacctgactaaataggattgagtcacatacctagaaacatttatataataatttaattatgcacaatttttaggttcccaacttataacaaacatacctgagataaggtatggccgctccaatagaaggttacagattcagtgacacccacaaaaaacaaagcaagggcaaacaacagcgtggactggcaaacaagccacaaaggtcactaaggcccacagagcaagacgaatacatgctgcgccaaggagacgcatagggcaagagacacacacaaacaacaccagaaaaatggcaataaacggcagacaacaaaaagacagaaaataaagagaaataaaagaaaacggagacaaaaacgcacannnnnn

SEQ ID NO: 24844 - DNA, 2986 bp, Homo sapiens
  misc_feature 2986: n = A,T,C or G
cgtccgcccacccttgtctgattcgggcgtggtgactgcctggttattgagatttgggagcacgcatatttaaccccagacagatgcccgcagacaaaattttggcttgcaagtaaggtatatggccgcaccagtcgacccgccgcttcttcccggtcatttccccgtcctccttctccctcctccgctatttccttaactacggggcaggcaggaggcggggccagcgtggtcgcgaagaagggacgggcgggcgtgagctgtcagtcagaagctccgccccccccccccccccccgcggagaccgcacggtgggcggagtcgggcgccgcaggcctgggatccggaagtcggagcctagctgcgcgagagtttctgctcgctcaaccgagttgtcgtgttgccctcgcttctcagatccccgccggaagtgaagagagcaagcagatttgaacctatctgctttcaagctggtcatcatgatgaaacttagacacaaaaataaaaagccaggtgaaggttccaagggccacaagaagataagttggccctaccctcagcctgcaaagcaaaatgggaagaaagcaacctccaaagtgccctctgcacctcattttgttcaccccaatgatcatgccaatcgagaggctgaattaaagaagaagtgggttgaggagatgagggagaagcagcaagccgcccgggagcaagaaagacaaaaacgcaggaccattgagagctactgtcaggatgtcctaagacgccaggaggagtttgagcataaggaggaagttttgcaggaattaaatatgtttcctcagctggatgacgaggccacgaggaaggcttattacaaggagttccgtaaggtggtggaatactctgatgtgattctggaagtcctggatgccagagacccattaggctgccgctgcttccaaatggaggaggctgtcctgcgagcacaaggcaacaagaagctggtcctggtcttgaacaagattgacctggtccccaaggaggttgtggagaaatggctggattaccttcggaatgagttgccaaccgtggctttcaaggccagtacccagcatcaggtcaaaaacctgaatcgttgcagtgtgccagtagatcaggcctctgagtcactgctgaaaagcaaagcctgctttggagctgaaaacctcatgagggttctggggaactattgccgccttggtgaagtgcgcacccacattcgtgtgggtgttgtgggtcttcccaatgttgggaagagcagcctgatcaatagcctgaagcgcagccgcgcatgcagcgtgggagctgttcctggaattaccaaattcatgcaggaggtctacctggacaagttcatccggctcttggatgctccaggcattgtcccagggcccaactcagaggtgggcaccatcctgcgtaactgcgtccacgtgcagaagctggcagaccctgtgaccccagtggagaccatcctgcagcgctgcaacctggaggagatttccaactattatggcgtctctgggttccagaccactgagcactttctgacggcagtggcccaccgtttggggaagaagaagaagggaggcttatatagtcaggaacaggcggccaaagctgtcctagctgactgggtgagcgggaagatcagcttctatataccaccaccagccactcacactctgcccacccatctcagtgctgagatcgttaaggaaatgaccgaggtctttgacatcgaggatactgagcaggccaatgaagacaccatggaatgcttggccaccggagaatctgatgagctgttgggtgacacggacccacttgaaatggagatcaagttgctccattctccgatgacgaaaatagcagatgccattgaaaataaaaccaccgtgtataagattggagatctcactgggtattgcaccaatccgaaccgtcatcagatggggtgggctaaacgcaatgtggaccaccgccctaagagcaacagtatggtggatgtctgctcagtggaccgccgctcagtgctgcagaggatcatggagacggaccccctgcaacagggccaggctctggcatctgccctgaaaaataagaagaagatgcagaaacgtgcagataaaatcgccagcaagctgtctgattccatgatgtctgctctcgacctctctggcaatgctgatgatggtgttggtgactaatcgactgatctcacttcccttccgctccaagcaccagttccggtggtacgggggaataccagtgaaatagtttggttctccctgaagcatctgcatattgaaagaacgctttccccactgtgtgtcttctccccctcctccagtaaaaacagtcccggctgggtgctgtggctcacgtctgtaatcccagcactttgggaggccgaggtgggcggatcacctgaggtcgggagttcgagaccagcctggccaacatggtgaggccccgtctctactaaaaatacaaaaaaatttagccgtgcttggtggcacctgtaatcccagctacttgggaggctgaggcaggagaatcgcctgaacctgggagactaaggcaggagaatcgcctgaacctgggaggcagaggttgcagtgagcccagacggcaccattgcactctagcctgggcaacaacacgaaactccggtcctgatcccatacaacagaaaagtgctacacaacatacatttggacaggagtactcattcatgaatcggcgcgagcaggaaagaaagggacgggatgacaatgagagttgtggccctggtggtgcataaagcgttggttttccttgaccccctggtattcctctgacgttaccaaagtgtgtcaatgaaactcgagccaggaacaccaccctgaatacggtaagcgctaagataatattcagagtacacaccaagcggtaaccccgtgcttatcgactatctaataagaan

SEQ ID NO: 24845 - DNA, 2071 bp, Homo sapiens; identical to SEQ ID NO: 21824

SEQ ID NO: 24846 - DNA, 4399 bp, Homo sapiens; identical to SEQ ID NO: 20975

SEQ ID NO: 24847 - DNA, 2239 bp, Homo sapiens
  misc_feature 1, 2, 3, 4, 5, 6, 7, 8, 9, 2239: n = A,T,C or G
nnnnnnnnntataggagtccagcccacgcgctccctcggcctgtgccgccgccgacgccgcttgtgggcccgactccgctctgtctgcttcgccaccttctccccgagcactgcccggccggccgccatggctaacgtggctgacacgaagctgtacgacatcctgggcgtcccgcccggcgccagcgagaacgagctgaagaaggcatacagaaagttagccaaggaatatcatcctgataagaatccaaatgcaggagacaaatttaaagaaataagttttgcatatgaagtactatcaaatcctgagaagcgtgagttatatgacagatacggagagcaaggtcttcgggaaggcagcggcggaggtggtggcatggatgatattttctctcacatttttggtgggggattgttcggcttcatgggcaatcagagtagaagtcgaaatggcagaagaagaggagaggacatgatgcatccactcaaagtatctttagaagatctgtataatggcaagacaaccaaactacaacttagcaagaatgtgctctgtagtgcatgcagtggccaaggcggaaagtctggagctgtccaaaagtgtagtgcttgtcgaggtcgaggtgtgcgcatcatgatcagacagctggctccagggatggtacaacagatgcagtctgtgtgctctgattgtaatggagaaggagaggtaattaatgaaaaagaccgctgtaaaaaatgtgaagggaagaaggtgattaaagaagtcaagattcttgaagtccacgtagacaaaggcatgaaacatggacagagaattacattcactggggaagcagaccaggccccaggagtggaacccggagacattgttcttttgctacaggagaaagaacatgaggtatttcagagagatgggaatgatttgcacatgacatataaaataggacttgttgaagctctatgtggatttcagttcacatttaagcaccttgatggacgtcagattgtggtgaaatacccccctggcaaagtaattgaaccagggtgtgttcgtgtagttcgaggtgaagggatgccgcagtatcgtaatccctttgaaaaaggtgatctttacataaagtttgatgtgcagtttcctgaaaacaactggatcaacccagacaagctttctgaactagaagatcttctgccatctagaccggaagttcctaacataattggagaaacagaggaggtagagcttcaggaatttgatagcactcgaggctcaggaggtggtcagaggcgtgaagcctataatgatagctctgatgaagaaagcagcagccatcatggacctggagtgcagtgtgcccatcagtaaactctgcaaacaaattgcacaggtggattttctttccacatttgcctgatttgttctcagcaatccagctggagtgtcttatcaatccagatgaactgagggacatctgttggtctatgtataacttttaaaattggtatagtatctacagagtgtataatttaaactaaccacaaagctttacatcttcattttgactgttccatagcagaataaagcacttgaaaggaaacaagactccctttcacacatggattattataagtttcaatcctggtatctgtgcttgatttttatcagttttgtgtagatttttatgtttcatattttaaatttaaatcccacattgtaaagtttgtacaatttgtcctgaagctttgtgtttggctgcacctgcataagctgctacaaatagaataaagaatttcatagcctgtatctatcatttagatgcatggaaaaaaatgggctttgcacacaatgggtttggagctgactgggaacaatggaaaaaattacattagctgtggttgtaaagtttttttgtttttggttttgtttttttttcttttttctttttttttttttaccatcttgtgaaaggtttctgaaactcgataataaaaagcggttggtgtaaatttaaaaaaaaaaaaaaaaaaaaaaaaaacatgtcggccgcctcggcccagtcgactctagactcgagcaagcttatgcatgcggccgcaattcgagctcacttggccaattcgccctatagtgagtcgtattacaattcactggccgtcgttttacaacgtcgtgactgggcccctgcgttacccacttaatcgccttgcagcacattccccttcgccagcttgcgttgcn

SEQ ID NO: 24848 - DNA, 1264 bp, Homo sapiens
ggccgccttcttctttacaggggccttctccgcaggaggcgcggcagcgggagcggcaggagcagtctcggacatgttgagaatcaaaaaacctcggccggccgcccgggcaggtcggcggcgttggcggcttgtgcagcaatggccaagatcaaggctcgagatcttcgcgggaagaagaaggaggagctgctgaaacagctggacgacctgaaggtggagctgtcccagctgcgcgtcgccaaagtgacaggcggtgcggcctccaagctctctaagatccgagtcgtccggaaatccattgcccgtgttctcacagttattaaccagactcagaaagaaaacctcaggaaattctacaagggcaagaagtacaagcccctggacctgcggcctaagaagacacgtgccatgcgccgccggctcaacaagcacgaggagaacctgaagaccaagaagcagcagcggaaggagcggctgtacccgctgcggaagtacgcggtcaaggcctgaggggcgcattgtcaataaagcacagctggctgagaaaaaaaaaaaaaaaaacccacacacaaaacacaaaacacacaacccacaccgggccacacacatcccgcgggagcgcgccacaccccccggccaccccacaggacacaggcggacctagcgcgatcccaagagcaacaagcctaagtgacaaacacagggacaacaacgaacgaataccaccaaagacagccacataacaacagcacaagaccaagaacacacactacctacagacactgggggagacaacatatggaccgccagcgctatgatccacatcgagcgaacaacgaagccgacctgaggcgaagaacccgcgagacgaccaagaaaacagcgcggagagcacaccagagtagaaccacactcaccacgcatgacacatctattctccacactcctacacggcggggaaaggacagggggtgcagaaggagaacggagagtggagggacgaggggagagtgagcggagggaggagaagagggcggtgcggggagacggcgaagtgaggggagagtggaggagggcggacgggggagtgaggagaggcgcactgaggggcagccgagtggacgccgacggaggccagcgggggggtgggggggggagccacgaggcggtcagatgagcagcgggggtcaagcaggccacgacgggcgagcgaaggagagggagagccaggggggagggcgaccagcagacggtctcccga

SEQ ID NO: 24849 - DNA, 2929 bp, Homo sapiens; identical to SEQ ID NO: 21129

SEQ ID NO: 24850 - DNA, 1198 bp, Homo sapiens
  misc_feature 1, 1197, 1198: n = A,T,C or G
nataagaagaggagtgacaatcaagccaacagtagatgatgactgaagaataccagttaaataatacattcggatggatttggaagttggaattcctcttaacaaccaaggggtttattttcaaagcaatattggggaattgatttcacagttcgttaccttagtaggtaacggtaaggttattcttttttttttttttttttttttggttatgaaaacttagggactaaaattaatataaaaattggcataatgttggattgaatctacattttggcagaagttaaacattcccacataatgtcaaaattatacatcatgcagttctgtttttttgtttgttttattttgttttgtttttgagtctggctctgtcacccaggctggagtgcagtggcgtgatctgcaacctctgccccccgggttcaagcgattctcctgcctcagcctcccgagtagctgagattacaggtgcgcgccaccacacttggctaatttttgtattattagtagagacggggtttcagcatgttggctaggccggtctctcctgacctcagggtgatcagcccacctcggcctcacaaagtgctgggattacaggcgtgagccaccttgcccagcccacatcatacagtttgaaatgaaactttgccacaaccagcctttgctgtagcacacacatatatcactgaacctgtttgaaataaagttttttttctttttcatgattcgtctttgagtacctccaggctgaaagactgttgtaccagtaaaaacttaaaggcacaaattctccttgaagaccttctcccttttatgtggccccatattttatgttgctttatctttgaaattttgctgaaacaggaaatgaatggattcgaatgaaattgtctttagagcatgattactgttcccatggacaatatttttctcccttgtcttcctggctgaacacggaaccagagtcaaagtatctccctctcctgtgatgcttgagattttctggtgttatgctgaatcagtttctctggaaatcctgttttcaatatttgatggtaccagatctttggctatagtgttacggttacgggggatttcccacttggtgcagtgctaagttagaaaagggtcatcggcgcccttagctaggttaggacggaggtgctgtgcactcttgtggtgtggggttcnn

SEQ ID NO: 24851 - DNA, 802 bp, Homo sapiens
  misc_feature 788, 789, 790, 791, 792, 793, 794, 795, 796, 797, 798, 799,800, 801, 802: n = A,T,C or G
agcaaaaaaaaaaaatgtaatgaatttagctatcctaaattggaatttttacagattgcatgcatacttagaattttaaatttttaaaagatttacaattgagtatggtacccacagagagtgagtaccaagggaaggaagacctaatacaagtgatgttgcctgataaatcacatcttgccaaaaaaaatatattttagtaaatacagttctttaggaagaaaaatgttgccctttcacactcacagtgtaaatacattcataatattccttcaatcatctaaattaccgccaggtcatgaaaggacgcgatcaatgatgacctattgcactcacaggtaacattgactcaaattttggcaatattgctatattatctagataattcttgtgatgtttttatgtcactatcaacattaaaaatattttgttaaacaactatgaaactttcaaaagtttgcatataactgtatgggcactctcatttcactgcatacatacaatactttgtatacacatacttctcgtgtggatattttataattttatttaatctaacatttaacttttaggtttttgtggtactcatctgaaaggttggcatttgttttctttttatgttatatatgtattttagatgaatcaataatgtgtattcctagaaattttttctaggcataaatagatcattttatgttggcatttaagagatatcatttttgttttattgttctgtgtaaaccatattcattgtacactgtgtgtatatttttgtttaaataaatgannnnnnnnnnnnnnn

SEQ ID NO: 24852 - DNA, 2549 bp, Homo sapiens
  misc_feature 2363, 2442, 2487: n = A,T,C or G
gctgaatatgtcgtatatacatatatataatattttattttaaaatgtcattgaacatatacatttctttagctttttccaggggacattacacctaagtttcaaaacacacaaaatagatcccctttactaaacagttttcattttggggtcacaaaaaagtcaatgtttcacaatcacaaagcataaaggtacatggttctgaaacaatttccaggcagatttctctcattcactatactagggtagttttggaaacccagaccatgatccattccttacaaatgatctccaccatgggcctccctgggtctccagaaaaaaaacaaagaaaactgggggcaaaacaggagtaaaataataacctcaggactcaggaaacaaacacaaaatacttgtgggagatcagaaaagtagaggacacaggttctccttcaagtacatcacagtagaaaactacagcacatttacagccttatttggtcactgtctacctggttgctacatgaacaaaacttcacctaagacacagaagaaaaattaaagctatttacacagataacactgtggattcgaaagagcagtcctctgcagaccggcactccatctgacaaaagccacagtgctcacagaagaggcaagtcagtctgctcgcgtagcgtcctttgaaaaatcccagtgtacaaacatgtgccacgtcaccacacaaaaccaaagtctgctcagagaggtgggctatggtgtgcaggctgcaacctttctctgcaattgttaagtcttcaaaaatctgagttcctcacataaaattctgtgctgtggccagagctcgttttaccattttcttagattggatcacttttaggatcagcttcgttgttctttgcgtagacaatgactctcacagctttctccaagtgtcccagaagcactaaattactgaaaatagaatctcatcaaagcttaacatattcactctgaaaacagcggagctgctgggtcgcttaaggaaagctgagaacctcaaacctgtggaaggaaaaccagtgaccacttgtggccttataaagttgattggcaggtgaggaaggggatctcaagaggagaatccgaatttcaaagacatgggagatttgtccctaatgttttcatactagtgctcttgttaaatggaaaacccttcctgaatggggaagatctgaggctaaatctggatcctgggactctcattcttgcccaccaccatctccctgtggctgtcattcttccctggaagtgaatgaatactgagaacacagtaagaggagggtggtcacagctgacttcacaaagcctcatggaggttaagttgttcaagaatttaaaaagtaaacaccccaaatcctccaaaatggaatactgtggaaaataactgaaatttccactgcttaaggcttcatcctattaagacagctgagtacttggcctggcccgattttcacctttccttttacacctcaagaacagcagataggtatgcataaccacagcagaacacaccctccacctctctgactgctgacactggctacaggaataaggctttggttatcatctagcaaaatgccacagagcatggacggactgagtttgttctaaggaaaggagtttcaccagatagtctgaagaggcccagcccagcaaagagatttagagcaggaaagcctttcattaaagtagccacacacccctcgagacaaccataaagacttgactaggaaatcaaaaggtttttattaaacaagacttcctctgaggctattcgagcaagcagatttggctataagtcagatacgcaagatttctgaaccatgtataaatacgttctgcagaatttcgaagtgtgcgtcctttgacttttccagggatgcaccaggggccaacccgttatgtagacacggttactgttttaggactgggtgacatggggcctgggtaaaaaaataaggccaaaactgagtaagctcaatttatagagcaatatcagtgctggacagatctgccatgcttcgtttaaattcatgtttcctacttttgatttcttcatcttatttatagtcttcctcccatcccctgaacacaaacttgactttatcttctaactaagattctttccactcaagggggcgtaggaaaacaattcctggatgcctttctaactaaaaccagcaggactaagtgctcaagattttataatatttcgatttagaggtttctagagttattcctgagacgggccatagcagtaaatgaattggtgaattgagtagaaggtagttgtgacatctacacccaaattcttactctggtggcttgaataactggangagctcaaggtaggggccctagatagaggcccaggaaagcaaataaatgaaagacggtgggacacaggaaggatcccanagacggcagctcaggttcctccacggaagacttgctcaggtttcntacttacacatgactctgagcgccagggcagaacagggagtggaccacactgctgctcgtgc

SEQ ID NO: 24853 - DNA, 2012 bp, Homo sapiens; identical to SEQ ID NO: 20122

SEQ ID NO: 24854 - DNA, 4149 bp, Homo sapiens
  misc_feature 1, 2, 4139, 4140, 4141, 4142, 4143, 4144, 4145, 4146, 4147,4148, 4149: n = A,T,C or G
nnagttgatggtttattttaaaagatgcactttgagttgcaatatgttatttttatatgggccaaaaacaaaaaacaaaaaaaaaaaaaaggaaagaaaggaatgaataaactttgtagtaatcaactgtgaacttcaaaccaggttgattttagtaacccaattgctttgatttgacattaatgtagtcttacagggctgtgcttgctgggcatgcttttacgtctgtgagataatttcggttcagtaaattggccaatctttttatttttctaagacacagaaatgtatttaataaaaacctcgagagagtgatgggtggaaccccttctccttgaaagtgtgtacagatattccattttgtttggatatagtttataggaaagtgtgtggatgtattatggcggaaggtttctttatgttattttgttaatttattgggactctgtgtaaggccaggctttagtggtcattagacaccacatgtgttatgagccccttacccatagggttgggggtgggaagagaagcatatttttttgccattccggaagcaatccatttttattcacttgtgtgtcatgtaatggtctttggcaggagagagcactgagtcattgctggagttcagttcaacagagctgcagcttgggaagccctgtaagcccacagcttcctctcttatattaattgatggaattttactgtatgtgcctctgtacaagatgtagctttgagagctacaaaatgataacactgctttattacacactggtttcattgtcattgcaaaaacttaccctggttgtgggggagagttctagatctgtgccatgatccatacactggctaatagagtacataatttttccattttccattttttgtttttacttactactgaaggatctcagatgtaaaattatgtatttggtttgagatggccacttattgtccttaaaaatccatactgatatatgcagtcattttgaatttggacagtgccttctcttttttttttctcctcttcttccatctccctcacccatgcccccacccaatctaaagagacagtgctgtacattctcatagagatagagaagatctaaaaagttgagactactcaatccagttaacaacagcaggagcactagagtttgttcatttattctctctgtaaaacaagctgtgctttttttcttctgcctttaaaatgccacccgtgtattcaaaccatggccacttgatacttatgtagaatccatcgtgggctgatgcaagccctttatttaggcttagtgttgtgggcaccaatgtcgagcatcgttgtgacttgtgctgtatgattctcactgaagaatttcctttcagccaagaagcagtgaggtctgggaatattccaaagtcatgtctctgaatatgtgtccttgacatgcaagctttgtaaaaccccatccccgcttaggtgcgaggcatcaccttctcacaagtgtttagtttcttttaaccacaagtatcattcttgggtgataatatagtttcattctacttagggattgtttagaaaacaaagaaagagccaattaaattttttagtttttgaaatttttatttatatgtatacttagatgagtattttaagctgtcgacctttagtttgccatacgggtaggactgtatttcatgttaacaactggtggtaatgataagccttcttctagcgtattttctcttctttcctgtcactttcctaagtttttttttttaaagactggaattttttttggctttatcttgtcttaccgtagagatttgttcaaaactctaagccctaccacctcccctttaataagctctttaaatagttgaatcattaacaacctggtgggaggcaagtcatttaattgaaccactaggaagtgtattttcttttctttttctgccaactttttggtggcatttgtaaaagctgatataaaaggctctgagatgttattttcagttattccataggcaagcctttttacagagcatatgtctccagttggcagcttgagatatttccgagcatccggttctagctaccagtgcctcccaatgcttagtgcacagtactgtagactggccatcacccctctccttggaaaatgccactgtgctgtttgaaaaaaagcagccttttagggctagagtattttatataaacagaagagctaagttcctgaagactaagctagatagctgcagctatatgtaaattgtatatttttatgaacttttgaagcacacactcctgtttccctctgtgtagctttgtggggatttcatgtatatatgctgtctgaaagaatccagaggttggagtgccaatagaaaatgaaaacaaatgccttgtactacaggcagcctctgaaggtgaccagataactgtcttcactgtgaccagtcggagtccctgcttgcttgtgaagaaggggcttttgtaccttgttggagatgccacctcagaagttcacactgtgcaggaaaaaggttttattctctcctggcatacattagaatgtcagatgcctgcatccatgtggaccacgatgggcctctaaaaattggtgggcagggggtttgcttatgagttttctctggaaaccgattttactcctggatgtattgaatgccccttgagctttatgagatacgagtccacatggataaaatgttagagagtggagttctacagaggattccaggaagaggccatgtctgtgcagtcctagttccagacaggtgagaagctccaggaactactggctaccttgacaagctgggtaaatagttatcattctgggtaactggttgaaactctgacttttggacaagtaattcctggggttctgtctttggtagcatcaccagggatatttgggtgggacagacagaagacacacagctgcctgttctctcctgcccatcatgtttggcccactagatgaagctgtactcagcaatttagggaatgtaacccttctcagaactggccattttcaggggaagcttgggagagcaatagtatggtgagccccttagagatgagcgcctactccttcttggcgaatgctgccttcagatgcttaccaagtggtcactgcatctagtaagattatatttccagtacacttccttagggcagaaacaccatcctatcaggtttggtcagtcccttcttcatgaagggagtcatggggaattcctgaaaattttcttccttctgcagacagttggatgagtcccttagagaaggcatccagagacataactaaactgaatatcatcccatattgattttaggaattgactctaaaactctgtgcagaatcttgtgttgggattgtatcttgacattcctgttgtgttatttttcttaactggagtgtgtgctgcctttcaggtacaatttttgtgtaataaaagccagtgcattaagtttatatagactactttctatgcaagactgagatatggaatagataggaagagatatgtactgctgggtacatggacagtaagtgtgttttcagatggagtaccagcaccgaaaatgggttgagggaggatgggttgtatgtatgtttctgcccactaattttgagcagccatattatgaattaaatcgtcacagccaagtaataacccaagaatggtatgagtttcatgtgtaatagctcaaatggaataagcatgaatgctggagtggaccattatcctcaaatattctatgtcacttctcatttaaagactcttgttatgaactattagaaactttaggcaaaatcaaaagtatttgcggcaaaataaaggcctattctactcttatttaaagtgaaacactgtatacttgtttctctccaaagcgaaattagtattataatttcattggctcgatagttcaagtcactgaattctgtgaggtgtactgttttgtggcacttagatatttggttcgtcacttctcctgataaactacgggtcgaaaactcttgaatcggtctggggttggggttaggaaaaaggggggtcgaaaaaaaaaaatgtggggggcgaaataaaatggggcaggaagaggaaggtggaaaaagggaagnnnnnnnnnnn

SEQ ID NO: 24855 - DNA, 1426 bp, Homo sapiens
  misc_feature 1, 2, 3, 1417, 1418, 1419, 1420, 1421, 1422, 1423, 1424,1425, 1426: n = A,T,C or G
nnnctcaaatattcgtcccaacgtaatcctgtaatcagtggggtgccgggttgagctcgcaaatccccgctgcaggacagggctttgcaccctcaatcttctcatccccagatgggatgggcgggtcgggaggaggagcgacgagagcccaggaaagcttgaaggcagagatagactcgcgtctctaagacatatacataatatagccgcaaccgcggggcttactttcccggagctgcatccccttttgggcgaagagcggaggcagaccagggactaccctaggtgaaagggcagccacctggccctacccgggctcaacgccgagcctctcggaggtacggcctcccgggggaccttccagactggtcggcgcaagaaagggcggggaccaccgaaggagtgtgtgacttaggcatccagcgcactgcctgacccgaagtaccgacccgagttatgcccaccctccagccgtcgcggcggggaccatgttgcttccgaacatcctgctcaccggtacaccaggggttggaaaaaccacactaggcaaagaacttgcgtcaaaatcaggactgaaatacattaatgtgggtgatttagctcgagaagagcaattgtatgatggctatgatgaagagtatgactgtcccattttagatgaagacagagtagttgatgagttagataaccaaatgagagaaggtggagttattgttgattaccatggttgtgatttcttccctgaacgctggtttcatatagtttttgtgctgagaacagataccaatgtattgtacgaaagacttgaaacaaggggttataatgagaagaaactaacagacaatattcagtgtgagatttttcaagttctttatgaagaagccacagcatcctacaaggaagaaatcgtgcatcagctgcccagtaataaaccagaagagctagaaaataatgtagatcagatcttgaaatggattgagcagtggatcaaagatcataactcttgacttataaggctagctacttaataatcactcttgttgatatctctgccgacatcatagaaattgttcaagtgtcagtaacactttattaaaatcatgttgcagaaccagcaggtggatagtatataggtttatgcctgtgtttctttttctccatgagaaagctaaacatgaaatataatgaatatagtattattaaggattgagacaaaaactgtgattttaatacttaaattgctaaagaataaataaatctgacaaaatgggtggatatcttttaagtttattacagaaaaaaatgcagatgatctcttaaaataaaactaaagataaagcgcacaaaaaaaaccgggcttttggggggaaaggtgaaggcggcacgctcgcccttggaaggggacggctaggttgannnnnnnnnn

SEQ ID NO: 24856 - DNA, 1715 bp, Homo sapiens; identical to SEQ ID NO: 23747

SEQ ID NO: 24857 - DNA, 1077 bp, Homo sapiens
  misc_feature 1, 2, 1074, 1075, 1076, 1077: n = A,T,C or G
nncacgagggcttgaaggaattagaaaccttgagatttggagcaatcaactgtagagagtatgaaccggaccataacctggaatcaaactttattacaaacccgaggaccctcttagggaagaagccctacatttgcagtgattgtgggcgaagctttaaagatagatcaaccctcatcagacaccatcgtatacactcgatggagaagccttatgtgtgcagtgagtgcgggcgaggttttagccagaagtccaacctcagcagacaccagagaacacattcagaagagaagccttatttgtgcagggagtgtgggcaaagctttagaagtaagtccatcctcaatagacatcagtggactcactcagaggagaagccctatgtttgcagcgagtgtgggcgaggctttagcgagaagtcatccttcatcagacaccagaggacacactccggtgagaaaccctatgtgtgcctggagtgtggacgaagcttttgtgataagtcaaccctcagaaaacaccagaggatacactcaggggagaagccttatgtttgcagggagtgtgggcgaggctttagccagaactcagatctcatcaaacaccagaggacacacttggatgagaagccttatgtttgcagggagtgtgggcgaggcttttgtgacaagtcaaccctcatcatacacgagcggacgcactctggagagaagccttatgtgtgtggtgagtgtggccgaggctttagtcggaaatcactcctccttgtccaccagaggacacactcaggggagaagcattatgtctgcagggagtgtaggcgaggttttagccagaagtcaaatctcatcagacaccagaggacgcactcaaatgagaagccttatatttgcagggaatgtgggcgaggcttttgtgacaagttcaccctcaattgtccatgaaggagggacaccactcgggcagcagaaggctttacatgtgcacagtgagtgtggccgaggctttagcggaaatctactcttcttggtcaccagaggacacactcaggggaacgcttatgtctgtcgggcnnnn

SEQ ID NO: 24858 - DNA, 1137 bp, Homo sapiens
  misc_feature 1, 2, 3, 4, 1136, 1137: n = A,T,C or G
nnnngtgatccatgtgggtctctgagattttcagactttcgatgtcctcaccacatttggaaccttggggaatttgagattccggtgccccatagttcctcaccgggtttcgatatgaagccagtgtccccaattcgatcttacaccgtcttccaccagggagccgcccgtgctaagtctgtttggttaatcaccaggcaatgcaaatacgggcgcgaagttgggtaaatggaagtagttcacgtacccaagagatcatacttccaggtagcagccaagctgagcaaactccaagagctctttcttatcaagaatagtcctatccaggtgtgacatgactgttttggagatgtctgcgcctgcttcttgcaatattcggataatctgaaatggtgccctggagctccgtccaggatggataataacaggacaaccaagctgagcctgggcatgagctgtggcctggagaacctttctttcactctcagtcaaaggccaggagcaaccaatttctccaataatgccacacttgatactggttccatcagctccatggagaatttcattcataaggacatcggtaagctgctccactgacatggccctggtctctgaggagtgagttgcatccacataaaacccggctccagatatgatatggacgccagtctcttctgcaagcctcttcaacgtctgtgtgtctcggctaatcccagtggttgtgttttccaccaagcccctccaccattagctttaaaatacaacagttcttcctttatggcttctgtctcctgatttaattgaaggttttctttatgggaataggcgtttttctgaatcccatataaatttttcatcacgataggttctttggaaatagcttcctggcacgggggaggtggacagtaacagcagtcaaaggtcatggccaggtgttcatgggtcagggtacggcccagtttgcttggctctacaaggcccaaaacggtttggacttttccacttaaggaagacatttctgatggtaccaccaagagatgttctaaaaagaggatttcttttttctcgggtacaacgcgctgccttctccctgggaacttccggcaggccaacttccccggacgcgtgggtcgacnn

SEQ ID NO: 24859 - DNA, 1510 bp, Homo sapiens
  misc_feature 1509, 1510: n = A,T,C or G
atagggagtcgacccacgcgtccgaaagcacttgaaaggaaacaagactccctttcacacatggattattataagtttcaatcctggtatctgtgcttgatttttatcagttttgtgtagatttttatgtttcatattttaaatttaaatcccacattgtaaagtaggtacaatttgtcctgaagctttgtgtttggctgcacctgcataagctgctacaaatagaataaagaatttcatagcctgtatctatcatttagatgcatggaaaaaaatgggctttgcacacaatgggtttggagctgactgggaacaatggaaaaaattacattagctgtggttgtaaagtttttttgtttttggttttgtttttttttcttttttctgtttttttattttaccatcttgtgaaaggtttctgaaactcgataataaaaagcggttggtgtaaattattcttttgtgtcacatttttagaaggaaaaacataaaagaatgtatccttagtactggttcttaaacagcccataaaaacccattggcctgaagcttatatctcaggcctatgcccatcttatagtcttggaagacaaaaggctggtagagacagtcttcagtggcttcagtgatgctctgtagaggccagggtgtcttgagtgctgtaactcccaagcactgggctagcctgacttctgtatctccctaccaccacccccttaaaaaaataaggtaacagcaaatctatagtaaaaccatgtctgcatagaacgtgttcaaatcctctgttttcattaaatgtaaaagatgctgtctccattaagttgaatatttggaattggagaagccattgattattattttgagtttctgtaatgttttatagaaaagtaagatgcttattcagaatttaagaatgaaggcaactgaaatatgcattgttgtagttatttatatttcaaactaaaaataagcaaaaaaaaaaggctggtttgagaaaaatcaggtaaaattgatgaaacggatgttgtgtttctctttccatcatctggtttttaccatttcactcagtaggtatttttagaacacacttatttgaggaaagagacatcagatgcacaattttacatttataaaggaacaaatggggaaaactgaaaactaaaaattttaaatgtattaaatgccatccctgagcctaaatctagtatttgtagtttatttctaggtctgctagaacctgaaaacctgaatgaaaaaaggtgtgctgacactaatcaagtcctgtgaggtttaaattattgacctatccactctacctccattgtacaaaaaatattttacaacaagcctgggtaagattcaacagcatagtagttttgtatccaaggttacttccccacaaccactttaaacataagaaatgtggtggcaatataaagtttgtagcctttccaataaaggtttataaaacagttaaaaaaaaaaaaaaaaaactcgagggggggcccnn

SEQ ID NO: 24860 - DNA, 1859 bp, Homo sapiens; identical to SEQ ID NO: 23056
  misc_feature 1, 2, 3, 4, 5, 6, 7, 8, 9, 10, 11, 1859: n = A,T,C or G

SEQ ID NO: 24861 - DNA, 368 bp, Homo sapiens
  misc_feature 364, 365, 366, 367, 368: n = A,T,C or G
actatgtgcatgtattacattggcaatgtaggaaaagtgagcaatgtgagaaaaaatattgtattaagcaccaggagagttcacaatttattggaaaaagatatacccttaaataattgaaatgaggtgataaaaaaggtaaagatataatatgaagtatgataaatcaattaggaaaatccattgatatgagaaatcaataatgaaaaaataattttgaaaaagatgaaataattgggagggagagggagagtcagttgaaatggggctagcacagaaaatgaacacccagaatacggggaggaaaatagaaaactatgttgggtcgtccctgccgccacataaggcacctcattcatcaggnnnnn

SEQ ID NO: 24862 - DNA, 2583 bp, Homo sapiens
acacatgccttgtcacgtcagaatgattgatttttcctttggctttctcactacaggaaataccagaaatagcccaccaccctacgggtttcatctctcaccagaagaaatgaggagacagcggcttcacagattcgatagccagtgaggtggcatcttgggaagacatggcctattcgtgtaattattgcccatttggctcattccccaagcccctaattcattttaattcattttaaacaaaagcagagtacaccggtattgctccagatcgctcacatcacctgggacagtcccatggcccctatgagtcaactcacagcttgcggggagtgggccttctcctggccttgttcttgctcataaacaggtcacttcctccatgaagagaccagtttccacgctcccatctctcactgctgactcagcgatgcctctgcctcggtctgcttttgaagactgtgaccttcaccaggaggttttacttacaccagtcgggaagattagtccctcattctgcctggagtgccccgtgtttgacttggcagcgggtgtggagccatccccgcgtcctcctggcacattgccactgtggctgtccaggaacaggatgtggctgccttggccgaatgttgtcctactctccccaaccccggcgcctcagctcctcagctcctcgggcccctgcgtctggctggtgtttgcagggctttcgctctgctctggtattgctctgcctttatagaaagtcttattgaagaagtgtaagaaagacctaaggtggggaagactcctacacacaccattagtatcagtgacaccagcaatgtaggttcccagccccttcccagtggcagcttgtgtgtccaggagataggacatcatttaacgcatcagcaaagtagcagcagatgccacatacagagtagagcgaaggcatttggtggatcggtcactagagatctatcttgcagaaagtatgtttttcctcataaaagtgcctcttaattggccattgtaccagccacttgtcctagccaaatgtccaaaacacgcccttgggccccgccacgttacaatccacagattgtctgtctgagtcgtttaaggcatttcctggtgcttgtgttccatgaataaaaggacaaagtcagaagatcactgatgtcttactgtcaacagagatattttaaaagagagaagcaggaaaagatcttccttttttgatctacaacttatatagttttctgattatgcacataatagatatgccttccagatgcataaggcaaacatctggaaagaaatatacccaaatcttagcaggggttatctttgggagtggagtacatgggattttgctttcttcatttttataattttatattactgtcttggaagatgtgtttatgtgtgtgtgttacttttacaatcaggaaaacatatttaataacatatagtcaagaaaacagacttaaaaataaatactatgtgtccattgagaaaattcacaatataaacagaaatacaaataaatacatacacaattttaaagtcacctgtagccctacccttagaggtacccagggttaacattttggtggtattgtcttatcaatttttccgttgatacattcagcaaatttggagcacattgaccatggagttttgtgtccaaatccaatctgaatttacctggaagaggccttgacacctgcatggaaatgagctaagaaaaccactggagccttgggagctctttggcctcctggctggcccagtaatatctgagctcctttggttaatttataactgatataaaactacatcttctttataatataaattgtacctgtgagtctagaagctttaaatgtgtttaaattaaaatattcaagctaaatgttactgctctctcccaaattctgtaagtttgactcccgttaccccaattagaagtaacttctttgtttcatgccacttttatagcatttggtaattctgctataacacatcttgcccctattattaactgtgcacagctacacaaaggtgtgccttctacgtgggaacatggattgtgaatgactctgtaatgaggcctgagtcttagttatctttccactcactccccgtctcccctttccaaccccaaaggctcacgataggggctcactaaatgtcagtgtttcaccaaagtattttttccattgtattaagagtccagtcactgtatatggaagtattttattttttatttttttatatcacttgagtccactagtagtacttccttgctctgtttgacttgtcagatacaaagacacgggattagattttgggtggtaaaattgtgatacgcatggctgttgatggagtggaacatcttagtgatgtgagaaaggtcattttagttataaatgtaaaccaattactttagcacaacaataaagatgttctggaaattattataattattttagttaatggacttgcctgtaacaagtgcttatgtttggaatgtccattttattttattttcctctacaataaggaatccctaaagttatgccaacaaactgg

SEQ ID NO: 24863 - DNA, 6304 bp, Homo sapiens; identical to SEQ ID NO: 23374
  misc_feature 1, 6302, 6303, 6304: n = A,T,C or G

SEQ ID NO: 24864 - DNA, 313 bp, Homo sapiens
  misc_feature 1, 2, 3, 303, 313: n = A,T,C or G
nnncgggggggggtcgcattccttacctcacctttgtccctgcgcgggctgcggctgggatccggtctttccagccccgaagggacctggttcctctgcccaggcttctgtcactctgtcacctacgctatgccctgctgtagtcacaggaggtgtagagaggaccccgggacatctgaaagccaggaaatggaggagtgggctttgctggatatttcccagaggaaactctacaaggaagtgatgctggaaactttcaggaacctgacctctgtaggaaaaagttggaaagaccagaacatngaatatgagn

SEQ ID NO: 24865 - DNA, 2317 bp, Homo sapiens
  misc_feature 1, 2316, 2317: n = A,T,C or G
ncgacccacgcgtccgggccttcccggctcccggcctgcgtgcactgcgcttgcgcgggttgagggcggtggctcaggctcctggaaaggaccgtccacccctccgcgctggcggtgtggacgcggaactcagcggagaaacgcgattgagaaatggaaaagaaaatgaaataaatcagcagttatgaggcagagcctaagagaactatggcaacatcaggtgactgtcccagaagtgaatcgcagggagaagagcctgctgagtgcagtgaggcgggtctcctgcaggagggagtacagccagaggagtttgtggccatcgcggactacgctgccaccgatgagacccagctcagttttttgagaggagaaaaaattcttatcctgagacaaaccactgcagattggtggtggggtgagcgtgcgggctgctgtgggtacattccggcaaaccatgtggggaagcacgtggatgagtacgaccccgaggacacgtggcaggatgaagagtacttcggcagctatggaactctgaaactccacttggagatgttggcagaccagccacgaacaactaaataccacagtgtcatcctgcagaataaagaatccctgacggataaagtcatcctggacgtgggctgtgggactgggatcatcagtctcttctgtgcacactatgcgcggcctagagcggtgtacgcggtggaggccagtgagatggcacagcacacggggcagctggtcctgcagaacggctttgctgacatcatcaccgtgtaccagcagaaggtggaggatgtggtgctgcccgagaaggtggacgtgctggtgtctgagtggatggggacctgcctgctgtttgagttcatgatcgagtccatcctgtatgcccgggatgcctggctgaaggaggacggggtcatttggcccaccatggctgcgttgcaccttgtgccctgcagtgctgataaggattatcgtagcaaggtgctcttctgggacaacgcgtacgagttcaacctcagcgctctgaaatctttagcagttaaggagtttttttcaaagcccaagtataaccacattttgaaaccagaagactgtctctctgaaccgtgcactatattgcagttggacatgagaaccgtgcaaatttctgatctagagaccctgaggggcgagctgcgcttcgacatcaggaaggcggggaccctgcacggcttcacggcctggtttagcgtccacttccagagcctgcaggaggggcagccgccgcaggtgctcagcaccgggcccttccaccccaccacacactggaagcagacgctgttcatgatggacgacccagtccctgtccatacaggagacgtggtcacgggttcagttgtgttgcagagaaacccagtgtggagaaggcacatgtctgtggctctgagctgggctgtcacttccagacaagaccccacatctcaaaaagttggagaaaaagtcttccccatctggagatgacagttgatgctttatttggaaagcagtgtgcatatcttgaggggtgatgaacacaagcaaaccaagttgcacctggcttctgcacactcctgcgaaagtcggtgaacattcactccacattgacccctccctagcctggcaggtgacgtcagggtccttcacagacaaacacgcttgggctcggcaggagctgccgtggccacccccgctgcccagtgtctgccctctagaagtaggctgtgtttccaggtgttcacccgtggtgcccacagtgccgacccgtggctgggtcggagctccatgttcctaagctaggtctaggtctacactcctaggacgcacgcatatcagcccgtgtaccctgtgacagtgactgtccccacctcctgtgttagtggtgcccttactgccgtcgctcatccactcgtgtgggacgtaggattgcacagggctgtgccagtggcgtgtagggaacactgccctggctcagcgtgcgagctaaggtggcgatgtatgcgatgggactctgcatgggatagtacagttgtgtagacgtcttccaaataaattatgtgttggtgcatcgcacatgctcaataaatatttttaaatgagtgaatgtcattgtgtatcctgttttatgcatatatgttatttttgtaattacaggatcatactatatgcattgctttataagtttctctcacatattgtgaacacacttccacatccagtagatacatgtccactacttgtcgagtatgtcgcgattcactaaatttcatcgaaatctagggcgggtgcacnn

SEQ ID NO: 24866 - DNA, 1609 bp, Homo sapiens
tatagggagtcgacccacgcgtccgatcttcttggagcgctttaggctggccggcggcgctgggaggtggagtcgttgctgttgctgtttgtgagcctgtggcgcggcttctgtgggccggaaccttaaagatagccgcaatggctgaaaatggtgataatgaaaagatggctgccctggaggccaaaatctgtcatcaaattgagtattattttggcgacttcaatttgccacgggacaagtttctaaaggaacagataaaactggatgaaggctgggtacctttggagataatgataaaattcaacaggttgaaccgtctaacaacagactttaatgtaattgtggaagcattgagcaaatccaaggcagaactcatggaaatcagtgaagataaaactaaaatcagaaggtctccaagcaaacccctacctgaagtgactgatgagtataaaaatgatgtaaaaaacagatctgtttatattaaaggcttcccaactgatgcaactcttgatgacataaaagaatggttagaagataaaggtcaagtactaaatattcagatgagaagaacattgcataaagcatttaaggtatgataatacagactttttctagttttaaaatatatgggacataacttaaaaaaatattttccttcctttttacagggatcaatttttgttgtgtttgatagcattgaatctgctaagaaatttgtagagacccctggccagaagtacaaagaaacagacctgctaatacttttcaaggacgattactttgccaaaaaaaatgaagaaagaaaacaaaataaagtggaagctaaattaagagctaaacaggagcaagaagcaaaacaaaagttagaagaagatgctgaaatgaaatctctagaagaaaagattggatgcttgctgaaattttcgggtgatttagatgatcagacctgtagagaagatttacacatacttttctcaaatcatggtgaaataaaatggatagacttcgtcagaggagcaaaagaggggataattctatttaaagaaaaagccaaggaagcattgggtaaagccaaagatgcaaataatggtaacctacaattaaggaacaaagaagtgacttgggaagtactagaaggagaggtggaaaaagaagcactgaagaaaataatagaagaccaacaagaatccctaaacaaatggaagtcaaaaggtcgtagatttaaaggaaaaggaaagggtaataaagctgcccagcctgggtctggtaaaggaaaagtacagtttcagggcaagaaaacgaaatttgctagtgatgatgaacatgatgaacatgatgaaaatggtgcaactggacctgtgagaagagcaagagaagtaacagacgaagaagaagcctgcatccaaacaacagaaaacagaaaatgggtgctggagaccagtagtttagtaaacgcatgggttattcgttgtgaataggttttaaacgacttttgattgcggggctgttaagaggaagaccgagttaggtacacttcgatgtacacctgtgagagaggaaagatttgttgtagtgtagcttgtcttgtgttatgcaatgaggttcc

SEQ ID NO: 24867 - DNA, 1033 bp, Homo sapiens; identical to SEQ ID NO: 22857

SEQ ID NO: 24868 - DNA, 3228 bp, Homo sapiens; identical to SEQ ID NO: 22886
  misc_feature 1, 2, 3216, 3217, 3218, 3219, 3220, 3221, 3222, 3223, 3224,3225, 3226, 3227, 3228: n = A,T,C or G

SEQ ID NO: 24869 - DNA, 707 bp, Homo sapiens
  misc_feature 1, 2, 3, 4, 5, 6, 7, 8, 9, 10, 11, 12, 706, 707: n = A,T,C or G
nnnnnnnnnnnncggaagtcttctagaattaattaacgcgggggatcaaataaactaagcattaatcttccatctgaaattgtcaggaaaccttgagatcaaaagaacatccctgggaaggtgttaggctcagcttattattatgtgggggctcagcgtctatacccacctgaagctgggctggccatgaggcttcagttcactaaccagatgtgcatgaaacagatacaaaaaggggaagcctttagggccaaaaaaatagacctaggtttgtattactatttcagcttaatcgtgtataccttgtgtttcctcggccaacaatggctaattatggtaaatactatttagaattatgtgctatgtactaagtgtttgacatatggtatctcatttaaaccttctgtgatcctctgaagagtgtcctccaatttttcccattttaacagatgataaaactcacagaagggcctatggttatatagctagtaaaagtggcagagtccgttgaacttgaattcagattggcgaatgctttaacagttggtatccagcagctacaggacttaatatttctcagtgttgtttcctcatctctaaattgaagatattaaagctcactttgcaaaaaaaaaaaaaaaaaaagtcgtaacctgcccgggcggccgctcaaagggcgaatctcagcacatggcggcgttatagnn

SEQ ID NO: 24870 - DNA, 2177 bp, Homo sapiens
  misc_feature 1, 2, 3, 4, 2173, 2174, 2175, 2176, 2177: n = A,T,C or G
nnnnactctagtcttcccctcaaatcatgcatgcaaaataggaggacagaggtggtgactcaactggatacaggtgctcaatagatcgaaggcttgatgagtgagtgtcagcgacgcattacaagcatgtaagcacgatacctgactgagccattggcaccataccttgagctaacgcttcctctgttttcctctacgtgtgacctatgtgtgaaatggcaatagcattcactgtcgtattttgcagtgctcaggaagtgggacgttaactttgaaggtgcttgtttgtattagctctgctaggtttacctctacaacgtagatttcagcagctatgctgactgacactacattctagttcttaagattttttttccagatccccccttccccagctagacatacgtagcatactttcatcttattcagtctttctgtaacctgctgctgcttttagtcctcctcacctcagatcggaatcaatggagtgggcccagaggatacattttaattccagtaatggtaggtagatttgtcctgctttctaaaacatctcctcatttcatatttccactccatattgattccataagggaaaattaatgggtgtttcctcctttagggaggtaatgcaaagagtgtggacatcttctaatcttgaggaacagtagttgatttcccttgaaggagcttacatattgactgttttcacaataacctgtttgccccagttcaatcctcattttaatacttaatttggtactggctcaaatagcattttcttacagataacaaatcaagagtgaaatttgaggttatactccagtaaagtttttaacacttgtgaatatggtcagctagactaaacttgactcttttttttaatggcttttttatctgtgaacattcagataagtggattttcaagtactggttggggatgggaatcgtgcttttctttaaacttcagtttacgagatgctttgagagcgttaggcaaaagcagaaataaatatcaggagcaacggggaaagctttataaaagatcatggtggccactgttgcagctttgaagaatgagtgctggcttgaacagttctttgcctgcatcattggtagctgcactgaaaggaaaaaactttcaccttaagaatttgaaaaggaagaaacctgggctctggtcttcatggcatttagactgagatgcttaaacagaacagaagtaatacgcatttcctgccataggatagggaaaatgtaacaagctggttgctcttgaggttagaaaattgtctgtttctctgtggatgaagctggatttacttgaaaatggagagttggcttattgtttgaatattgggacatcaagctatctatagccaagtttcagtcgcaaccagttttccctttgtctggggtaaattcgatacaaaatgattctttttgaatcctgaatccataaattacacttttttttttcaaattcacaaaattcacagtggtgctgactgtgtaataaccactattgggaaacatcccgtaaacctgcctgttgccatgccaatggagtgactgaactggtgacatctgttcgagcatgcttagtgtggctggtagaatgccaccgttggcgcaatcacacttgcaacatccaggggcagacagaggagaggacaaccaagacttcatggcggcacagggctacaacgggcaaccccacacggtagtaccatacaacgacagcgccagagaggaaaaagaacccaagatagaggcccgaaaaacgacgcaaggctacacacccccgtggaactacagacatggatagaggaaccgtgacacatgataagagcggaaaacgcacagcggcatcaacagcaaggcaccatggacatacgcaaaccccacgagagcacggccggaccacctgcgcacaacaccgcgccccccaagggacacaaacagggtcccgagacagctaaacacacccctagtacaacccccgacaccgggtagccacgcggaacaaccgccagacacgcagacaggctataaaaagaggcgaattccgctacccacgcacgccaaaaccccgcacgtacggccaacaactgcgagccagacacggcgccaacacgacgagaacagaaccacaacatcgcacaaacgccannnnn

SEQ ID NO: 24871 - DNA, 955 bp, Homo sapiens
  misc_feature 933, 934, 935, 936, 937, 938, 939, 940, 941, 942, 943, 944,945, 946, 947, 948, 949, 950, 951, 952, 953, 954, 955: n = A,T,C or G
cctttttgctttttctttttatcttatttcttttacttatttttcttttttttacttttatttcttctccgtttttcctcattcttttcctcttatttctttgacttttctgatttctttttttttcttattttcctttttttttcatattccttttaattttttcttacttcttttacttttcttatttgccctcttgtggaaatgaggcacagcctcccttatggttgagccgtagttctagctgagcacggatggtttgatcctcctgtgttggggcactgtatggtgtgagggcacaaaaccttgacccacatgggtctggtcaccttctcacagaggtcacctttacagccccccaactctttgaaggatgtgtcccaaggtgtctcaagtctgatgcaatgaaagctgccccccattgaccacaggactgagtccagaatgtcctgcgtgtttcccagagtgtctgtcctaacaccgcttaaagattagccactgctagacagtgatcctcaggtatatggtctcaggattggccccaagcacacggtgtgtgtgtgtgtataaatatatcttcacaaagcataggtacccattaaagccatattgctttgctgaatggttctaatagctacagatgatttctagcctgaaagaaaagcaccacgaattgtttgaagttgacttgtcagatgtggcatgcttggtctaagttttgacaggaagggtatgtgggtaggggtgtacggagcatctcatgagaccagttctcctcctgagaggtccgtgatgttggaactgttgccccagatggactttgcccttgtgagactttatacttttcaatgcagtttttccctctttaaaactcgccagcttttatgtagtgttttataaaattacaggaataaaaagaatatcttttatgcnnnnnnnnnnnnnnnnnnnnnnn

SEQ ID NO: 24872 - DNA, 7743 bp, Homo sapiens
  misc_feature 1, 2, 7743: n = A,T,C or G
nncgtggagggaggcggcacgggcggaggcgcacgccgggcgcggtgctgcggctcagctgataattgaaggaacccggagccgccgccgccgcgccgctggggggggtggggggagctagtggaagttactgccgcgccaccgagtccggaccggagactttggggcctaactagtgaatggtagtgtctagaaagggtatgtcccttcaagagagaggtgccaatgtccaaccggcctaataacaatccaggggggtcactgcgacgttcacagaggaacactgccggggcccaaccacaagacgactcaataggaggaagaagctgcagttcatcatctgctgtgatagttccacaaccagaggatccagacagagccaatacttcagaaagacaaaaaacggggcaggtgcctaagaaagacaattctcgaggagtgaagcgcagtgctagtccagactacaacaggaccaattctcctagctctgcaaaaaaaccaaaagcacttcagcatactgaatctccctcagaaacaaataagccacatagtaagtcaaagaagagacatttagaccaggagcaacaactgaaatctgcacaatcaccatcaacaagcaaggctcataccaggaagagtggggccactggcggttcacggagtcagaaaagaaaaaggacagagagttcttgtgtaaagagtggctccgggtctgaatcaactggtgcagaagagagatctgcgaaacctaccaagctggcttcaaaatcagccacctcagccaaagctgggtgtagcaccatcactgattcttcttctgctgcctctacttcctcctcgtcttctgctgtagcctcggcctcctccactgtaccaccaggtgccagagtgaaacaaggaaaagatcagaacaaggccaggcgttcccgttcagcgtccagtcccagccccagaagaagtagcagggaaaaggaacagagtaaaactggtggctcttcaaaatttgattgggctgctcgtttcagccctaaagttagccttcctaaaacaaaactgtctcttccagggtcttctaagtcagagacatcaaaacctggaccttctggattacaggccaaattagcaagtttaagaaaatctacgaagaaacgcagtgagtctccacctgctgagctccccagtttgaggcggagcacacgccaaaagaccacgggctcctgtgctagtaccagtcggcgaggctctggcctgggcaaaagaggagcagctgaagctcgtcgacaggagaaaatggcagaccctgaaagcaaccaggaggcagtaaattcttcagctgctcggacagatgaagctccccaaggagctgcaggggctgttggcatgaccacctctggggagagtgaatcagatgattccgagatgggacgtttgcaagctttgttagaggcaaggggtcttccccctcacctatttggtcctcttggtcctcggatgtcacagcttttccatagaacaattggaagtggagctagttctaaggcccagcagctactacaaggattgcaagccagtgatgaaagtcaacagcttcaggcagttattgagatgtgtcagttactggtcatgggaaatgaggagacactgggagggtttcctgtcaagagtgttgttccagctttgattacgttacttcagatggagcacaattttgatattatgaaccatgcttgtcgagccttaacatacatgatggaagcacttcctcgatcttctgctgttgtagtagatgctattcctgtctttttagaaaagctgcaagttattcagtgtattgatgtggcagagcaggccttgactgccttggagatgttgtcacggagacatagtaaagccattctacaggcgggtggtttggcagactgcttgctgtacctagaattcttcagcataaatgcccaaagaaatgcattagcaattgcagctaattgctgccagagtatcacgccagatgaatttcattttgtggcagattcactcccattgctaacccaaaggctaacacatcaggataaaaagtcagtagaaagcacttgcctttgttttgcacgcctagtggacaacttccagcatgaggagaatttactccagcaggttgcttccaaagatctgcttacaaatgttcaacagctgttggtagtgactccacccattttaagttctgggatgtttataatggtggttcgcatgttttctctgatgtgttccaactgtccaactttagctgttcaacttatgaaacaaaacattgcagaaacgcttcactttctcctgtgtggtgcctccaatggaagttgtcaggaacagattgatcttgttccacgaagccctcaagagttgtatgaactgacatctctgatttgtgaacttatgccatgtttaccaaaagaaggcatttttgcagttgataccatgttgaagaagggaaatgcacagaacacagatggtgcgatatggcagtggcgtgatgatcggggcctctggcatccatataacaggattgacagccggatcattgagcaaatcaatgaggacacgggaacagcacgtgccattcagagaaaacctaacccgttagccaatagtaacactagtggatattcagagtcaaagaaggatgatgctcgagcacagcttatgaaagaggatccggaactggctaagtcttttattaagacattatttggtgttctttatgaagtgtatagttcctcagcaggacctgcggtcagacataagtgccttagagcaattcttaggataatttattttgcggatgctgaacttctgaaggatgttctgaaaaatcatgctgtttcaagtcacattgcttccatgctgtcaagccaagacctgaagatagtagtgggagcacttcagatggcagaaattttaatgcagaagttacctgatatttttagtgtttacttcagaagagaaggtgtaatgcatcaagtaaaacacttagcagaatcagagtctttgttgacaagtccaccaaaggcatgtacgaatggatcgggatccatgggatccacaacttcagtcagcagtgggacagccacagctgccactcatgctgcagctgacttgggatcacccagcttgcagcacagcagggatgattctttagatctcagccctcaaggtcgattaagtgatgttctaaagagaaaacgactgccaaaacgagggccaagaaggccaaagtactcacctccaagagatgatgacaaagtagacaatcaagctaaaagccccaccactactcagtcacctaaatcttctttcctggcaagcttgaatccaaaaacatggggaaggttaagtacacagtccaacagcaacaacattgagccagcacggactgcgggaggtagtggccttgccagggctgcctcaaaggataccatctccaataatagagaaaaaattaaaggttggattaaggagcaggcacataaatttgtagaacgttatttcagttctgagaatatggatggaagcaaccctgcattgaatgtccttcagagactttgtgctgcaaccgaacaactcaacctccaggtggatggtggagctgagtgccttgtagaaatccgtagcatagtctcagagtcagatgtttcatcatttgaaatccaacatagtggatttgtgaagcagctgttgctttatttgacatctaaaagtgaaaaggatgctgtgagcagagagatcagattaaagcgatttcttcatgtatttttttcttctccacttcctggagaagagcccattggaagagtggaaccagtgggtaatgcacctttgttggcattagttcacaagatgaacaactgcctcagccagatggaacaatttccagtcaaagtacatgatttccctagtggaaatgggacaggaggcagcttttctctcaacagaggatcacaggctttaaaatttttcaacacacatcaattaaaatgccagttacaaaggcatccagactgtgcaaatgtgaagcagtggaagggtggacctgtcaagattgaccctctggctttggtacaagccatcgagagataccttgtagttagagggtatggaagagtaagagaagatgatgaagacagcgatgacgatggatcagatgaggaaatagatgagtctctggctgctcagttcctaaattcaggaaatgtaagacacaggctgcagttttatattggagaacatttgctgccgtataacatgactgtgtatcaggcagtacggcagtttagtatacaggctgaagatgaaagagaatccacagatgatgagagcaatcctctaggcagagctggtatttggacaaagactcatacaatatggtataaacctgtgagagaggatgaagaaagtaataaagattgtgttggtggtaaaagaggaagagcccaaacagctccaacgaaaacttcccctagaaatgcaaaaaagcatgatgagttatggcacgatggagtgtgcccatcagtatcaaatcctttagaagtttacctcattcccacaccacctgaaaatataacatttgaagacccgtcattagatgtgatccttcttttaagagttttacatgctatcagtcgatactggtattacttgtatgataatgcaatgtgcaaggaaattattccaactagtgaatttattaacagtaagttaacagcaaaagcaaataggcaacttcaagatcctttagtaatcatgacaggaaacatcccaacatggcttactgagctaggaaaaacctgcccatttttctttccttttgatacccggcaaatgcttttttatgtaactgcatttgatcgggaccgagcaatgcaaagattacttgataccaacccagaaatcaaccagtctgattctcaagatagcagagttgcacctagattggatagaaaaaaacgtactgtgaaccgagaggagctgctgaaacaggcggagtctgtgatgcaggacctcggcagctcacgggccatgttagaaatccagtatgaaaatgaggttggtacaggtcttgggcctacactggagttttatgcgcttgtatctcaggaactacagagagctgacttgggtctttggagaggtgaagaagtaactcttagcaatccaaaagggagccaagaagggaccaagtatattcaaaacctccagggcctgtttgcgcttccctttggtaggacagcaaagccagctcatatcgcaaaggttaagatgaagtttcgcttcttaggaaaattaatggccaaggctatcatggatttcagattggtggaccttccccttggcttacccttttataaatggatgctacggcaagaaacttcactgacatcacacgatttgtttgacatcgacccagttgtagccagatcagtttatcacctagaagacattgtcagacagaagaaaagacttgaacaagataaatcccagaccaaagagagtctacagtatgcattagaaaccttgactatgaatggctgctcagttgaagatctaggactggatttcactctgccagggtttcccaatatcgaactgaagaaaggagggaaggatataccagtcactatccacaatttagaggagtatctaagactggttatattctgggcactaaatgaaggcgtttctaggcaatttgattcgttcagagatggatttgaatcagtcttcccactcagtcatcttcagtacttctacccggaggaactggatcagctcctttgtggcagtaaagcagacacttgggatgcaaagacactgatggaatgctgtaggcctgatcatggttatactcatgacagtcgggctgtgaagtttttgtttgagattctcagtagttttgataatgagcagcagaggttatttctccagtttgtgactggtagcccaagattgcctgttggaggattccggagtttgaatccacctttgacaattgtccgaaagacgtttgaatcaacagaaaacccagatgacttcttgccctctgtaatgacttgtgtgaactatcttaagttgccggactattcaagcattgagataatgcgtgaaaaactgttgatagcagcaagagaagggcagcagtcgttccatctttcctgatcatagcaagaaatgcagtgtctgcctgttacagcaaaagaaacaaatcatgatttcttttctaatgttatcacctgagtcaaggaaacatgttacgccttcttgttgtaggaaaaacggcttgcagattataaagagacatttggttgatattcattaatggccccatggacttaaagtgatcaggccctaaaacgttgttgtgatgaggtttctttagcaagttcttgtttaaattatcatttatttgatgagtgaagtttttaacatgctttgctgtgtgaaatttaaaaaagggatgtttttccaggctggaacaataaatgtggctgtgcagtttaaaaaaaagctgtgtgtatccatctagctaagtctgcagtttcctttcctccaaggacaactcttgtacataaagtacagaaatttaagctcacatgtatttgacaaatatagtttagtagactagctctatgtgcttttcactttcctctgattttctctccctgattcattattatctgtgcagctcacagttttttttttgtatacaactcacagttctcaaattttcgttacccatgggcttctgttgtcccatgttctctccagttaagatctaatttaaaattcattggattgaaatttattgaatataattcagcttttgtaactaggtagacttttcttatagtttagttttaatatagtttagggtattactggctttttcccaggtgacacactaaggactgtttacatggcaattccagcagcaacagcctctggaatgagacaaggaaagctcatttgtttcttttatgaaggttaagaagtctacagcttgggctggccggtatttattattctgtggccagaggattttaaattaatgtaaattttttaaacaaaataagcagttttccttccctgttggagtaaaaaaatttttttccctttgttgttttacgtttttgttcatagtcttctttattccacgctcctcttccccttctcccagtgctgacttgggacaaaacagttcagcctttgtctcgacgcagataaaagcacctgtaagcaatgctgtccagtcattttatgtgctgatttctcaaatctgcaataatccatcaggttaatgtttttacctgaaaataaagaaagtttgcttcacctttttgtttatagttttgtgctgtatgcataactttcaattgtatagatgtatttcaatgcaaggaaatccacatatctccatgattcgggtcatggctgattttgctattcaaacaatttataatagcaacttgaagaaactaaaatgtgaagagaaaatgggaggagattccttcctaaggtccaaaactaggcctgtggcataaatttgaaggaattttccataattcatctccttgaaaataagagatgagctagtttttttttttaattgaactttgagaaatcatttttttgactgttctgtaagttttaattaattgacacaaaagcccttttccctcgtccgcatcctctagagcn

SEQ ID NO: 24873 - DNA, 1273 bp, Homo sapiens
  misc_feature 1, 2, 3, 4, 5, 1272, 1273: n = A,T,C or G
nnnnncttcgaggtgccttaggccgcttgccttgctcctcagaatcgctgccgccatggctagtcagtctcaggggattcagcagctgctgcaggccgagaagcgggcagccgagaaggtgtccgaggcccgcaaaagaaagaaccggaggctgaagcaggccaaagaagaagctcaggctgaaattgaacagtaccgcctgcagagggagaaagaattcaaggccaaggaagctgcggcattgggatcccgtggcagttgcagcactgaagtggagaaggagacccaggagaagatgaccatcctccagacatacttccggcagaacagggatgaagtcttggacaacctcttggcttttgtctgtgacattcggccagaaatccatgaaaactaccgcataaatggatagaagagagaagcacctgtgctgtggagtggcattttagatgccctcacgaatatgaagcttagcacagctctagttacattcttatgatatggcattaaattatttccatatattatataataggtccttccactttttggagagtagcaaatctagcttttttgtacagacttagaaattatctaaagatttcatctttttacctcatatttcttaggaatttaatggttatatgttgtctttttttcctatgtcttttggctcaagcaacatgtatatcagtgttgactttttctttcttagatctagtttaaaaaaaaaaaaaaccacataacaattctttgaagaaaggaagggattaaataatttttttccctaacactttcttgaaggtcaggggctttatctatgaaaaagtagtaaatagttctttgtaacctgtgtgaagcagcagccagccttaaagtagtccattcttgctaatggttagaacagtgaatactagtggaattgtttgggctgcttttagtttctcttaatcaaaattactagatgatagaattcaagaacttgttacatgtattacttggtgtatcgataatcatttaaaagtaaagactctgtcatgcaaaataaaaaaaaaaaaaaaaaaaattttcgggcgccggacccgaaattttcaaccttctgtgggggccgaccaggggttaggaacggccagcggacaagaaccggcggacgggcgggttccccaaaaagcggggcacggttgacacccaggctcggctcggtctaagtcctaccccccccgcgcgcgggaaacaaagccaaacacaaaccccacacacaacaacaatcann

SEQ ID NO: 24874 - DNA, 2171 bp, Homo sapiens; identical to SEQ ID NO: 22408
  misc_feature 1, 2, 3, 4, 5, 6, 7, 8, 9, 10, 11, 12, 13, 14, 2166, 2167,2168, 2169, 2170, 2171: n = A,T,C or G

SEQ ID NO: 24875 - DNA, 2055 bp, Homo sapiens; identical to SEQ ID NO: 24301
  misc_feature 1, 2: n = A,T,C or G

SEQ ID NO: 24876 - DNA, 695 bp, Homo sapiens
  misc_feature 1, 2, 3, 4, 32: n = A,T,C or G
nnnnagcagagacgggggcttcaccatgtcgnccaggctggtctcgaactcctgaactcaagtgaaccacccgcctcggcctcccaaagtgctaggattacaggcatgagctactgcgcccggcctctattaagttttaagatggcactcaccatctttgtgagaagttgaacattactaacaaagtctaatcatatttttagaaggggtaaacagtgataccatgttctgaattggaattactattaaaattcaaaaactgaacatttaaccacaagctagtcttagttttaaatcacaactgcccaacaaaatattctgtcatttatgatctgatttctggtgtatgagatctattaaagtatggtacacataaaacagtcatgggacatttctgttttgtaataaataaggcagtggccaattattactcattagtaacttttttgagataagctattaagtctgccctttcttccttcttcttaatgccgacaaagatcatttttgttccagggatgtactttttttttttttttttttttttttcccagagattatgaaaattttattaataaagaaaatctgctttacacatatcccctttaaaaacaaccacctcaaacatgtagaaatgctttattttgtatttgctatttgatcaatgccagaaaaatgaaaccacaacaccaaag

SEQ ID NO: 24877 - DNA, 640 bp, Homo sapiens
gaaacaattcttaatcatttattttcaacacgtgtactataaagaacctaagaaatcagacaattttaataacccataaacatgttgaatccatttgcagatttaaattttgtaaaaatagctgtcactgcctccatatatcaagtgtactatgtttataatcacatttatgctaccgatactcctcagaaaaaaacagattctgcttggttctagcttcagtattatgaactccaataatgctttgagtccacaacacctcagctagaacttattccttcaaatttaactctgtacccattaaaagtggttttgtgtgcaattaacagacacatgttctacccatacattgttttccaaaattattgtgtggctttaaaaaaaaaaacccacacaacaaattgcaaaaggcactgagataacatctgcttctagatcattgctaggctcgaaaaataaagcttgttctaccaggaatgacaagttagaacttagtatttgccaaagcagaaattatatagtgtcagttatttcaggcaaaccttattcggctctcatccccaactatctgtcagaacaattaaaagagatcaaaacagtccagcataactaggcttcattataaaggccatttgagcct

SEQ ID NO: 24878 - DNA, 2669 bp, Homo sapiens
  misc_feature 2667, 2668, 2669: n = A,T,C or G
gcgggcggcccgcgcgcacagttcccgcaggcggcgacagcagagcgcccactgcctccagcagattaatattaagattggaagtttgtgtcttttgctggatattggaaattgaatgtaatggcaacagaatttataaagagttgctgtggaggatgtttctatggtgaaacagaaaaacacaacttttctgtggaaagagattttaaagcagcagtcccaaatagtcaaaatgctactatctctgtacctccattgacttctgtttctgtaaagcctcagcttggctgtactgaggattatttgctttccaaattaccatctgatggcaaagaagtaccatttgtggtgcccaagtttaagttatcttacattcaacccaggacacaagaaactccttcacatctggaagaacttgaaggatctgccagagcatcttttggagatcgaaaggtagaactttccagttcatcccagcacggacctagctatgatgtgtataacccattctatatgtatcagcacatttcacctgatttgagtcgacgctttcctccccgttcagaagtgacgagactgtatggatcggtttgtgatttaaggacgaacaaacttcccggttcccctgggctaagcaaatctatgtttgatcttacaaactcatctcagcgattcatccagagacatgattcattgtccagtgtacccagtagttcttcttcaaggaaaaattctcaggggagtaacagacggctggatacaattactctatcaggagatgaaagggactttgggagactgaatgtgaaattgttttataattcttcagtagaacagatctggatcacagttttacagtgcagagatttaagttggccctctagttatggagacactcctactgtttctataaaaggaatacttacattgcccaaaccagtgcatttcaaatcttcagccaaggaaggttccaacgctattgaatttatggaaacgtttgtatttgctattaaacttcaaaatctacaaactgtaagacttgtatttaagattcaaacccagactcccaggaagaaaaccattggagaatgctcaatgtcactcagaacccttagcacacaggaaatggattactctttggatataacaccaccttcaaaaatttctgtttgccatgcagaacttgaattggggacttgttttcaagcagtaaatagcagaattcagttacaaattcttgaggcacggtaccttccaagctcatcaacacctctgactttgagttttttcgtgaaggtgggaatgtttagctcgggagagttgatttataagaaaaagacacgcttactgaaggcctccaatggaagagtcaagtggggagagactatgatttttccacttatacagagtgaaaaagaaattgtttttctcattaagctttacagtcgaagctctgtaagaagaaaacactttgtgggccagatttggataagtgaagacagtaataacattgaagcagtgaaccagtggaaagagacagtaataaatccagaaaaggttgttatcaggtggcacaaattaaatccatcttgaagacttcacacattaatttggtgaagaacttgacattcttttagaagacttatgatttcaatttgctaccaatgagaagaggcaaatcaacaaatttgtcaatttatgggggctataattatggtatataatgtatctgatagaaaatttgataagaaaatgtaatgaattttatcagatatccaaagtaaaggaaatgttttaaaactgcaacaagagacacagacagtaaaatcaaagtattattaggatgactaaataaattataaagtctgtgagaatatcaaccatagatagttctttctatattatgtttttgcttttgtattttaagctttacttagatattcaaaacctggtatatcaagtctctgttagtactattggcatttagaagactttaccattatttcagtgctaggcattattgattaggtcttggctccactgtttacctcttgctatgtattttctcccggtaaaaatgaattgaaccatttcaactattttctatatttggagaaagtttgtgccctgtgttttataatttttttacccataagacatcacattatccctttgtaagctacttatctccaaaaaacttcagaaatagaaaactacattttggcaggaataattgaaaacaccagaaggttgaagtttaattggaaacccagaatatacatactttgctgttttcttccctcaaatattttactatttgttttatttggagttaaaataagagtatcatccatatggtccatcctaattcacagaattaaatgagcttaaatagaaaattcagtattttatgataatcacttcgtttttagtttttaaaatttagattattctataatttaccgtgtttgagtattttctcatttttttcataaccatacctgattatactgtgtaacaaatattttctattgcagttttctttccagtacttattagaactcagtatttggaaataatttcagcttaattgaccataagaactgtggccaaaaagaacagtttttcggagaggcagatgacattatacctgattttagaaaatcnnn

SEQ ID NO: 24879 - DNA, 1764 bp, Homo sapiens
  misc_feature 1754, 1755, 1756, 1757, 1758, 1759, 1760, 1761, 1762, 1763,1764: n = A,T,C or G
ccgacctgatattacaagcctgcaccaccacgcccgtctaattttgtattttcactgagaataggctggagtgcagtggcgcaatctcggctctctgcaaccttcacctcccgtgttcaagtgattctcctgcctcagcctcccaaagtgctgggattacaggcatgagccaccgcgtccagcaagaataggtgattttcaaacttggaaacattcagaagttatcgcctcagtttcagattgagtagtctcaaagagattacagacatctaccacaaattctctacttggtgtggtgcaaaatcagtatgatgtaaactttgtctctcagtttcttcaaaggaaagaagcaactggaacacacatataacactaacccttccagctgcattatgagggaccagtacctgtctcaaggcaaaattatgacttagttcatcctcacctctggaggccagtaaaagtgggttatagaagaacaaagaggcatctagatctttcactgggttatttggagagaaacatctcctaccgaaggccagtttaacaagactggtagaggaggttatcttatctaattcacagaaatcaacacattgagtcaagaaaaatgaaacacagaaacactctaaataaaagaagataagtcttcagaaaccaaccctaatgaaatgaagatatgtgattaacctgacaggaaattaaaaagagcaaccataaagagtctcatgggagcaatgcatgaacaaactgagaattttcataaagaaataaaagataacaaaaagtataaagttgaagaatacaataactggactcaaaaatttaatgtgtccaacagaagaatcgatgaagcagaagaaagggctatcaaacttgtagataggccattggaaatcatgtaatgtgaggagaaaaaagaaaaaagattgaagatagtttaagagacttttgagacatcctcaaaggggaataatttatacattaccagatggagaagatagagggaaaaggacagaaaacatatttgaagaaataatgtcagaaaacctcataattctggcaaggaaatagaaatttagatctaagaatctcgaacatcaggtatgatgaatccaaggagactcacaccaaaccatattgtaattaaataaaggttaaagacaatcttcagagcagcaagggaatagtctcttcttacatacaaaatgatccacggaagactgtcagcagacttcaccagaaaactttcacgccagaaggcagtcgtgatatatacaaaaagctgaaaggaaaacactgccatccaggaatactatctccaactatcctgtgtttcaaaaattaaggagaaatataaagttctcaaacaaaagatgtgggagtttaccaccactagacctgcacgggaagaattgctaaagggagtccttcaagctgtagtaaaagagtgctaattagaaacatgaaaacaaatacaaaaaaaattctaaaacttgtatggaactacaaaagacattaaataatcaaagtaatcttgagcaacaaggacacagctggaggcatcactctacctgattttgtaatccattatcaaaaaactgtggtaccagcataaaaacagattcactgaccagtggaacaggaaagcccagacataactcatacatttccatccaattgatttttgacaaaagtggcacacagaatggggagaggacaaataaataaataaattgttttgagatatctgnnnnnnnnnnn

SEQ ID NO: 24880 - DNA, 445 bp, Homo sapiens
  misc_feature 1, 2, 3, 4, 5, 6, 51: n = A,T,C or G
nnnnnngcagaacaggctaataaaaggaaaaccattctaaaacacaacaanaaactgtccaaatgctttgggaactgtgtttattgcctataatgggtccccaaaatgggtaacctagacttcagagagaatgagcagagagcaaaggagaaatctggctgtccttccattttcattctgttatctcaggtgagctggtagaggggaggacattagaaaaaaatgaaacaacaaaaacaattactaatgaggtacctcgctcgtgtcccagatttagaagctgaaacatgggttaggttacttactaaaagtccacctgtggcaacctgcaaataatgcttatttatactaaagatgagtttatctgatagagttaggaaatttcttcttttgagtaagagtattgctataacatatatttttttctgaaatgttttaaaataga

SEQ ID NO: 24881 - DNA, 5650 bp, Homo sapiens
  misc_feature 398, 400, 655, 5605: n = A,T,C or G
ctgtcgacttgccccagagctgatccttgtctttgtccacttctcagcgaggatggcacttcagggagcccttcccttactatcgcagagagagcaggccctccccagtcatgtccaacccagaactctgttttgttttcttcatagccctagcatcacagaaaatcaccctgtgcattcatggatgtccacgggggcaagggctttgtgttgcttaacccagcatcctgaaccgtgtttgttgaatgaatacagaaccccgtttgctctgggagagcacagaaaacagtcttctatcatatatcatagccagctcgaaacagcagatggcttccatatccagagagcaagaaccagagagagagagaaagagagagagtttgggtctttctcctctntncctgctctctccagagaaactggaggggtagcagttagcattcccccgctggttccaccaagcacagtcaaggtctctaggacatggccacccctcacctgtggaagcggtcctgctggggtgggtgggtgttagttggttctggtttgggtcagagacacccagtggcccaggtgggcgtggggccagggcgcagacgagaaggggcacgagggctccgctccgaggacccagcggcaagcaccggtcccgggngggccccagcccacccactcgcgtgcccacggcggcattattccctataaggatctgaacgatccgggggcggccccgccccgttaccccttgcccccggccccgccccctttttggagggccgatgaggtaatgcggctctgccattggtctgagggggcgggccccaacagcccgaggcggggtccccgggggcccagcgctatatcactcggccgcccaggcagacggcgcagagcgggcagcaggcaggcggcgggcgctcagacggcttctcctcctcctcttgctcctccagctcctgctccttcgccgggaggccgcccgccgagtcctgcgccagcgccgaggcagcctcgctgcgccccatcccgtcccgccgggcactcggagggcagcgcgccggaggccaaggttgccccgcacggcccggcgggcgagcgagctcgggctgcagcagccccgccggcggcgcgcacggcaactttggagaggcgagcagcagccccggcagcggcggcagcagcggcaatgaccccttggctcgggctcatcgtgctcctgggcagctggagcctgggggactggggcgccgaggcgtgcacatgctcgcccagccacccccaggacgccttctgcaactccgacatcgtgatccgggccaaggtggtggggaagaagctggtaaaggaggggcccttcggcacgctggtctacaccatcaagcagatgaagatgtaccgaggcttcaccaagatgccccatgtgcagtacatccacacggaagcttccgagagtctctgtggccttaagctggaggtcaacaagtaccagtacctgctgacaggtcgcgtctatgatggcaagatgtacacggggctgtgcaacttcgtggagaggtgggaccagctcaccctctcccagcgcaaggggctgaactatcggtatcacctgggttgtaactgcaagatcaagtcctgctactacctgccttgctttgtgacttccaagaacgagtgtctctggaccgacatgctctccaatttcggttaccctggctaccagtccaaacactacgcctgcatccggcagaagggcggctactgcagctggtaccgaggatgggcccccccggataaaagcatcatcaatgccacagacccctgagcgccagaccctgccccacctcacttccctcccttcccgctgagcttcccttggacactaactcttcccagatgatgacaatgaaattagtgcctgttttcttgcaaatttagcacttggaacatttaaagaaaggtctatgctgtcatatggggtttattgggaactatcctcctggccccaccctgccccttctttttggttttgacatcattcatttccacctgggaatttctggtgccatgccagaaagaatgaggaacctgtattcctcttcttcgtgataatataatctctatttttttaggaaaacaaaaatgaaaaactactccatttgaggattgtaattcccacccctcttgcttcttccccacctcaccatctcccagaccctcttccctttgcccttctcctccaatacataaaggacacagacaaggaacttgctgaaaggccaaccatttcaggatcagtcaaaggcagcaagcagatagactcaaggtgtgtgaaagatgttatacaccaggagctgccactgcatgtcccaaccagactgtgtctgtctgtgtctgcatgtaagagtgagggagggaaggaaggaactacaagagagtcggagatgatgcagcacacacacaattccccagcccagtgatgcttgtgttgaccagatgttcctgagtctggagcaagcacccaggccagaataacagagctttcttagttggtgaagacttaaacatctgcctgaggtcaggaggcaatttgcctgccttgtacaaaagctcaggtgaaagactgagatgaatgtctttcctctccctgcctcccaccagacttcctcctggaaaacgctttggtagatttggccaggagctttcttttatgtaaattggataaatacacacaccatacactatccacagatatagccaagtagatttgggtagaggatactatttccagaatagtgtttagctcacctagggggatatgtttgtatacacatttgcatatacccacatggggacataagctaatttttttacaggacacagaattctgttcaatgctgttaaatatgccaatagtttaatctcttctattttgttgtcgttgcttgtttgaagaaaatcatgacattccaagttgacatttttttttcattttaattaaaatttgaaattctgaacaccgtcagcaccctctcttccctatcatgggtcatctgacccctgtccgtctccttgtccctgcttcatgtttgggggcctttctttaactgccttcctggcttagctcagatggcagatgagagtgtagtcaagggcctgggcacaggagggagagctgcagagtgtcctgcctgccttggctggagggacacctctcctgggtgtggagacagcttggttccctttccctagctccctggtgggtgaatgccacctcctgagatcctcacctcttggaattaaaattgttggtcactggggaaagcctgagtttgcaaccagttgtagggtttctgttgtgtttttttttttttttttgaaataaaactataatataaattctcctattaaataaaattattttaagttttagtgtcaaaagtgagatgctgagagtaggtgataatgtatattttacagagtgggggttggcaggatggtgacattgaacatgattgctctctgtctcttttttcagcttatgggtatttatcttctattagtatttgtatcttcagttcattccactttaggaaacagagctgccaattgaaacagaagaagaaaaaaaaaaaaagcagcagacaacacactgtagagtcttgcacacacacaagtgcccaggcaaggtgcttggcagaaccgcagagtgggaagagagtaccggcatcgggtttccttgggatcaatttcattaccgtgtacctttcccattgtggtcacgccatttggcagggggagaatgggaggcttggccttctttgtgaggcagtgtgagcagaagaagctgatgccagcatgtcactggttttgaagggatgagcccagacttgatgttttgggattgtccttattttaacctcaaggtctcgcatggtggggcccctgaccaacctacacaagttccctcccacaagtggacatcagtgtcttctctgtgaggcatctggccattcgcactccctggtgtggtcagcctctctcacacaaggaggaacttgggtgaaggctgagtgtgaggcacctgaagtttccctgcggagtcgataaattagcagaaccacatccccatctgttaggccttggtgaggaggccctgggcaaagaagggtctttcgcaaagcgatgtcagagggcggttttgagctttctataagctatagctttgtttatttcacccgttcacttactgtataatttaaaatcatttatgtagctgagacacttctgtatttcaatcatatcatgaacattttattttgctaaatcttgtgtcatgtgtaggctgtaatatgtgtacattgtgtttaagagaaaaatgaaacccacatgccgccattttcctgaatcaaattctgcagtggaatggagaggaaaatacttctaggcaagcagctagactggtgaattgggggaaatagaaggaactagtaaccgagactcctccagcctcctccctattggaatcccaatggctcctggagtaggaaaaaagtttaaactacattcatgttcttgttctgtgtcactcggccctgggtagtctaccatttacttcaccccaagtcctgctgcccatccagttgggaagccatgattttcctaagaatccagggccatgggagatacaattccaagttctcgcttcctcctttgggcatctcttctgcctcccaatcaaggaagctccatgctcaggctctcagctctcgggccagtgctctgctctgtccagggtaggtaatactgggagactcctgtcttttaccctcccctcgttccagacctgcctcatggtggcaacatggttcttgaacaattaaagaaacaaatgactttttggaatagccctgtctagggcaaactgtggcccccaggagacactacccttccatgccccagacctctgtcttgcatgtgacaattgacaatctggactaccccaagatggcacccaagtgtttggcttctggctacctaaggttaacatgtcacaagagtatttttatgagagacaaacattataaaaatctgatggcaaaagcaaaacaaaatggaaagtaggggaggtggatgtgacaacaacttccaaattggctctttggaggcgagaggaaggggagaacttggagaatagtttttgctttgggggtagaggcttcttagattctcccagcatccgcctttccctttagccagtctgctgtcctgaaacccagaagtgatggagagaaaccaacaagagatctcgaaccctgtctagaaggaatgtatttgttgctaaatttcgtagcactgtttacagttttcctccatgttatttatgaattttatattccgtgaatgtatattgtcttgtaatgttgcataatgttcactttttatagtgtgtcctttattctaaacagtaaagtggttttatttctatcacacaaaaaaaaaaaaaaaaaaaaaaaaaaaaaaaaaaaaaaaaaaaaaaaaaaaaaaaaaaaaaaaaaaaaaaaaaaaaaaaaaaaaaaaaaaaaaaaattttaaaaaaaaaaaaaangggggccccccccgggggggggccccaattccccctttagggggg

SEQ ID NO: 24882 - DNA, 3181 bp, Homo sapiens; identical to SEQ ID NO: 23403
  misc_feature 1, 2, 3, 4, 96, 97, 98, 99, 100, 101, 102, 103, 104, 105,106, 107, 108, 109, 110, 111, 112, 113, 114, 115, 116, 117,118, 119, 120, 121, 122, 123, 124, 125, 126, 127, 128, 129,130, 131, 132, 133, 134, 135, 136, 137, 138, 139, 140: n = A,T,C or G
  misc_feature 141, 142, 143, 144, 145, 146, 147, 3181: n = A,T,C or G

SEQ ID NO: 24883 - DNA, 913 bp, Homo sapiens; identical to SEQ ID NO: 22725
  misc_feature 1, 2, 3, 4, 13, 16, 17, 18, 31, 37, 45, 51, 53, 59, 61, 64,66, 67, 73, 75, 80, 88, 91, 98, 100, 108, 111, 119, 121,124, 751, 752, 789, 790, 792, 794, 798, 803, 808, 814, 819,825, 827, 831, 838, 841, 846, 852, 854, 855, 856, 857: n = A,T,C or G
  misc_feature 858, 860, 862, 867, 868, 870, 874, 877, 882, 885, 886, 887,888, 896, 897, 898, 899, 900, 901, 902, 903, 904, 905, 906,907, 908, 909, 910, 911, 912, 913: n = A,T,C or G

SEQ ID NO: 24884 - DNA, 794 bp, Homo sapiens
  misc_feature 1, 2, 794: n = A,T,C or G
nnacctccagacagatcctatatctttcttccaggtactgtaagctaaatggactaccagattgaaacgctccctcagttctctccctgtggcttctgggctgttggtatttggacccttgtgaagatggcctgcgctgccgtgtggtccccagcctaccaggacaggtttatttgtatctatcctgcttatttaaataataagaagaccattgtggaaggaaggtgaatcccataagtaaggctgttgaaaatcctacagccagagattcaagatctatgttcaggtttatttgtatctgtcctactcatttaaataataagaccattgtggaaggaaggtgaatccccataagtaagactgttgaaaatcctacagctagagattcaagatctatgtttagcagttggacttaatgcatttcttgagaaaaataaaatgttctctagagaatggaatcgtgatgttcaatataaaagcagaatctgggcccagctcaaccaggaaaatggcagcctctatcttgtacatttcccaccacgttaagtcagtaatgtcgtgtgcagcataaatgatacctaaactaaaaacaaggacacaaaaaaacaggaggtgctgaccaaagtcttcaacaaggagagggaagtaaaaaagggaaaggaaagaaaaagaagtaacctagtatcagcatcaagtatgtggtacattgatgggctggagagcagggtggcagcctgttctgcacagaaccaagaattacagaaaaaagtccaggagctggagaggcacaacan

SEQ ID NO: 24885 - DNA, 573 bp, Homo sapiens
  misc_feature 572, 573: n = A,T,C or G
acgcggggccccggtcgggcgggacttcctgtgtcgtatttccaaggactccaaagcgaggccggggactgaaggttgaacagcagagaatttcaaaggaccttgctaatatctgtaagacggcagctacagcaggcatcattggctgggtgtatgggggaataccagcttttattcatgctaaacaacaatacattgagcagagccaggcagaaatttatcataaccggtttgatgctgtgcaatctgcacatcgtgctgccacacgaggcttcatttgttatggctggcgctggggttggagaactgcagtgtttgtcgctatattcaacacagtgaacactagtttgaatgtataccgaaataaagatgccttaagccattttgtaattgcaggagctgtcacgggaagtctttttaggataagcgtaggcctgcgtggcctggtggctggtggcataattggagccttgatgggcactcctgtaggaggcctgttgatggcttttttttagtaccaggcaacaaggaaggcccagaggtgtggccgttgttttacacacaggaaacann

SEQ ID NO: 24886 - DNA, 816 bp, Homo sapiens; identical to SEQ ID NO: 21390

SEQ ID NO: 24887 - DNA, 1601 bp, Homo sapiens
  misc_feature 1, 1598, 1599, 1600, 1601: n = A,T,C or G
nagtgtggaagtagccaacaattgcctggaacccagaggggaatagcatggaaggtagtctcctctgagggtggtaacaagccgggattccctactgtccttggccgatatttcccttggcgtccgaatcgttccaccatcaatggcctgccagcgtctttcgatgtgttcttctgccagtgtgttcctcttgacgtccagccgcttgtgtgtgtgcccgctggggtctcagggtttttataggcacagaatgggtggcatggcaggccagagtggtcttggaaaatgcaacatttgggcaagaagacaggagtccttgttctcattaggtccatgggcacaagcctgagggtggagcccttgccagtgaccctgcccttctctacccagcacttccctgtccccctcccatatcaccgttgccatcttgtccttgatgaggaatacaactcccaattacagtgttgctgtgggagatgcagtcctctttatgacagtttctagaagttgataagaaaatgggacctgcctagggctagtatctcatttaatactctatagaatattatgtgtttttcctttttagtttttaatgttgaagatcagaaaagagacaccataaatttacttgatcagcgtgaaaagcggaatcatacactctgaattgaactggaatcacatatttcacaacagggccgaagagatgactataaaatgttcatgagggactgaatactgaaaactgtgaaatgtactaaataaaatgtacatctgaagatgattatgtgaaattttagtatgcacttgtggtaggaaaaaatggaatggtcttttaaacagctttgggggggtacttgggaagtgtctaataaggtgtcacaattttggtagtaggtatttcgtgagaagttcaacaccaaaactggacacatagttctccttcaagtgtggcgacagcggggctcctgattctggaatataacctttgtgtaaattaacagccacctataagaagagtccatctgctgtgaaggagagacagagaactctgggttccgtcgtcctgtccacgtgctgtaccagtgctggtgccagctgtacctgttctcactgaaaaaagttctggctaatgctctctgtgtagtcaccttctgattctgacaatcaatcaactccaatggcctagagcactgactgttaacacaaagcgtcactagcatagtagcaaccagtttaagtctacatacaacgttgttctgtgttgagaacttccacaacggccacttgtaataataaccccttggcattttaaatgttacaaaaccggcccactacgtggcttagcactgtgaccaatcggttgcgctaattaacattggctccgtgtgtttgggcaaggaaatttccctagatttatatccagacaacgcagacagcacttggtttggacacacacacaggcacacggggctgacctgaccaccttgtgtgcagcacgcaccagggcatttgagaacaacgtgccactaaggggacacaaaccttggcagcatccggacaggcgtcacacaacaggtacgagagcaacacaaacaacnnnn

SEQ ID NO: 24888 - DNA, 667 bp, Homo sapiens
  misc_feature 1, 2, 3, 4, 666, 667: n = A,T,C or G
nnnnaacactacaggtttcaaatgaatacttttcttatgttgccttcagaggttcaggacttctgcttttaaaacctgcagcctaccgtgggaaaccaaaaaagcattccctatttccaactgcagtatgtataaatacatatcactacaaaatgtatagaaagtgtgatgagatacatgaatggcatttttattggtcataacattttgatgaaaagcatttaaagttttaactttataaggcttttcaaaatgtgtttttctgagatacattgttatttattcatatccagaaaaattacaaggataatacagaatataataaataatttatctgagagcaggaagtatcctctcatgcttaatcagtttggggtttttaattataacacaggaaactcataacaggacctggtcagagagcatcccagatccattaaagattggattcattgacttggagaaaagtacatttctcagggatcagctagaatctggacttgcctaactcacatttcattttttttgttgttgttgttgtttttataatttcaacttttattttagatgtaggggtacatgtgcaggtgagttatatgggtatattttgtgatgctgaggtttggggtacaaatgatcctgtcacccaggtagtgagcatagagnn

SEQ ID NO: 24889 - DNA, 872 bp, Homo sapiens
  misc_feature 866, 867, 868, 869, 870, 871, 872: n = A,T,C or G
acaatcactgcccccccgctttttttttgagatggggtcttgctatgttgcccaggctggtcttaaacgcctgggctcaagcaaccctcccgcctccctgctgagattacaggtgtaagccaccataccgcaacctcaatgacacctttctgatggtctttacacagtctgtgatgtctggtggcccccctgccctggactcaataattgatagattttcctagagtaacagtatgagagctccagccattccattaaaagtattagttctgctttgagctgaaaccagttgagcctaatggaagactggatgtctttcttcttcatccaagcaccctaatgactgtttagttacatccatagatgcagacaacataacacctgtgacttacttgaattgggataagccattccagaagtagcttatcctagacttggaaataagatttttttcaccactaacttccatgcttcagagatgacattcaaagccagattcccaagtgcctgatcatacctcccagtctcaggaagatatttgcttaccccttagaccaagaatcttaagatcttccccagctatgaagcctatcttggaatgggaaaccatgaaatttgtcttttaaaagaaagggaagaaatagccttacagcccctgttcctccaagtgcacatttagccttaaaatcctgggagtcgggagacaccgtggagtccttacatccacagtgtctgctggtcgtggtcagaaggcagtaatgcaagagtccttttgtgaagagtgtttctatgtagagatgtttatatttaagtagttcttttataaataaaagcatttctaatggccaaaaaaaaaaaaaaaaaannnnnnn

SEQ ID NO: 24890 - DNA, 629 bp, Homo sapiens
  misc_feature 1, 2, 3, 4, 5, 6, 7, 579, 612, 619, 623, 624, 625, 626, 627,628, 629: n = A,T,C or G
nnnnnnnaagcaatacaagatggcaaactttaaacaagattctttttttgcagcagcacttctaaaagatttgaaaacaccaagaagatagatagaatattcactatttctacatattgatgcaattgtggtgctctttttcatttgaaacatcttctcctaaaatatacactttaagaaatagtcatttctgtttttgcattaaagtaaattaaagcagaaaacacatgctcacttttggctaacttcagtgtatagatttcatacttatgttgtctttcctgggtacagatttattactgaacaagtacgtgtaagtaaaatgtcattggtgagcaggacacaagataaaaggtgaacaccacatatggtgtgaattgtaaatgcttataccacaaacttgaaaatgtgtcatgtagagccatggaaaatgtctagttgtttttatgtagtacacacattttaatggtgctaacaacctgggctcttttgttcatagagttattctgaaaaaaatttcataaaagacactgcctaaagataggtagaataggctgtagcttgatttactgtgggggnttaaaaacccccaaaaaaaaagggctttaattngttttcngtcnnnnnnn

SEQ ID NO: 24891 - DNA, 2790 bp, Homo sapiens
  misc_feature 1, 2, 3, 4, 5, 6, 7, 8, 9, 2790: n = A,T,C or G
nnnnnnnnnaaaatttaatgtggtaagatcttggttaccactactcttttgtgtaattggatcgtgtgtctcctcttatgccatcttcgcattgccttttcctccatgcagcgtctatcttgcgagaagtccgtaacttgaacatccttacgtagttttctgacgtacgaattatccctggattcggcaatacgccgggtataggaagtcgtgctacccccgcggagttgtcgtgtgttctggattcattccggcaccaccatgtcgaaggtttcctttaagatcacgctgacgtcggacccacggctgccgtacaaagtactcagtgttcctgaaagtacacctttcacagcagtcttaaagtttgcagcagaagaatttaaagttcctgctgcaacaagtgcaattattaccaatgatggaataggaataaatcctgcacagactgctggaaatgtttttctaaaacatggttcagaactgcggattattcctagagatcgtgttggaagttgttaatatctgctacttggaacatacgattgcctttcagaataaatattggtattttttgttgttgtaaaattgaaatcaggcatttaacatactatgaaaacaccaggagtcaatgattaatgaaaggtgactcatctgtccctttttgttgtccatactcttcctatgaagagggaatgcgtatgaattaaggctactactgtcacagaagatcatagtctttgatgctacctcacaacacaaacaggtagttcgttgggggcaaatgaattagccaactgttaactggaagcttttgataatttttttttttagaacaatttggaacattaaaatttactgaatcgtatatattcatctgagataaaaatataaaaagaattatggaccctggatggcaatttgcttgatagcatctgatttgcagactcataatttgatttttaattaaatatataggttatgatgaagtgaatagacatatcagtgaacagttaactatattaaatttttatcatttactttttttaagattcagacctcagttatataaatttcagtttaatatcaaccaaaaaattaaaattttaatctaacccttatgtgtataaattggtgtcccataccagcttttaatggtggacctatagaatccagtacttttaatggtgggaatttacagtagaagcatcctttgctgagttatacattcctttatcaatctcttttgatacaacatttaaaacaagtagcttcaagaaaccactggtgttttgaggatagtatttctaaatagcattcaggaacagagtattattgcacagatctgaagatcaaaaaaaagctcaaggaaatacagatcggaagtgctgatgagttatatttattgaaaacccaacttttaaggaagtgctaagatcagtcacccatgtgaataagaagccaggaaaggaaagatggggaagcccagatcaccaggcttctattaaggaggaaagcaacagaggaaacagtgaaggggaacagaagggggtagcaaagtgttacagaaaagcggactggatagacaaaactgcagaaggtgtatgttggggagaactgaaagggaaaacaaaatacttgacatagtcttaagtagaagaaggcagttagagaaaacaaagtatctactggccttgtcaacatacagacttcaaaataccccttatgagaatccaaagaatgatgtgtgtaagggaagattttatttgcccttccggaagaaatcagtatctatgcaaatcttgaaagacgaaatcaaagcccattaatgattcagaatcagtgcttgacctcctgtattctgaatggtgaactctggaagcagggattgtgtctggctctttttagagctggaagtgtagtggctttcattaaatacttgctgtaaagtctttctaagaccaattattatcttagcatgtttcagtatcttctctatcataggccctaagttcattgggggaaaaaaaataagaagattcaacagaatcagcatttgaagtgtaccattggtagttgtttatgaaattaccagatattcataaatgtgacaaatgaacagcaggattatgaattatcaaaggaaaaagtatttgctgaggtgaaaaaatctgatgtttgaggaagtttttatttttatttatttgttttgttttttttttttttgaggcagactctctgtcgccaggcttctcctgcctcagcctcacgagtagctgggactacaggcatgcaccaccacgcccagctaatttttgtatttttagcagagacagggaggaagtttttatttttataaacaaaatctgatgttcagaggccccgtttcttacaataaatgttgagtcttagttaagcaggaatttatgaacacccatttcctgactttttgctttaatttagatttttctccatcctgtttctagcacaaaaatttgcctgctgtgttacaaaaataaatttatgttgtcctgtgccataaagtgatatatttaatatttttattctttggttttgaacattgtaagttcctaaaaacattttattaaacaagtagacattttgttattaaaaaaatgtgatctgtaatttctttgtgcagaatgatttgaagtattgtattcagtttacatgcattattggtttataattaatatctaatgaaaatacatgttgttatattgtaaaaaaaaaaaaaaaaaaaaaaaaaaaaaaaaaaaaagggcggccgcn

SEQ ID NO: 24892 - DNA, 3548 bp, Homo sapiens
gtcgacccacgcgtccggtgccctgagacatatgtttgggtacccattgagcaatgcctgccttcacttgaaaactccaagtactgccgtttcaaccaggacccagaagcagtggatgaggatcgcagtacggaacctgaccgattgcaggtgtttcacaagagagccatcatgccttacggtgtttataagaaacagcagaaagacccaagtgaggaggctgctgttctgcagtacgccagcctggtggggcagaagtgctccgagcggatgctgctgttcagaaactgacctgttcacctctgccgggaagttcctgtgttgtgctgatgatttgtgccaggatacatattcagtacctgtggggaaataactgtcaccacccacaaattagacattttttattttgactatctatggcttttaaaaaatattttgtggcaatgtatctgtgagaatctcatagttaatataaagattttaaaactgcattatgacctagcccccataattgggatttatcattttggaggattctttctagagcaagatatgctcaaattctcctgtttgtattttgtaaaatgaagaagtgaatctaagtaacttaatcacagttgtgcattttttttggttctgttagagaaattaaaacagactgtttcctcaggcccattttaaactgaacttatgctaggaaaccttaagtatggggaaggtagaaagttcatttcatcacttagaaaatatgtcttctcaagaacaaaactgtgctgttacaactcagtgttcaatgtgaaattgctgccaaatgttatgtagtttaatagagaacttgaaaaaataaaacattaaaatggagcttgtgttagcatcaggtatccatttgttcaggacagtcctgttcatgtctgttgtcttggcatagttttttcccctagaatatagtactcccttttactctaaaaaatatcccagtttggacaataaaatacataattactctagttatattatttgctttacttctaaaaatgtaagaaattgaatttttttaaagaaaaatgttggttcctgccttgatctaagtctcatccaaaggaaataaatagtcactagttttttatcttacaactcaggacatttgtctttggttattaatggaaattagtatgtgattactttcatagttatgccacaaatcacattgaagaaggaatcattccgacctctgttccaggacaagagctagaacaatccatttcttgtcctttgatttgagagtcacagtcagggtggcttctgccacccttagtaactcagagcagaggccagccccctccttccctcactttcttttgctgagtcctttgcccacctgtcaaggtggcaggcactgtgctgggtacaggaggacagtcagacatgtcccttcttagctatagtcgagctgtctgggaaacaggatgaaaaacaggagggttattttcttgtgccctctttgtcagctgatcccctcttctgctaccagctatttggccagcaagccgtttttagtccccactttgcccatttttctgttttggttcatcgtttcttaaaagccatgttataaaacatggtagtttgaatcctgttgctaattttaaactttcctctaaaatgtactgaattttgacaaaaatttgaaaatatcctcagctaactagaataaaaaggatcataaaacaatgattttaaaactgaaatctctagaaactcaacatccaagtcagccgcatttcttcattcagagtgtgtgtgtcacacctgccaaggtgctgcgtactctgctaaccgagctagagtagtgagcaaagccattttctctgatcacaagattttacatttttctgggattttgacctgcaaagtagtctcgtaagagcatttgagagacttacttggaactgccttcagaatctatagagccttttttctttttcctctaaaatgaaaagagcttcattttatgattataacaaaagtgacactgtaagcagttagaacattaagaagtataaataaaaagtaaaaatcatctacaaccctaccatactcagaaggagaaaagaactgtcatgtatgtatacacacatacctatgtaattttaatataaatagaattatgttctacatgctgttttatttcctcaacagtaaattatggacatgtctgaaatgtgaaataaatttcaaaataaggcttcagaaagtgtagtaagtaatctctgcattattaaaaataagcagggtagggctggtacttggctcccttagcatttgaatgtccaacttggtgttatcactgtatcttccctccatttgtctttgtgattagcatgtaaaatggtattcataaagatcacaacccttgaatatcagatgaagagaaaacttgactccaacatcttaccacaactctggtttcttcctgcagaattcattttcagaggaaaatgatgaatcatccctgtctgtgaaccactgtgctttccttgagggtggcattgtaggttgacaccagcaaagactcagagtgacttgagcattggagatccttctacttggctgctgtattcatgcattatgttggtttgagaatagctagtgtattgatccaagtagtcaaagtgtcttaaaaggacacctatttgtccttttgagccccagctgagtgaatactgatagtggactagaaaagcatagtcaagaaaagtgacccaccttgttacttgaccagcagtctagctgagagatctgattttatgttcgtaactttctgtaaagaaagacacaaggacttttcaaagacagtttatatctttccaaggcaggaagctttgcatttgcaatcttagtgttgtgtccctttctgattttcaaatacatcacacctgccttcctgttttgggagcaaagatgtaatttcaattccccttgctaccgtccttatttaaattatttccattctaagagatttttgttatttttttaaatgtaatctgagcacttttttgtattctaaaagatagatgatatcagataaatatgttgtacatttgattaaaattatttagataaatattactatgttgacttttaaatagctttatcctatttttcattcattttgcaaatatttgttgtgtgtagtttcttaacgtgtcagaatctattatgtaaaagaacctttccagatttctgaacagtatatgctttgattttataggctttatattatttcagtatgaataaagataaggaatatgaaacagttaactaaaatgtatctgtcgttgctaacttgaaaaatgaagtagaaacagttggaaaatgtttgaattagaagttattcaagtgcacactcttttctaaaagaaagccaatgactataaggcaaaagaagtttgactgcatgtggtattttttgctcttgtatatgctttttgaacaagctatttgataaagcctgaatggaaaaaataaagctgtttctatctgcaaaa

SEQ ID NO: 24893 - DNA, 408 bp, Homo sapiens; identical to SEQ ID NO: 21570
  misc_feature 1: n = A,T,C or G

SEQ ID NO: 24894 - DNA, 520 bp, Homo sapiens
  misc_feature 1, 2: n = A,T,C or G
nnataagggtcaaacgctacaacactgacccaggacttgtgcccgtggcctctggctattactcggcagtctacaaaggaccagactgtcaccaagtcgtcctccccacctgtcacgatgtacttgccatccgggctccagcacacacacagcaagcccccaaagtagcttttcatcgtaccgtgcagctccactgagtcaaagttgaacacccgcagaaacccgtcctggctcacgcacgctaggaacttgccatttcctcattaaaaagtttgctagtttcttttttgattgggtctataagctggacttggcctgcggaaaagcccactaggagagagacactttctgctgtggctgttaggtggttgaagtcatgacaagtaggctgtgttcctttgtatatccttttatctattggtttactcaagtcagcagcctcagttaaaacggagatgagaatctctgttctaccaacctcatgggattgtcttgcggacccccttgtagatatagaagt

SEQ ID NO: 24895 - DNA, 730 bp, Homo sapiens
  misc_feature 1, 2, 3, 702, 703, 704, 705, 706, 707, 708, 709, 710, 711,712, 713, 714, 715, 716, 717, 718, 719, 720, 721, 722, 723,724, 725, 726, 727, 728, 729, 730: n = A,T,C or G
nnngaagagaaatatgttttgaatccttttataaaatgtgcgatttagcctaattcgtaaagtaactgtacagtttcatatgccagttttacttgaaaaaaaatatgaaaactattgttaattcaaatctaaatttatttaaaccctaaaacacatggttttgatggctgtaatttaaagtaagagctatcaaatgatgctgacaaaagaaaaaccttccaaaatacaaaagaaagagaactctattatttacttacctgtattaatgaagaaaaatataaataattccacaaaattgattgttttcctaaagagcttaaagattagagttaaaaattggttttgaaacagaattatccttgttatttttgctggagagaagggaggaaattcagaaccaaacattctatttaatttgcaatgacttgcagtacttttttccctatccttatcctgtgaaacttactatcataaggttctaaaacagagaacttgtgtttaaataaagcccgtttaactttggtccacttttcttttggaaattaacttgttagaaaacaaagttagttcccaaacaaaacaaaatctaagttataatttgcaccattacaaagaaattgctgtcagggttttacacattttaaaaacatttcaatttcaaatgtgtatatcgtcaataaatctacctttactgataaaaannnnnnnnnnnnnnnnnnnnnnnnnnnnn

SEQ ID NO: 24896 - DNA, 1021 bp, Homo sapiens
ctcactatagggctcgagcggccgcccgggcaggtctggggaccacctgctacgcctcaggctggggcagcattgaaccagaggagttcttgaccccaaagaaacttcagtgtgtggacctccatgttatttccaatgacgtgtgtgcgcaagttcaccctcagaaggtgaccaagttcatgctgtgtgctggacgctggacagggggcaaaagcacctgctcgggtgattctgggggtccacttgtctgtaatggtgtgcttcaaggtatcacgtcatggggcagtgaaccatgtgccctgcccgaaaggccttccctgtacaccaaggtggtgcattaccggaagtggatcaaggacaccatcgtggccaacccctgagcacccctatcaactccctattgtagtaaacttggaaccttggaaatgaccaggccaagactcaggcctccccagttctactgacctttgtccttaggtgtgaggtccagggttgctaggaaaagaaatcagcagacccaggtgtagaccagagtgtttcttaaatggtgtaattttgtcctctctgtgtcctggggaatactggccatgcctggagacatatcactcaatttctctgaggacacagataggatggggtgtctgtgttatttgtggggtacctcggcggccgcccgggcaggtacttctgttggaggggacacatgttttcatttctcttgggtgtgtctatccaggagtggaattggctgggtcttatggtaactctgttaactgttttttgctttttggttttttgtttgttttttgagacggagtttcacccttgctgtgaactaccataggctggagtacctcggccgcccgggcaggtactctcaaaagctagggctgctgactgagcaactacagagcctgactctctttctacagacaaaactaaaggagaagactgaacaagagacccttctgctgagtctggagtcctctgagagagccaccaaggaggagcaggggagcga

SEQ ID NO: 24897 - DNA, 607 bp, Homo sapiens
  misc_feature 460: n = A,T,C or G
acgcggggcctttctcgttccccggccatcttagcggctgctgttggttgggggccgtcccgctcctaaggcaggaagatggtggccgcaaagaagacgaaaaagtcgctggagtcgatcaactctaggctccaactcgttatgaaaagtgggaagtacgtcctggggtacaagcagactctgaagatgatcagacaaggcaaagcgaaattggtcattctcgctaacaactgcccagctttgagtggcaataatattgaactgggcacagcatgcggaaaatactacagagtgtgcacactggctatcattgatccaggtgactctgacatcattagaagcatgccagaacagactggtgaaaagtaaaccttttcacctacaaaatttcacctgcaaaccttaaacctgcaaaattttcctttaataaaatttgcttgttttaaaaaaaaaaaaaatnaaaaaaaaaaaaaaaaaaaaaactcgagggggggcccggtacccaattcgccctatagtgagtcgtattacaattcactggccgtcgtttacaacgtcgtgactgggaaaaaccctgcgttacccaacttaatcgccttgcagcaca

SEQ ID NO: 24898 - DNA, 2454 bp, Homo sapiens
  misc_feature 1, 2, 2453, 2454: n = A,T,C or G
nnagagagagagagagagagagagagagagagagagagagagagagagagagagagagagcgaggaacgaggccgtcggccattttgtgtctgcttcctgtgggacgtggtggtagccgttgggttgggaaagtgagggatttttggcctcgtttctcctgcttcttttctcctcccttttactttgccggtagaacacagttatgggtcgcaagaagaagaagcagctgaagccgtggtgctggtattgtaatagagattttgatgatgagaagatccttattcagcaccaaaaagcaaagcattttaaatgccatatatgtcacaagaaattgtatacaggacctggcttagctattcattgcatgcaggtacataaagaaacaatagatgccgtaccaaatgcaatacctggaagaacagacatagagttggaaatatatggtatggaaggtattccagaaaaagacatggatgaaagacgacgacttcttgaacagaaaacacaagaaagtcaaaaaaagaagcaacaagatgattctgatgaatatgatgatgacgactctgcagcctcaacttcatttcagccacagcctgttcaacctcagcaaggttatattcctccaatggcacagccaggactgccaccagtaccaggagcaccaggaatgcctccaggcatacctccattaatgccaggtgttcctcctctgatgccaggaatgccaccagttatgccaggcatgccacctggaatgatgccaatgggtggaatgatgccacctggaccaggaataccacctctgatgcctggaatgccaccaggtatgcccccacctgttccacgtcctggaattcctccaatgactcaagcacaggctgtttcagcgccaggtattcttaatagaccacctgcaccaacagcaactgtacctgccccacagcctccagttactaagcctcttttccccagtgctggacagatggggacacctgtcacaagctcaagtacagcttcatccaattcagaaagtctgtctgcatcttctaaagctctgtttcctagcacagcacaagctcaggcagctgtccaaggacctgttggtacagatttcaaacccttaaatagtacccctgcaacaactacagaacccccaaagcctacattccctgcttatacacagtctacagcttcaacaactagtacaacaaatagtactgcagctaaaccagcggcttcaataacaagtaagcctgctacacttacaacaactagtgcaaccagtaagttgatccatccagatgaggatatatccctggaagagagaagggcacagttacctaagtatcaacgtaatcttcctcggccaggacaggcccccatcggtaatccaccagttggaccaattggaggtatgatgccaccacagccaggcatcccacagcaacaaggaatgagacccccaatgccacctcatggtcagtatggtggtcatcatcaaggcatgccaggataccttcctggtgctatgcccccgtatgggcagggaccgccaatggtgcccccttaccagggtgggcctcctcgacctccgatgggaatgagacctcctgtaatgtcgcaaggtggccgttactgatcttacttcatccagtctaataggtttggagattaaaccttttctcaacttgtgctgtttatatagccaagcttccgtcaataaggcttcattgtgactttaacaaacattatcttcccacataccaggaactattggacatttattttacatgggaaaaattatttggaataataaagcaggaacttttcctgaagttgcaatttatactgtatggcttctttttcatgtttcatctaggtttttagaagtgaagtatagtaaatttggttcgttaaattgtgaaggcgctggaattacatgaacataccaccctagtaaaggcaagttctgtaagcttacattgctatttgtaaagtttgccttcacagcatttcagatgctgttggacttcatgtccccaacctagcttggtgagggctgtaactgtttccaagtacttgtacattggaagtctgaatgtgtaacaatatttaatgtatttagagttcctcatgttgcagggtttaagaaatctgacccaccaaggtcatgtgacttttctgtactgttaaacttcattgtaataaaatgagagaaaaatttatgcctttttattcataacccagctgtggaccactgcctgaaaggtttgtacagatgcatgccacagtagatgtccacataataaaattcatagttaccaatgcgaaaaaaaaaaaaaaaaagttgggcgcgcgcccaaaatttaaaacactgggcccggcccggtaagggccggccagaacggaaagggtccccaaacacggggccctacaacaggtgggtcgcacnn

SEQ ID NO: 24899 - DNA, 1265 bp, Homo sapiens; identical to SEQ ID NO: 21987
  misc_feature 717, 718, 719, 720, 721, 722, 723, 724, 725, 726, 727, 728,729, 730, 731, 732, 733, 734, 735, 736, 737, 738, 739: n = A,T,C or G

SEQ ID NO: 24900 - DNA, 4611 bp, Homo sapiens; identical to SEQ ID NO: 23396
  misc_feature 4610, 4611: n = A,T,C or G

SEQ ID NO: 24901 - DNA, 7506 bp, Homo sapiens
gtgagggcctgtggggtgcgtggcaggcgtttaaggccgggctgcgggaggcgtggtcgggtcgggccgagtgaccgaaggggttaggccgggcggggctggatgcactgtgtggcgggactgcaggccggggtccccggacgcctttctgctgcgcttcttgtgggcccgggcctgtggttagtgaatttttctatcccgccgctccccagattctccggatatggccggagtgtttccttatcgagggccgggtaacccggtgcctggccctctagccccgctaccggactacatgtcggaggagaagctgcaggagaaagctcgaaaatggcagcaattgcaggccaagcgctatgcagaaaagcggaagtttgggtttgtggatgcccagaaggaagacatgcccccagaacatgtcaggaagatcattcgagaccatggagacatgaccaacaggaagttccgccatgacaaaagggtttacttgggtgccctaaagtacatgccccacgcagtcctcaaactcctggagaacatgcctatgccttgggagcagattcgggatgtgcctgtgctgtaccacatcactggagccatttccttcgtcaatgagattccctgggtcattgaacctgtctacatctcccagtgggggtcaatgtggattatgatgcgccgagaaaaaagagataggaggcatttcaagaggatgcgttttcccccttttgatgatgaggagccgcccttggactatgctgacaacatcctagatgttgagccactggaggccattcagctagagctggaccctgaggaggacgcccctgtgttggactggttctatgaccaccagccgttgagggacagcaggaagtatgtaaatggctccacctaccagcgctggcagttcacactacctatgatgtcgactctctaccgcctggctaatcagctcctgacagacttggtggatgacaactacttctacctgtttgatttgaaggccttctttacgtccaaggcactcaatatggccattcctggaggccccaaatttgaacctcttgttcgagacatcaacctacaggatgaagactggaatgaattcaatgatattaacaagattatcatccggcagcctatccgcactgagtacaagattgcttttccttacttgtacaacaatcttccacaccatgtccacctcacctggtaccatactcccaatgttgtattcatcaaaactgaggatcctgacttgccagctttctactttgaccctttgatcaacccaatctcccataggcactcagtcaagagccaggaaccattgccggatgatgatgaggaatttgagctcccggagtttgtggagcccttcctgaaggacacacccctctatacagacaatacagccaatggcattgccctgctctgggccccgcggcccttcaacctacgctctggtcgcacccgtcgggccctggacataccccttgtcaagaactggtatcgggagcattgtcctgccgggcagcctgtgaaagtgagggtctcctaccagaagctgcttaagtactatgtgctgaatgccctgaagcatcggccccctaaggctcaaaagaagaggtatttgttccgctccttcaaagccaccaaattctttcagtccacaaagctggactgggtggaggttgggctccaggtttgccgccagggctacaacatgctcaaccttctcattcaccgcaaaaacctcaactacctgcacctggactacaacttcaacctcaagcctgtgaaaacgctcaccaccaaggaaagaaagaaatctcgttttgggaatgctttccacctgtgtcgggaagttctgcgtttgactaagctggtggtggatagtcacgtgcagtatcggctgggcaatgtggatgccttccagctggcagatggattgcagtatatatttgcccatgttgggcagttgacgggcatgtatcgatacaaatacaagctgatgcgacagattcgcatgtgcaaggacctgaagcatctcatctattatcgtttcaacacgggccctgtagggaagggtcctggctgtggcttctgggctgccggttggcgagtctggctctttttcatgcgtggcattacccctttattagagcgatggcttggcaacctcctggcccggcagtttgaaggtcgacactcaaagggggtggcaaagacagtaacaaagcagcgagtggagtcacattttgaccttgagctgcgggcagctgtgatgcatgatattctggacatgatgcctgaggggatcaagcagaacaaggcccggacaatcctgcagcacctcagtgaagcctggcgctgctggaaagccaacattccctggaaggtccctgggctgccgacgcccatagagaatatgatccttcgatacgtgaaggccaaggctgactggtggaccaacactgcccactacaaccgagaacggatccgccgaggggccactgtggacaagactgtttgtaaaaagaatctgggccgcctcacccggctctatctgaaggcagaacaggagcggcagcacaactacctgaaggacgggccttacatcacagcggaggaagcagtggcagtatataccaccacagtgcattggttggaaagccgcaggttttcacccatcccattccccccactctcctataagcatgacaccaagttgctcatcttggcattggagcggctcaaggaagcttatagtgtgaagtctcggttgaaccagtctcagagggaggagctaggtctgatcgagcaggcctacgataacccccacgaggcgctgtcccgcatcaagcgtcacctcctcacacagagagccttcaaagaggtgggcattgagttcatggatctgtatagccacctcgttccagtatatgatgttgagcccctggagaagataactgatgcttacctggaccagtacctgtggtatgaagccgacaagcgccgcctgttcccaccctggattaagcctgcagacacagaaccacctccgctgcttgtttacaagtggtgtcaaggcatcaataacctgcaggacgtgtgggagacgagtgaaggcgagtgcaatgtcatgctggaatcccgctttgagaagatgtatgagaagatcgacttgactctgctcaacaggctgctgcgcctcatcgtggaccacaacatagccgactacatgacagccaagaacaacgtcgtcatcaactataaggacatgaaccatacgaattcatatgggatcatcagaggcctgcagtttgcctcattcatcgtgcagtattatggcctggtgatggatttgcttgtattgggattgcaccgggccagtgagatggctgggccccctcagatgccaaatgactttctcagtttccaggacatggccactgaggctgcccaccccatccgtctcttctgcagatacattgatcgcatccatatttttttcaggttcacagcagatgaggctcgggacctgattcaacgttacctgacagagcaccctgaccccaataatgaaaacatcgttggctataataacaagaagtgctggccccgagatgcccgcatgcgcctcatgaaacatgatgttaacttaggccgggcggtattctgggacatcaagaaccgcttgccacggtcagtgactacagttcagtgggagaacagcttcgtgtctgtgtacagtaaggacaaccccaacctgctgttcaacatgtgtggcttcgagtgccgcatcctgcctaagtgccgcaccagctatgaggagttcacccacaaggacggggtctggaacctgcagaatgaggttactaaggagcgcacagctcagtgtttcctgcgtgtggacgatgagtcaatgcagcgcttccacaaccgcgtgcgtcagattctcatggcctctgggtccaccaccttcaccaagattgtgaataagtggaatacagctctcattggccttatgacatactttcgggaggctgtggtgaacacccaagagctcttggacttactggtgaagtgtgagaacaaaatccagacacgtatcaagattggactcaactccaagatgccaagtcggttccccccggttgtgttctacacccctaaggagttgggtggactcggcatgctctcaatgggccatgtgctcatcccccaatccgacctcaggtggtccaaacagacagatgtaggtatcacacactttcgttcaggaatgagccatgaagaagaccagctcattcccaacttgtaccgctacatacagccatgggagagcgagttcattgattctcagcgggtctgggctgagtacgcactcaagaggcaagaggccattgctcagaacagacgcctgactttagaagacctagaagattcatgggatcgtggcattcctcgaatcaataccctcttccagaaggaccggcacacactggcttatgataagggctggcgtgtcagaactgactttaagcagtatcaggttttgaagcagaatccgttctggtggacacaccagcggcatgatgggaagctctggaacctgaacaactaccgtacagacatgatccaggccctgggcggtgtggaaggcattctggaacacacactctttaagggcacttacttccctacctgggaggggcttttctgggagaaggccagtggctttgaggaatctatgaagtggaagaagctaactaatgctcagcgatcaggactgaaccagattcccaatcgtagattcaccctctggtggtccccgaccattaatcgagccaatgtatatgtaggctttcaggtgcagctagacctgacgggtatcttcatgcacggcaagatccccacgctgaagatctctctcatccagatcttccgagctcacttgtggcagaagatccatgagagcattgttatggacttatgtcaggtgtttgaccaggaacttgatgcactggaaattgagacagtacaaaaggagacaatccatccccgaaagtcatataagatgaactcttcctgtgcagatatcctgctctttgcctcctataagtggaatgtctcccggccctcattgctggctgactccaaggatgtgatggacagcaccaccacccagaaatactggattgacatccagttgcgctggggggactatgattcccacgacattgagcgctacgcccgggccaagttcctggactacaccaccgacaacatgagtatctacccttcgcccacaggtgtactcatcgccattgacctggcctataacttgcacagtgcctatggaaactggttcccaggcagcaagcctctcatacaacaggccatggccaagatcatgaaggcaaaccctgccctgtatgtgttacgtgaacggatccgcaaggggctacagctctattcatctgaacccactgagccttatttgtcttctcagaactatggtgagctcttctccaaccagattatctggtttgtggatgacaccaacgtctacagagtgactattcacaagacctttgaagggaacttgacaaccaagcccatcaacggagccatcttcatcttcaacccacgcacagggcagctgttcctcaagataatccacacgtccgtgtgggcgggacagaagcgtttggggcagttggctaagtggaagacagctgaggaggtggccgccctgatccgatctctgcctgtggaggagcagcccaagcagatcattgtcaccaggaagggcatgctggacccactggaggtgcacttactggacttccccaatattgtcatcaaaggatcggagctccaactccctttccaggcgtgtctcaaggtggaaaaattcggggatctcatccttaaagccactgagccccagatggttctcttcaacctctatgacgactggctcaagactatttcatcttacacggccttctcccgtctcatcctgattctgcgtgccctacatgtgaacaacgatcgggcaaaagtgatcctgaagccagacaagactactattacagaaccacaccacatctggcccactctgactgacgaagaatggatcaaggtcgaggtgcagctcaaggatctgatcttggctgactacggcaagaaaaacaatgtgaacgtggcatcactgacacaatcagaaattcgagacatcatcctgggtatggagatctcggcaccgtcacagcagcggcagcagatcgctgagatcgagaagcagaccaaggaacaatcgcagctgacggcaacacagactcgcactgtcaacaagcatggcgatgagatcatcacctccaccaccagcaactatgagacccagactttctcatccaagactgagtggagggtcagggccatctctgctgccaacctgcacctaaggaccaatcacatctatgtttcatctgacgacatcaaggagactggctacacctacatccttcccaagaatgtgcttaagaagttcatctgcatatctgaccttcgggcccaaattgcaggatacctatatggggtgagcccaccagataacccccaggtgaaggagatccgctgcattgtgatggtgccgcagtggggcactcaccagaccgtgcacctgcctggccagctgccccagcatgagtacctcaaggagatggaacccttaggttggatccacactcagcccaatgagtccccgcagttatcaccccaggatgtcaccacccatgccaagatcatggctgacaacccatcttgggatggcgagaagaccattatcatcacatgcagcttcacgccaggctcctgtacactgacggcctacaagctgacccccagtggctacgaatggggccgccagaacacagacaagggcaacaaccccaagggctacctgccttcacactatgagagggtgcagatgctgctgtcggaccgtttccttggcttcttcatggtccctgcccagtcctcgtggaactacaacttcatgggtgttcggcatgaccccaacatgaaatatgagctacagctggcgaaccccaaagagttctaccacgaggtgcacaggccctctcacttcctcaactttgctctcctgcaggagggggaggtttactctgcggatcgggaggacctgtatgcctgaccgtttccctgcctcctgcttcagcctcccgaggccgaagcctcagcccctccagacaggccgctgacattcagcagtttggcctctttccctctgtctgtgcttgtgttgttgacctcctgatggcttgtcatcctgaataaaatataataataaattttgtataaataggaaaaaaaaaaaaaaaaaaaaactcgagggggggcccggtacccaattcgccctatagtgagtccgattacaattcactggccgtcgttttacaacgtcgtgac

SEQ ID NO: 24902 - DNA, 1354 bp, Homo sapiens
  misc_feature 1, 2, 1352, 1353, 1354: n = A,T,C or G
nncccgtcgggtggcgctcaccacctccccggaacacgcgagtctcctgtcgcggttccggtcggaattaccccgtggagcacgccgatatggctgcgctgacactgaggggtgtccgggagctgctgaagcgtgtggacctcgcgacggtcccgcggagacatcgatataagaagaaatgggctgccacagagcccaaattccctgctgttcgactggctttgcagaattttgacatgacttacagtgtgcagtttggagatctttggccatcaatccgtgtcagtctcctctcagagcagaagtatggtgcactggtcaataactttgctgcctgggatcatgtaagtgctaagctggagcagctgagtgccaaggattttgtgaatgaagccatctcccactgggaactgcagtctgagggtggccaatctgcagccccatcccctgcctcctgggcctgcagtccgaaccttcgatgcttcacttttgacagaggggatatcagtcgcttccctcctgccagacctggcagcctgggtgtcatggagtactacctgatggatgctgcctccttgctgcctgttctggccctcggcctgcagcctggggacatcgtgcttgacctatgtgcagctcctgggggaaagacactagcgttgcttcagactggctgttgccgcaatcttgctgccaatgatctctccccgtcccgaatagccagactacagaagatccttcacagctatgtgcctgaagagatcagggatggaaatcaagttccgacgttcacctccactgggattggccaggaaactggcggacaaacatggaggagagacaccctatgcaacgggatgccaggatggatgtgccctgaacccacagaccgccaccacccttccatgacgaggacaacacaatccataacaggcgcgaacaacggcacagcacaggcgccgaaaccgaccaatggcacgagagcatgccaaagaggacgaggaccagacggccgcgccagacacccatgcaacaccacacaacaaggcaagggaccggtgagaaacaacaaccgacacacacccacacacgagcccgaaacaacaaaagcgcgccaggagcacttgggcacccagtgaaaaaaacataccgacatccagaacccgggtggcaaaaaaggtccacagcaagcagacaaacgacacacgaggatcgacaacaacaggtgcaaacgcacacaccgacaggactagaggcccaccaacaacagaagacgacagacaccacggcagacaagacgatatgaaacaaaaacaaacagcacatacagaaccaccaattacgcacaaacnnn

SEQ ID NO: 24903 - DNA, 522 bp, Homo sapiens
  misc_feature 512, 513, 514, 515, 516, 517, 518, 519, 520, 521, 522: n = A,T,C or G
actgttccaagcacccaagtgcttgctttggcccttccattgccttaccatgccaccttggcaaactcccttaattgctttgggattcatacaaaaaaaccgatatacctgtgtagtccagctcatggcattgtaaggatcaaatggcatgctgtatgcaaaaggtctttggaatctatacacaaggctgtaaaactatgtcacactgtttggatggaaagaattctgtattcaggagccaaaatcagatattcagagacaaaaaaaggaagagatggctcctgcggatctatccctccacttccttgcatttctctacattttaaagtcatctcttagcactataaaaaggaaatccagcactttcacagctcctgacttgaacttccatatttttaatttagagacaaggatggtttaagaacttagaaagatgttgccctaccacccaaggaaaatgtctgacaggtttctatctttgattcacctactatttaatgaatattattcannnnnnnnnnn

SEQ ID NO: 24904 - DNA, 1409 bp, Homo sapiens
acgcggggctgtctctcctgctgtcttgtgaagaagggacttgcttcctctttgccttccaccatgattgtaagtttcctgaggcctcccagccatgcttcctctgaagcctgcggaacttcctgagcctcctacctctgctggaagcccagatcccattgtgtgccaacctagtaccggtgcccatcaccaacgccaccctggaccagatcactggcaagtggttttatatcgcatcggcctttcgaaacgaggagtacaataagtcggttcaggagatccaagcaaccttcttttacttcacccccaacaagacagaggacacgatctttctcagagagtaccagacccgacaggaccagtgcatctataacaccacctacctgaatgtccagcgggaaaatgggaccatctccagatacgtgggaggccaagagcatttcgctcacttgctgatcctcagggacaccaagacctacatgcttgcttttgacgtgaacgatgagaagaactgggggctgtctgtctatgctgacaagccagagacgaccaaggagcaactgggagagttctacgaagctctcgactgcttgcgcattcccaagtcagatgtcgtgtacaccgattggaaaaaggataagtgtgagccactggagaagcagcacgagaaggagaggaaacaggaggagggggaatcctagcaggacagagacttggatcaggacagaaccaatggatgaaaccacatataattccaatttggccagttaacttatgtaagtgaaatgaaacagttaactttattcattaatatgatcaaaacattatctttacttccaagatctgcaaaaacttaattatccaaataatttaagtttggaatttatatatttttcaatacataaagggtaaggaaactcttatacagtaatgagacggaaagaaaacaacagcttcccgtgaaaaagacctaatgtagtcaaatataaaaataagtacagtagcctctttttttttttttttttttggagacagagtctcactctgtcacccaggctggagtgcagtggtacctgcccgggcggcccgccccgggccaggttaccgacatctgacttgggaatgcgcaagcagtcgagagcttcgtagaactctcccagttgctccttggtcgtctctggcttgtcagcatagacagacagcccccagttcttctcatcgttcacgtcaaaagcaagcatgtaggtcttggtgtccctgaggatcagcaagtgagcgaaatgctcttggcctcccacgtatctggagatggtcccattttcccgctggacattcagagtaagtggtgttataaatgcactggtcctatcgggtctggtacctcggcggccttcgcggtaaagctccaa

SEQ ID NO: 24905 - DNA, 1202 bp, Homo sapiens
  misc_feature 1198, 1199, 1200, 1201, 1202: n = A,T,C or G
aaactccatctcaaagggcaaaaaaaagaaataagatgtgatgataatcacagtcagcttcttttttatgctgtggggaaattgggaagcttgcgggctgtcccatcatccatgtcaatggagacagcccagaggaagtggtccgtgccacacgactggtttttgaataccaacgccagttccgcaaggatgtgattattgatctgttgtgctacaggcagtgcggccacaatgagctggatgagccattctacaccaaccccatcatgtacaaaatcatcagagctcgaaagagcattccagacacatatgcagagcacctcattgctggcggactcatgacgcaggaggaggtgtctgaaataaaatcctcctactatgccaagttgaatgatcacttaaataacatggcccactacaggccccctgccctgaacctgcaggcccactggcagggcctggctcagccagaagcgcaaatcaccacctggagtacaggtgtgcccctcgacctcctgcggtttgttggcatgaagtctgtagaggtgccaagagagctgcagatgcacagtcacctgctgaagacacatgttcagtccagaatggagaagatgatggacggaatcaagctagactgggccaccgcggaagctcttgccttgggttctttacttgctcaaggttttaatgttcgtctaagtggccaagatgttggtcgtggaactttcagtcagaggcatgcaatcgtggtttgccaggagacggatgacacctacatccccctgaaccatatggacccaaatcagaaggggtttctagaggtcagcaacagccccctgtcagaagaggccgtcctgggattcgaatatgggatgagcatttgagagcccaaaggttactgcccctggtgggaggcacagttggcgatttcttcaatggtgcccagatcatctttgacaccattcatctctggagggagagggccaagtggctcctacaaagcggattggtcatcctccttccacaggtacgatggggctgggcacacactcattccgtcgaaaaaaggttcccggcgagttgacacgtccgcaaacgggggcccgcacctggcaccttttgtgttcccaaaccggcggatccacgtctggaaacgggcggtcaaaaccactgtgcccaaaattagccgcggataaannnnn

SEQ ID NO: 24906 - DNA, 3468 bp, Homo sapiens
  misc_feature 3467, 3468: n = A,T,C or G
acacccccggtctcctatattgtaggacccccaacccctattattggtctttccccttaaccagttttaacccccagtgctctcccttacgctccttgccagtcccgattaaggatcccatatagatcaatgtctttttctgtaaagtataggaaaaaccagagaggaaaaaaagagctgacaattggaaggtagtagaaaattgacgataatttcttcttaacaaataatagttgtatatacaaggaggctagtcaaccagattttatttgttgagggcgagcagtctacagcaaccagacctaggccttgtttgacgagatgtagagtcgagtcatgtaatcacaattggcctagagagagacaaggatataaacaaactatttccaatgtttaaccagtgcattcattcgagtagctcaggatagctggcctttaaattgactgggaagtaaagaatgagttttctcatgacacacatcaaagtctccttgttcaacatgatctggtctgagagttcataaactgaatccttcctgctgaaacagataagttgtctttatgtctgttacaatgcctgccttaaatatatatcatggcaaggaatgaagtcagctgctctgagtcagtgtaaaatgacagtattgagactgatgtggttccactaaaatatccacaaggacaaaagctcttaagtctaccgataaaatccttagctgcagtcttcatagattttgtttttcaaatcagtttgtttccagcaaaaaggtaggcaataagctatcggaaatgcccagcaagtaagctaatggcctgctcaaagggccagcctccaactctccctaccacctatatttggtggtatcagacatcaaaagattcatcttaaaagaacatctctcggcacaaggcagagcaattaaaaaaaaaatctattactggctagaagaaacttttccaaatggtttcattttaaatcacatgagaaggggtgttcaaagattgtcgcttgaagttcaactgttaaagtgagctgaatagtcataataattctggagaataggcagatatgccagtgatgaagaaaaaagaattcagccttttttttttttttttttaaagcttattagctcatttatcttggaaacagtagttaaactgaataaaaaccaaggggcaatataactgctactggttgagtcatacagtgatgtgtagtttggaaaagaagacgaatgatagatattgagcccctttaggaaatgttgccagtatttgaatttggctttcatagttatctcttgcacacgaagtagagtaccatggctgataacaagaggtcaaatgtacaagttgctctaatatggcctcaatgaggcaccagcttcaaaacccgcttgctgataattcaggtattcatggagggtcaagacttcaaagtcatgtacttcaagtaccagtagagcatctggtgttgcttaagggagtctgtcagtgtagggtgcatagaattgttctctggctatatcccattctaggaatcactggatatccatctggagtggagggctgttaatctaggttcacttgacaccatcttcagcaaatgatcattcctggggtcaaagacatgcctgtcttcttgcacttttctaagttcacacacagtatttctaagaatgttcagcatctactgaacatgaactgtgctgagtggaggtacagaaaagattggaatgccattcaggtcaaacatattgctgtctggggcagtggttttcaaactgtgttcggaagagttcaaggtgttgtaaggaagtccccttaggtgtcaccacggtggtaaaggaagatagttgtagcaggattcaggcccctactcttgcttcactacttcatccagagcagcttcacttttactctgggcttctgcacagttttcactcaaagggcttcatggccacaaagcctttggaaaaccaatgatctaagaataagtcggtcacaaaatgcttgatgtatcaagagaagccttttctggaatctggtgcagccttgtgagatgctgttaggtaaggggactccttggtagaatttcttacatttgtgtaaaaagttctggttcctgagtaattccaaagaagatgctatgaggagttcactgtgcctttgatttgatcccaatgggtcagaatatgttttctcattcagtaggctactacaggatttgaagtagaaaaaacagggtccagtgaccttcacgggatcctagatgttcatgaatttcaatcatttgagattgtggggtgtggtccaatgctgctctcaaaaagatgttgcctttcttcagagagcattaataactaaaaaatcccctggtccaaatttattgtgtgtctctgaaggctttaactgaagaaatgaaatgcacactcatggaacaaactaggcctttgttgtgataaaacagctttagctatttggcttgaggactctgacttcactataaagggctgtgctgaatctgggtagaacaagacaggagtggaggtaaaggccacatcatgatggctgaatgcctcctgggtcacagtggtccactggaatgggtgtcttcgtcagtagtaaggtggtaggaatcatctcgggcaaaaatccaggtaccaggtctgtaggctgatggaatagcacagggaaggtagtcagaaggtccaggtgaacactcagcaatcaggaggcacaggacataattcactttggatggagcatcctcagtttgcactgagggtctggacagaaactcaggtcttctaattcccagtaacagtgctggtggtagtgcttgctcagtcgttgtctcttttctcacagcaaggtcaacagtcccaaaattcaaaaataaaaaaaaatctacctccagtgttcctgccgcatcgtgacaagctctttcgggttccaggtccaggtcttgaaaatctggaaatctggagtccatggctgtggctacactgaaagttatctgctccaactattgcagaacactgtagtgaaatcttttcaacctccaatcctggacatctcatgttttgccacagaatttcaagctttgagttccagttgttttttttccctcctttctgctgaggaaagcatcttatcaccacagtcttaagtcttttgaggtacatccggatttaattacaaaagagcaaaaagaccaacacttttttttctccaagtcatttctctggaagtgagattatctgtctctgccctttaggaaaagggaatagtcaattgattttttcagacatttgaatgaaatagcataactggctaacatctaatcagacaaaatacacttaaatgtgtttgtgttcacttgcttagggctgtaccacttggtgagcaccactccacaaaacgaaaatgtttgaaatccaattgttcaaacatttttatagtgnn

SEQ ID NO: 24907 - DNA, 950 bp, Homo sapiens
  misc_feature 945, 946, 947, 948, 949, 950: n = A,T,C or G
acgcgggggggccgcacgctacgaggcccgcacacccacagaagctggagctaaccgggttacgaggaccacccagctgtctggagagatgaagaaaatgaggttcaaagagatgaagtctcttgcctaaagtcagtgacagaaagtgacagagctgggatgtgaatcctggtctgactctacagtcccacatggtagatggaacctccgagcaacacctaaacaaagggagttgatgcctccgaacagagtaatgtcgctggagacactaagcatcgtcggcccctggcaggagctccctaaatatgtgttggatggatggaagaaaggatggatagttcagagtacttcagccttgattcctccgcaacagacacctgaaacttgaccctacattggttcttggccatcgtgatcttccttggacagaatcacctttcagctccggtcatcagactttcccagggccctcagaaagcccttcagagttgttactcacaggcaggctgagggattccttacggggtctgcagctctcctcacctcatccacaagtaggaccgtggcctgttcctcactactgccccaggatcactctgttcccagcccagtccagcaatcacttgtctagctttctggaaccttgagtactttcttgaaccatgagtcctgtgaccaccctagcagctctaaccctcccttatctgaaaaggaagtgtgaggtgaccttgcagggtcccagagttgattgaagaccccatccagaaagaaggcgccctgtggggaaagattgcaaggcctaggtctgaaatcggaaagcttcacccatgggaaaagctggcagggagctaacttgaagccaggactgtatgcatgcaggcaaggaggcagaaagtggacatcaggaaaaaccccttgtgttatagacgcgatacaaccctgccnnnnnn

SEQ ID NO: 24908 - DNA, 1944 bp, Homo sapiens
  misc_feature 1940, 1941, 1944: n = A,T,C or G
tttccccaggggacctacccctattgcggtcctccagctcatctttcacctcacccccctcctcctccttggctttaattatgctaatgttggaggagaatgaataaataaagtgaatctttggtgccccgcagcgcgccattgtgttggtacccggaagttcccgcaagttggtctcgacacctggactagccgggttgtattggaaacgcggagtgagtttttccgtgctgtgtaggggctaacaatggacacccagaaggacgttcaacctccaaagcagcaaccaatgatatatatctgtggagagtgtcacacagaaaatgaaataaaatctagggatccaatcagatgcagagaatgtggatacagaataatgtacaagaaaaggactaaaagattggtcgttttgatgctcgatgaatgctgggaattcagaggaatgtcttcacttatacttggatttgctctcttcccatttctgattgttgtatagctttcgattttgcttacagtagttcccccttatcttcgggagatacattccaaggcccccagtgaactcctgaaacctcaaacagtaccaaacctttatacactgttttttccatatatatatacctatgataaagtataatgtataaattaagcatagcaagagattaataataatgtaatagaacaatgataacatactataataaaagttatgtgaatgtggttggtctctcttgctttcaaaatatcttcttgtacagtactcacctattttagaatgtggttgactacaggtaaccaaaaccacagaaagggaaacttggatgaggggggcctactgtacttaggaatacatatatactttgatttatttattaagaccatatatattgggggtcccaattgtatttggaatagccgggttgtatttggaaacgcggagtgagtttttccgtgctgtgtaggggctaacaatggacacccagaaggacgttcaacctccaaagcagcaaccaatgatatatatctgtggagagtgtcacacagaaaatgaaataaaatctagggatccaatcagatgcagagaatgtggatacagaataatgtacaagaaaaggactaaaagattggtcgtttttgatgctcgatgaatgctgggaattcagaggaatgtcttcacttatacttggatttgctctcttcccatttctgattgttgtatagctttcgattttgcttacagtagttcccccttatcttcgggagatacattccaaggcccccagtgaactcctgaaacctcaaacagtaccaaacctttatacactgttttttccatatatatatacctatgataaagtataatgtataaattaagcatagcaagagattaataataatgtaatagaacaatgataacatactataataaaagttatgtgaatgtggttggtctctcttgctttcaaaatatcttcttgtacagtactcacctattttagaatgtggttgactacaggtaaccaaaaccacagaaagggaaactttggatgaggggggcactactgtacttaggaatacaactatatacatatgattttatttttaagaccatattatattcgggtatccacaatatttggtaaacgcacctttggcccccgtaagggtactatggggcacctgcagttcgtttttaccccccggaaggggaaagggggttcccccaaccgcttgtatcacccgaaaacttcgggcgtgaaacagcgcgtcaaacccgcggtggatgataaatgtgccctctacgaatcacaaaatgtggggcgccaaaaacatcgggcgccagaacgcgtcccttagtttgcagacgtcgtagtgtgttgcatccctctcaccctctgatcttcgtcagtcgtgtcatgggtgagcgaagaaaagaaggnntgn

SEQ ID NO: 24909 - DNA, 1827 bp, Homo sapiens
  misc_feature 1, 2, 3, 1644, 1645, 1646, 1647, 1648, 1649, 1650, 1651,1652, 1653, 1654, 1655, 1656, 1657, 1658, 1659, 1824, 1825,1826, 1827: n = A,T,C or G
nnncacgagcgcggtcgcgtcataggccgaacaaccaaacagaaaagtttaataaacagcggacggaggggccggcggtggcggacggaggcaagcaggggttcggcggcattacctgtacccattcaccggcggctaccggcggcggcgcgcagcgtgtcaggcggagagacccgccgccagatcaaaagacactgacttagctgcttaccagaaggggaacttgggtgtgcaactgaggaacatggctcaagaaactaatcacagccaagtgcctatgctttgttccactggctgtggattttatggaaaccctcgtacaaatggcatgtgttcagtatgctataaagaacatcttcaaagacagaatagtagtaatggtagaataagcccacctgttcaatgcacagatggcagtgtgccagaagcccagtcagcattagactctacatcttcatctatgcagcccagccctgtatcaaatcagtcacttttatcagaatctgtagcatcttctcaattggacagtacatctgtggacaaagcagtacctgaaacagaagatgtgcaggcttcagtatcagacacagcacagcagccatctgaagagcaaagcaagtctcttgataaccgaaacaaaaaaagaatcgctgtttcatgtgcaggcacgacctcgggccctccggggttggatgccggtgtggaaatgcttactctgctgtacaccgttactcagaggtacacaagtgctcttaccaattactaacccgatgctggctgaggaaatcacgtaatggaatatccagtagttgttggtgaaaagatccaaaagatttgaactcctgctggaatacaaaattcttgagcatctgcaaactaaaaattgacttgaggttttttttttcctagtcattgggaatgtagagcagtgtatcttgcatgtcatcggaagaatagatttttgttttggttttgttttgaaaatgactctgaacatttatttccattgcaatttctgtggctgaggagacttaaactttacaagtattatccttttaagatcattttaattttagttgagtgcagagggcttttataacaaacgtgcagaaattttggagggctgtgatttttccagtattaaacatgcatgcattaatcttgcagtttattttctcattgtgtatgtatatatcgcttttctctgcagcacgatttctcttttgataatgccctttagggcacaactagttatcagtaactgaatgtatcttaatcattatggctgcttctgttttttcattaacaaaggttattcatatgttagcatatagtttctttgcacccactatttatgtctgaatcatttgtcacaagagagtgtgtgctgatgagattgtaagtttgtgtgtttaaacttttttttgagcgagggaagaaaaagctgtatgcatttcattgctgtctacaggtttctttcagattatgttcatgggtttgtgtgtatacaatatgaagaatgatctgaagtaattgtgctgtatttatgtttattcaccagtctttgattaaataaaaaggaaaaccagaaaaaacgcgaattccagcacacggcggccgttactagggatccgaggccggtannnnnnnnnnnnnnnnggacaaaagggtgggccgtaaaaaaaacttaaaaaaaaaacctctaaaccttaaacataaactgaaaacaaaaaaggaaggaaactggtgtattaaactttataatggcaccaaaaaagggaaaaaaaaaaaaaatttcaaaaaaaaattttaaaaaaaacggcnnnn

SEQ ID NO: 24910 - DNA, 2252 bp, Homo sapiens
  misc_feature 1, 2, 2162, 2163, 2164, 2166, 2167, 2171, 2174, 2175, 2178,2180, 2181, 2182, 2185, 2186, 2187, 2192, 2193, 2195, 2209,2211, 2213, 2222, 2223, 2226, 2228, 2235, 2237, 2238, 2239,2240, 2241, 2242, 2243, 2244, 2245, 2246, 2247, 2248: n = A,T,C or G
  misc_feature 2249, 2250, 2251, 2252: n = A,T,C or G
nngtcgaccacgcgtccgaggctctgtctctgtggagactgggctttgggagggagaaagagggacctagcgcgggccgcgcggcgcacggtgggcagctgcaatggcgctgtcgtgtacccttaacaggtatctgctcctcatggcgcaggagcatctggagttccgcctgccggaaataaagtctttgcttttgctttttggaggtcagtttgccagcagtcaagaaacttatggaaagtcaccattttggattcttagcattccctctgaagatattgcaagaaatttgatgaaacggacagtgtgtgccaagtctatatttgaactatggggtcatggacaatctcctgaggagctgtacagttctcttaaaaactaccctgtggagaagatggttccatttctacattcggactctacatataaaataaagattcacacttttaataagacattgacacaagaagagaaaatcaagcgaatagatgcacttgaatttctgccatttgaaggaaaagtgaatttaaagaaaccgcaacatgtattttctgttttggaggattatggtttagacccaaactgcatccctgagaatccacataatatttattttggtagatggattgcagatggacagagagagcttattgagtcatacagtgtcaaaaagagacactttattggaaatacaagtatggatgctggtttgtcattcattatggctaaccatggaaaagtgaaagaaaatgatattgtctttgatccatttgttggaacaggtggcctgctgatagcatgtgctcattttggtgcatatgtgtatgggacagacatagactacaacacagttcatggcttggcctgctcaacatgaaggtgatgaggatgaagacctttatgatgatccacttccacttcatgaatagtaaatctatttttactgaataaagtaattatggaaaatattttaaactctagaagcttcaataatgatgtgtgattggatggaattgaatcaaactgaaaaagtatttcttatagcttaatggaaaggctactaggaaaaaccagaagtggagaggaccagatgaaaacattagggccaatcttcgtcaatatggtttagagaagtattaccttgatgtcctggtttcagatgcatctaaaccttcctggaggaagggcacatattttgatgcaatcattactgatcctccatatggtatcagagaatctacaagaagaacaggttcacagaaggagataccaaaggggatagaaaaatgggaaaaatgtccagaaagccatgttcctgtttccttgagttatcatctgagtgatatgtttcttgacctgttaaacttcgcagctgagaccctcgttttaggtggaagactagtctattggttaccggtgtatacgccagaatacactgaagagatggtgccttggcacccttgcctggaactcgttagcaactgcgagcagaagctttccagtcacacatcaaggcgcttgatcacaatggaaaaggtgaagaaatttgagaatcgggaccagtattcacatctgctaagtgatcattttctgccataccaaggtcataattccttccgtgagaaatattttagtggggtaacaaaaagaattgccaaggaagaaaaatccacccaggaatgaaaattaagattttgacaatgaagaaagaataagaatttgatttaaaaagacatctggatgtgaactttcatgtatgatccagaaaataggtacggttttaaaatattttatatagaaaagctacaaagtaaattgagcaatgcttttaaagttatctttgttttatagacttttttgttgtatgtattacagtctttataatcttatttaatgtatatttgtactttcaagtactgatggagatagactcaaaacagttatttttttacaattaatctacaaagggaattaatattgttgacttttaaaacatctgctggatatattatatgcaattaatagtagttaagaatttattcatttggtagatatgtttatttggtttttggttgtcatcgatttacattgccactaataaaccatattgagaatttctaaaaaaaaaaaaaaaaaaaggatatacacccggtgggtgggcnnngnngggnaannggngnnnggnnnaaagnnanaacccccccttccncncnccccgccgnnccngnctccccnannnnnnnnnnnnnnnn

SEQ ID NO: 24911 - DNA, 3631 bp, Homo sapiens
  misc_feature 1, 2, 3, 4, 5, 6, 7, 8, 9, 10, 11, 12, 13, 14, 15, 16, 17,18, 19, 20, 21, 22, 3627, 3628, 3629, 3630, 3631: n = A,T,C or G
nnnnnnnnnnnnnnnnnnnnnnccaaataaacttgtcaccctgcatgcccttggcaaataagtgaagcagaaataggaacacagtccacattcaagttgaggaacagtgtatctttaagagctgacctttgggtgacctggaaagggggaaagatggctaagcatggagagaaacgaggcaagagacaagctatgatacaacaccgcttcagcccctgccctcaatagcacacaacccacatatcagctttctgaagagaaggaacctactgtttagtgctcctcactttgcaatgtttgtgctacgccagaatttctccagtttttttcattatcatccccctgagaaaaaaattacattgaatttaaattttccctaataagagaaattaaatatgaaagaataggattttgttgggtaagattgagctttggaaggtcacgaaccattattctatctaaggtgtgtgttttgttttgtttttttttgttttttttttgcaatccctctccccctgaaccaatttcacattgggaatgcaggacctagactgctgaataaaaagctacttcttctataattgtcaggttctctccaatttctcagcttcctcaaagacatggggtggagttgggtgtgccatcactgagagagctctggaacttttgactcttagtgacatttttagatttaggggttcatggccttccacatgttgccaccaactggtgatctctgccccttcatgctgatcaagaaagtagaaactcctcgtcgccttcaggtttgcagtcgcagaaacattgcctgctgtggactgtcagcacaaaactgggacactggtgtcatttagactgtcagcagtgcacatgattgtacgatagactccaggcaaccatgtgcatctgtgcaagatgacctctgccccaagagaagggttacggtctaattaaatgtttaccaagatggtaccagtgggctctccccgtgtcctttggtgttattggagctggtgtatgacagactcaaggaaattttttaaggaaaatgaagaagaaatcaacctttatggttctctttcattggaagaggagaataaggaaagaaatggcaggtagagagggagggggaaaggaatagaaatggcatgtctttgatgctgtggcttgtgtggggacaatgggaagagcacagcaggcacaacatatctgtgttagtgccacgtggtatctgttaagtatggccagagcctcacatataagtgaagagagttaagacaattcttgctctttgaacaataatagtctatagaatttctattggcaaaccatcccagacaacctgacctatcaaacaaaagcaaataatccctgtctcagaactgctggtctaaaagctagaaggggcatgataatggaaattgctagaaaagagagaatgctctactctctttcctgtgcctacctacccccatcctaaaccctgtaaaacagaatttcaaaatagatgtcaaatatgaagtaattcagacttccaaagaaggaaagagttctgcccagggcagtatgagcaaatccacagggatgttaagatttggtccaactcaaaggtttatgggcagtgagcctagagtctcttgagagtaaacccttgcatttgggacaaggagaatatgtgaagttcaggagtgctcacactagagcaagatccagaaaaaaaaaaatccaatggcattttaaactagattgcattatcactcaatgctgttactttgagcagacaaatcagttgaatgggagggcaaatggcagaaatgaacaaaagctattaggtgaaagcatccccaatgtatcagttgtgagatgatttttgtttaatgatgatcaggtttacattgaagtggcttggaagacgtatttcagagggactgggtttgtactgcaaaactctgaacactagagcaggttctactagcacttgggcagtaaggtagcgggtgtgtattatgctattgccatagttctcgtctttgtggattcacataccctttcccatgaggagcttgctactaacagcctcctgtttctgttgtttttatatgggagaagagaaagagcttggaatttcaattgtctaaacaattggtatgatttacaagaaggcaaaccattcaggagatgttcaacagtgtatcattcttagcattcaatacaatgtttattataaaatatacacctgagtttatgtttttctgccaggctgaagggcaataatgtcttgctatgcaaacactctattttatgtgtgaatttttttaactgtaattttatgtgtgaatttttttaactaaactctatcatcattttctatgttgacatcttttttttttttttaatctgtttccaactctgagtctgtgaactatctcttctgactggatgctggcctaaaagcctattagtgcttaaacagacctcgggtccttgatggcttcaacaaacaaggtcataatttgtttaaattcagtgttttctgtagataccttcttctcagtttcattaagaagagtaaccatctttggttttccaaagaatggaaactcctaccctagactttagacttagagcgtctgcctttcacgatgagtaagagatccagaatgtttaggggatgtgcgtcagcccacctggtacagtggcaaagctgaatgcgaacttgaggcctcctgaggcctgaccttctatgcccccagccctccaccccaagcaccttttggtgtggctggaaacacatgacattggatgtgatttttctcaagcccttcactgtggaaggcatgggagactgcccagcattgggcatgtggctgttaacgtttccatttcaagtccctgattcttactggagaagttaaggagccacttaatgttttcacagacctctgattctgttgtgaatgtggcattccagtgagtacaacctgcttgctataaagaaagcagcatattttgacaattttatttcttccttgggtacttacatttttattacaaaaatggccgttataaaaaaagacagaagggctgggcagtggcttgctccctagaaactgagattccgaagcaggtgtttcctctcccctagactcagaggtacatttaatccatcttctccatttcctccttcaggaccagctatgagattcagtgcatttctagcccagcggatgttcattctccactaaacttcatcttttactaagcaaagggggattattccatgaggcagccaggagcaaggggccatgatattcatgactttgtctgctgggcatttttcaaagtgtccttgaattcactcagcaaacaaagctttctggagaatctctcaaaacttaggccctgctccatttggccaaaaatgatggctgctccaaaactctgaacttcttaaaactccatctgctacattttctctgggtaacctgctttctgtttggtagactggtggcataccgagccagtcgtggggaagcccccgttctactgggactgggcgctttcacggcacacggggggtaacgccgagacgcctcaccagaggggggacagcagcacagtatggcnnnnn

SEQ ID NO: 24912 - DNA, 1938 bp, Homo sapiens
  misc_feature 1, 1937, 1938: n = A,T,C or G
ngctttctgctcttgttgcgtgtctttttgtgcactctgcttggtgtcctctctggtgttctggtgctgtctttctgctctttttctcttctgttctgttgtgttgcggttctgctgtttttgctctgcgtgggctttgctccgcggtctccttgtcccgcgctgcctgtcgctcctctctcgctcgttctacttgttcttttcgttccgttcttcgcttgtccttcgttgtctgtcattttttttttttgtttttctcccctctgtctttccggttctggtggctctcttgtggtctctttttctgcgttctgctgtggtttatttgttgctgctttcctttgtgtgtttccttgttcttgcgtttttgtctttcgtgcctgctccctgtctgtttgtctgggggtttgttctctgtgttgtcctttctccttttgtgttcgttctttccgtgtcgtctcgtggtcttctcctgttctgtcctttcttcgtttttgcctggtggcttcttagttcttgtcccctgttgtgtgcctgatcactctgctttgttctgtgattcagtgctgtttttattccatgggtctagtggttactgtcaggggttacctttggggttatatctggttgttctctgcgcggtccatgtctttcgtcttctaagctgcggtcgatttgtcggtggtggttgcatccgtttttctctcttatggtcacaagttttcacatgtctgttggtttttatttgggtatgagtatcatcgtgtattgtgattcttttgttgtgtttatgaattgtctattattttgatatgatgtttatttgtgctttattgtactgtgttttatgtctttgatgtttatcatgtcatagtattatattttaatgtatctatgatatgtatattttccctatgaatggcgagtttttccttggttttgtttccttgttggttataattgatgtgatggtttagattcatatatgatatggttatctatcgttgcctgtacatctttttgtgtccctggccatcttcactggtttgtaacctaatttactcatagtacctaggtatcctggtagggtagtctctacttgcgggtagtctagtaactgtcaggggcagcacctggacggtcggggctacctggcaggcccaggcagagaggctggcagagacctactgaggccatttgtgagagcaacccttcaggaatcgcttcagtttcacagacctgacttcatctcccgctctggggagcggataaagcgctctgaagttaatagtccaggagaggaagctgcagagcatgttacagaccgagcgggatgcactattcaacattgacagggaacggcagggccaccagaatcgcatgtgcccgctgcccaagagagtcttcctggctatccagaagaacaagcctatcagcaagaaggaaatgattcagaggtccaaacggatttatgagcagcttccagaagtacagaaaaagagagaagaagagaagagaaaatcagaatataagtcataccggctgcgagcccagctatataaaaagagagtgaccaatcaacttctggggagaaaagttccctgggactgacacaagtttattttcctcagagccttggaattctattttatgaacctagagaagcagaatccttacttttgtgagtctggttgaataaagcttattctttgtccatgtgtattttagaaatagtaacttctaaagagtctggaacaaagtggtgattaaaattcctaatggtttgggagcaatactttctgcatagtggccttgtccaatggcctgtgtgttacaatgatatgatcatttctcaagaataagtccctttttgtatgtgtttttatacttttagaaaataaaaactttagattaacaaaaaaaaaaaaaaatctagnn

SEQ ID NO: 24913 - DNA, 2008 bp, Homo sapiens
  misc_feature 1989, 1990, 1991, 1992, 1993, 1994, 1995, 1996, 1997, 1998,1999, 2000, 2001, 2002, 2003, 2004, 2005, 2006, 2007, 2008: n = A,T,C or G
agagagtccacccacgcgtccgggactccaagcgccatggccgctgccgcccgagcccgggtcgcgtacttgctgaggcaactgcaacgcgcagcgtgccagtgcccaactcattctcatacttactcccaagcccctggactttcaccttctgggaaaacaacagattatgcctttgagatggctgtttcaaatattagatatggagcagcagttacaaaggaagtaggaatggacctaaaaaacatgggtgctaaaaatgtgtgcttgatgacagacaagaacctctccaagctccctcctgtgcaagtagctatggattccctagtgaagaatggcatcccctttacggtttatgataatgtgagagtggaaccaacggattcaagcttcatggaagctattgagtttgcccaaaagggagcttttgatgcctatgttgctgtcggtggtggctctaccatggacacctgtaaggctgctaatctgtatgcatccagccctcattctgatttcctagattatgtcagtgcccccattggcaagggaaagcctgtgtctgtgcctcttaagcctctgattgcagtgccaactacctcaggaaccgggagtgaaactactggggttgccatttttgactatgaacacttgaaagtaaaaattggcatcacttcgagagccatcaaacccacactgggactgattgatcctctgcacaccctccacatgcctgcccgagtggtcgccaacagtggctttgatgtgctttgccatgccctggagtcatacaccaccctgccctaccacctgcggagcccctgcccttcaaatcccatcacacggcctgcgtaccagggcagcaacccaatcagtgacatttgggctatccacgcgctgcggatcgtggctaagtatctgaagagggctgtcagaaatcccgatgatcttgaagcaaggtctcatatgcacttggcaagtgcttttgctggcatcggctttggaaatgctggtgttcatctgtgccatggaatgtcttacccaatttcaggtttagtgaagatgtataaagcaaaggattacaatgtggatcacccactggtgccccatggcctttctgtggtgctcacgtccccagcggtgttcactttcacggcccagatgtttccagagcgacacctggagatggcagaaatactgggagccgacacccgcactgccaggatccaagatgcagggctggtgttggcagacacgctccggaaattcttattcgatctggatgttgatgatggcctagcagctgttggttactccaaagctgatatccccgcactagtgaaaggaacgctgccccaggaaagggtcaccaagcttgcaccctgtccccagtcagaagaggatctggctgctctgtttgaagcttcaatgaaactgtattaattgtcattttaactgaaagaattaccgctggccattgtagtgctgagagcaagagctgatctagctagggctttgtcttttcatctttgtgcataacttacctgttaccagtataggtgggatatacatttatcttgcaggaaattccccaaagctcagagtccagttccttccataaaacaggctggacaaatgaccactatgttagacccccaggctcgacttcaggggtcagtgttcctgtcccaaaccccacacagaatactctgcctctgcttcatgtagcaaatgagcaaaaactcagtatctatcaaaagtgtaaattatatttcctatgcctagtaattcacttcatgtctaaaaatttatctgatagaaacactagcaccagtacatacagaagcatggcaaggatgtttctggcagcacttttctaataataaaagatttgaaacaaccttaagtattcattattggtatatagatcacttatagtatactagacagtggaatactatggtactgttaataaagatgaagtaaatctcnnnnnnnnnnnnnnnnnnnn

SEQ ID NO: 24914 - DNA, 1885 bp, Homo sapiens
  misc_feature 1881, 1882, 1883, 1884, 1885: n = A,T,C or G
acgcgggacacacccgacgctctggcccacacagacgctactctgtagcatctcaggttccctctggctgcactctggaggaccacactcgttttctttttggctgccagaggcccccgcatccaccgctgagctgggagaaagatggcggcagccgtgcgacaggatttggcccagctcatgaattcgagcggctctcataaagatctggctggcaagtatcgtcagatcctggaaaaagccattcagttatctggagcagaacaactagaagctttgaaagcttttgtggaagcaatggtaaatgagaatgtcagtctcgtgatctcgcggcagttgctgactgatttttgcacacatcttcctaacttgcctgatagcacagccaaagaaatctatcacttcaccttggaaaagatccagcctagagtcatttcatttgaggagcaggttgcttccataagacagcatcttgcatctatatatgagaaagaagaagattggagaaatgcagcccaagtgttggtgggaattcctttggaaacaggacaaaaacagtacaatgtagattataaactggagacttacttgaagattgctaggctatatctggaggatgatgatccagtccaggcagaggcttacataaatcgagcatcgttgcttcagaatgaatcaaccaatgaacaattacagatacattataaggtatgctatgcacgtgttcttgattatagaagaaaattcattgaagctgcacaaaggtacaatgagctctcttacaagacaatagtccacgaaagtgaaagactagaggccttaaaacatgctttgcactgtacgatcttagcatcagcagggcagcagcgttctcggatgctagctactctttttaaggatgaaaggtgccagcaacttgctgcctatgggatcctagagaaaatgtatctagataggatcatcagaggaaatcaacttcaagaatttgctgccatgctgatgcctcaccaaaaagcaactacagctgatggttccagcatcttggacagagctgttattgaacacaatttgttgtctgcaagcaaattatataataatattaccttcgaagaacttggagctcttttagagatccctgcagctaaggcggaaaagatagcatctcaaatgataaccgaaggacgtatgaatggatttattgaccagattgatggaatagttcattttgaaacacgagaagccctgccaacgtgggataagcagatccaatcactttgtttccaagtgaataaccttttggagaaaattagtcaaacagcaccagaatggacagcacaagccatggaagcccagatggctcagtgaatccttgcagaacttctgtgcacatgacatctttttccatgttgtgcagatcagtttcactatctccaaagcatttgcatcatgaccttatacatttcaatcccttttatgctggattccgtttaaagaagacattattagagcaggaagtacaagcatttaaaatatgtagttcccatatatttcagggtctctgtgtattaagctaactcagatgttttgaaagctttttctttaaacagaggtgaaatatctgtggctaaaaagtttgagatttgtgataactttgtagtcatgtaaaacttaagtgcttcatgcctctccaaatgtggttattctaataaatggagaaatgagccaaataaaagtagtactttgttctgaggtagcaattagggtcacggtttggtaaggggccaaggaggataaagaagaggaggattaaggggggaagtgtgattggaagaacatttgggatatggacaaggattgcggaatatgtatagttggatggannnnn

SEQ ID NO: 24915 - DNA, 1811 bp, Homo sapiens; identical to SEQ ID NO: 22429
  misc_feature 1, 2, 3, 4, 5, 55, 56, 57, 58, 59, 60, 61, 62, 63, 64, 65,66, 67, 68, 69, 70, 71, 72, 73, 74, 75, 76, 77, 78, 79,80, 81, 90, 1811: n = A,T,C or G

SEQ ID NO: 24916 - DNA, 1499 bp, Homo sapiens
  misc_feature 1, 1499: n = A,T,C or G
nggaggcacattttgaagtattctttgtagacatatagtatgtttctgaatgtgtttgttacttatttggtcattggtacttaatttgaaattttaattttttaagagaagaaatagaatggttctttgtactcagtctgcaatgatctatttttggcttatgtcttttaatactactctctttctctgaattttgaaatatgaagtaaaatctagcccatttgttttatgcagctattcaacaaactttgtgtgttcgtatacttgctacatgcagagcactttaccaggtttctaagcaaaaatttctaaaaatgattaattgttctgacagaattaggcgtagttctttatcaacatttatggattccatgccacaagtagtatgcgcttaagtgcagagcatgccaagagaaagagtaggatttggccctgtaggagcaaagattcaattgtgggaaactacttgtttctgaaaattgcatgctaggatatttacatcatgttcctgttgaaaacaattcctgattaaaatacaagaataatcttaaaacatcaaagagattttccagacaataaggaatgccaagtccaaaagtaaagagaataagagaagcaagcatgtacccttactctgacaaccttatgagtgagggggacagaaattaaagttcagggcccatataaggtgatgaacctaacaggagaccctccacacaataggctgagactcccaaatactttcacctttaggatgataatgaatcagaggtggaagaaccaatgtaaaagaacaggcaagtttagaattgccccagtgatctaaagaatcttaagcactgagcttcctttaaggtgttcccacactagtaatgcctccaggtgacagagaaaataaaatgtaaatacttttcatggaaaagtaatttcattgtaggcctcaaattacttttcaaatatgtctagtaacacatagtaaaaagtagtcatataaggaaactagattccagaggcaagaattacttgaagcaatgaaaacaaactcacagatataggtattagatttgttttctttgtttaaggaaataaggtgtgtgaatgtacttgcaggaaatgggaaactatacgataaaaagttgtggagctaatctggaaaagaactgaatataatacattacaagaatatacataaaaactgctactttaaaactcagtaaatagatgtaatagaatgtagccaattggggtagtttataaactggaagataactcaggagacactattcacagtgcaccatgggagaaacagctggaaaaaaaaaaacagaagacctgtagagaatacagtgaaaaatcctaagtgcttcattagctgtgagaggagaggcaagaataggacagagcaaatacttagatagaatgcagaattttaaaaactgatgaaagacatgaccccacacattctagaagccagacaaatcccaaacagaataaactan

SEQ ID NO: 24917 - DNA, 2143 bp, Homo sapiens; identical to SEQ ID NO: 24464
  misc_feature 1, 2, 2062, 2083, 2129, 2130, 2131, 2132, 2133, 2134, 2135,2136, 2137, 2138, 2139, 2140, 2141, 2142, 2143: n = A,T,C or G

SEQ ID NO: 24918 - DNA, 4009 bp, Homo sapiens
  misc_feature 1, 4004, 4005, 4006, 4007, 4008, 4009: n = A,T,C or G
nacgcgtccgcttatagactgccatgctcggctgatggacatagtatgacaactggcaggccgacctccttcacaaatgtgaaaataaatatgacattctcatcctgacagtgcaggtggcggtcattgttgctgtgatcctcacagtgccggtgttatttttcacggttcgttcatctttatttgaactggctaagaaaacaaagtttaatttatgtcgtcataccgtggttacctgcatactcttggttgttatcaacttgttggtgatcttcataccctccatgaaggatatttttggagtcgtaggagttacatctgctaacatgcttattttcattcttccttcatctctttatttaaaaatcacagaccaggatggagataaaggaactcaaagaatttgggctgcccttttcttgggcctgggggtgttgttctccttggtcagcattcccttggtcatctatgactgggcctgctcatcgagtagtgacgaaggccactgaaacccgccgagaaaaagaaacatccctgttgtctgctcagtcaagtccccacacatcagcaatctctcaccacttcttttgcaagtttacagaagcaaacagaaatgtacaggatacttaaaatggaataactttttggttgcaaaacagagacatggttctataatgcttcatgtccctccaagatttgagatcaatttagggattgtgaaatttttttttcaaatttcatacaatcatatttcccagtacttttcacaatcattttttacccatctaactctatgttttgtggcttcccggtctcttagaactttgaaaacatgatatacaataatgtttatttattatacatccagattctgaaataattttcctactgatgttcagctcacactatctgtacctttttagaagagaaaagaatcttgaattgtatatatttattttgctttacagaaaaaaatggtttcgtaaataatttgcctattttggttaacatagcacatggagataatcatctgaaagttatagggcactgccactgctgaatcagagcatgcccaatatttgaggtggctctgatttcctggcagctgaactcgggtagtccagtggcctagctggtaccacatctattcccatccagagacattctctggcaagtgttctcagctgaaaagtggttggggatgattcttaccttggtaattaaatgaagctacacatttgggtaatctagcaaatgaagtattttttccctcttggcaacttgtgtcagagttactctggtctgagtcaactttcgctggggaaaacctatggaacctactgcaaaaagattgtccaaaatgcctaagaaaatactcctctgatgcatttagccttcaaccctacctgtcttgctgaagggagaaaaatgttttagtacattataggcccagcagcttttattcatgtccaccagctagttgcacagagaatcatgtgtacctaactaaggatgatctaggataagtaactcctgttttatattgagtattttagggaagtctttaaaagacttgttttatatctataaatctaggttattacaaatacaagaattttgtaccttaaataagcctcatttctatttcttcttcattaattctccatctagtcttgtgaaaaaaaaaaaaaaaaaaccctcagagatagtctttgtgaagagcttctgacagaatcactgagtaccttccttcccccagatgaggaagacaagggggtctcagtgtctgtgctgtctcctcttctcttccccaaccaaggactgtgccattactgcccgtctcaactgtccatgcaggaggacagagttgcctggtactcttacccttgtccctctcctaaagggagcacaaggaaactgaagagactgaaaaagaagagagtttgtagctgaaaaagaatagggatagcaaggaaacccagaactgcattcccctaagtggggccatcccatgtgattgaattgtccatagcttgcctatggtgagaaatgtgcatgctccgtgagctggtctcttgaaacaggacttatgcttcctctatattctggttaaattttccaaacacataagttcactgagcacagatttcttatccagagacaagtagaatctaaccgcagactgttggcagagtttccaggcacttagccatgttcccttcctgactcaaatccccaaaggccttcactctcactgagaatcacactactgtcccatagataaggcaggcattgaagcacctgtcgtgatcctctaggggggagaatgaaaggttatttcctgcattgcatcatcatagcttttaatataatgctacagaatcatatccacattaggttagagttcagatatttggatatgaatacctaacctagccatatccatggccatctctgttcttttcagcaatgttttccatattatattagcaatgacagaaacagaacaagccaagatccagtcagttcttgggagcttgtctagagcaccaagtaatgaaatagccaggtagtgggatgactgtacctttaaaaatacataatttagtttgcaagctatattatgctactttctattttccttgttactttatagcaattcattttaccctcacaaagtcaatttagaaccttatcattaactgggatgtgtagtgatatttttgggcctctgggtttcatgtgtcaatacaaggaatatttatttaaaatagatttatttagaggaggcacagtgttgttgatctgtgtgacaccacccatatttttaaaaacctttgtatgtttctctaaatttgttgttgactgaatataatagaccctaccataattcgtcaaatatcactgattagttacatcctttgtgtgagattagctgtaaagtatactgctcttattcttattcagaatagttaattggtagccaaaaatacatgtatcacagatgttaggtcgaatttaaacagcacagtcaagtgctatggaagtttttctgctaaattagtagattaaagaatactataccctaggcatggggagcagcacgttttcctttggtaggtaggatctctatactagtgaacagtgccagttccacactttggacttagaactgttctctagttattgtaacacagaatactgtcaatccctaatttacttaatgttacttattggaagtggggctgatgaaatacgcacaggagggaaatctactgtgtttaggcacaggcagccccagtgtataaggagatcatattccaaaaggttgtcagttggttgtttgcaacctggaatgtattttcctttagagaccaggttatccatggtggttaggcccctagagcagctggaaaagatgatcaaaccaataggttagctgacatcgaataatgtaataggtttgctaaagaatctaaccatcaaatataatattgtttccagggagggtgtttgttcagagttgcctgttagtagaatctggactgtccatcccagccacatcccacctactggacagtaggggtagagatgccaccagactacaggtgaccagattggcctgaaacatggtgtccagtaaaaacggggaggaataagtccatgactgccggagagcttggtggtaggaggagggtgaaggagggtgagggggcctctcatgggtcagaaacctccagggacatccctcagctggtaactctgctgttgtccggagggttcaggcttggtgtgccttcttctgtttgtctgacttttggctcctatggttcatctcctgccctgcccaccacagaaaaggatgctgctgcacagcttctccaatgtaccagtcattgaggccagcgcgcagcacttttaatgtttttagtgctagtaactgtgttttaactctccaggaataagctgggaggttagaaaacaagaaaaaacgaaagcggccnnnnnn

SEQ ID NO: 24919 - DNA, 2651 bp, Homo sapiens
  misc_feature 1, 2, 3, 4, 5, 6, 7, 8, 9, 10, 11, 12, 13, 14, 15, 16, 17,18, 19, 2476, 2477, 2478, 2479, 2480, 2481, 2482, 2483,2484, 2485, 2486, 2487, 2488, 2590, 2591, 2592, 2648, 2649,2650, 2651: n = A,T,C or G
nnnnnnnnnnnnnnnnnnnacatgataagattatcttttattagagatcttatattacatattcccaaaaagatataaaatcttccaagagaaaatatcaaaacctgttgattccaaggtgaacaaaatgatcaaaatgaaagcaaacattttcttccagacaaaggaatatcaaaacacttcggcacaagtacaacaaaggcatgggaagatcatgataatgttttacatcacattttacagcattttattttaatcagtatttgtagaaaacaaggatgctgagttcttgaacactgcagtcacaaactcaaactaaaatttccaaaaaaaggaaagaaaacactgaactacttggtcaactgaacatctgtaataataaatgtaacgaaacctaaccaaataaatatgccactgagatcacaactgaagtgtatggtttttagtgtgtgccagagacattaaattatttaatcagtttttgactacaacccaaagcaaagcatcctctctgtttccctgatgatttattctaaaagtaaccttaaaaagcagaaacttgctggttaaagagaatttctgctttacctgtgaactgctggtagcaacacaagctgaataaaaccccagactgacatgggacagatccatcgcaaacaaccagaagtggcaaaaccactgttattgcatcaagattttttttttatttcatctgatcacaatttcgagaatgattaagcacacccacttaaccacagacaaactgaactcccacaggaaggttatacatttaagatgcaatgaaaatactgatctcattcctgggatttgcttctggcaaccctaacatctgtagatgtccacaaaaaggaagtcctttttctttttttagttttttcccaaaatatgtggaagaaaacttacggtacatgtttattgcatgaaattaccccttgtaatatctttatcaacactggtattgtttccttaattattaaaggtgaaggagtttatgaatttaacataacaataatcttaggagctgcatcttgagtgaaaatccagatgataatcaaactaaatggtgaaagagaaattgggtttttatttctctataaagatgttggaatgacaagaggtaaatggaggttgaaagccacagaatatgaaatcaattatctcaaagagaattttcaaaactgtacatactcaaagactcctttctatgctaaaattgaatagtctaaatgtcgctattattttaatgttaaggaaacaataatcccaaataaattttattaaaagcactgtaatggcacatgggctcagaacttcactttaaggttagcacatacaaaagttgagaactgaatgaacaaacatattccttagtaagataaaccatgatgagctacataaaagtgggtttcaaaacaagatcaattttaaagcattctctctttaatatagttaactactgtgaaatggaaacagtagctggattttgcattttacaaaatccttgcttcaagttgcagtttccttggcagcagcacattttaattaacaatattttccttccttgttttgttttctgacatctcagtacattcaaatagtcaaaatgtttagagtaacatcaccacaaatttaatgaaacagatcagaatgtggccagcattgtcaggcaaaaattacacaatttatgcgtcatagaaagtacccaccctctcccagaccccacaacattcccccttccccaaacagtaatatggacactgatttaacaagacttataaaaaaataaggcacatttattttgatatggtaattttaaaatagaaaccccttctcagaacacctgtattcaaatgagctgtgtaaaaagacaccttgtggtacctaaaataggtttatggtacctatggaattgcttctattttagtgaagatggaataaattgcacccatcccacattgtcaagtaatgaaaatatgcctctttttctactgttgaatgattcaaaatcaggtatttctggaaatactcagaaagggtaggaagggaaggagaaggtcaagaggtacatcagaaaaaggtataaaaatcatctacgttaatcataagggtggatggattgcacttttccacttatttcaacacataatttttctaactagtatgaatgattgcaaccattttggccattagcttttacccacaaacattttattccatttcagccaaataggtgtttttgtaaaactgatgatcaacacacagatacttttaagaatctcttcgcaacccccaacacagacataattagttagcatttaacctgagatacaatctgttgagaggctgtctttaaatatttcttcatttgttgcatcaattcatactgatggtggtagttcatgggagaaagtttaaaaaaaaagaatcttgattgatagcatggcttttttaaaannnnnnnnnnnnnactgtactggtaaaagaaaaaagaaaaaacccacagaatcacagaattcatgttctcacagtagccagaagctaaaataatctgcttctttattgcacgtcnnnccaaaaaaggataaaagccaaaattctcaatacaaatgtaaaagtcaggttcacgnnnn

SEQ ID NO: 24920 - DNA, 498 bp, Homo sapiens; identical to SEQ ID NO: 21110

SEQ ID NO: 24921 - DNA, 1740 bp, Homo sapiens
  misc_feature 1, 2, 3, 4, 5, 1699, 1740: n = A,T,C or G
nnnnngagaagccgtcaagcaggagtagaaattggtatgcttagaagcagattctaaaagcagtttctcttcagaacatcttttttcataccacttgataagcatcttgaaacaccatggctgtagctgcagtaaaatgggtgatgtcaaagagaactatcttgaaacatttatttccagtccaaaatggagctttatattgtgtttgtcataaatctacgtattctcctctaccagatgactataattgcaacgtagagcttgctctgacttctgatggcaggacaatagtatgctaccacccttctgtggacattccatatgaacacacaaaacctatccctcggcagatcctgtgcataataatgaagaaacacatgatcaagtgctgaaaaccagattgaagaaaaaagttgaacaccttgaggaaggacctatgatagaacaacttagcaaaatgttctttacttactaagcaccgttggtatcctcatggacggttatcaacagatgtcgtaagaatctgaatcctccaaagacagatgatgcggaggttcctgggggaatccaagagaatgtgcctcattggccattgagaaaatgcagtcggctgtatccgaatatctagtgaagtatactgctcacttctctttctattttgaatgtgtccgtgtttaaggtcactcggattggcatcccatttgagaaacgattctatattgtctataaaggacattagtgcggccattggcattcaatggcagcacttgcggaccaatagtttcgatacatttaaagggcgtaaagtacgagtatatatgcacaagcactacatacgaggggggcagacactgttaagacaggctagcattttcaatttacaatattggcaactgatagtaggtttattgggatgtaaccctatgataagttgagaaacatctctttttgtgtgtctactgcgatttaagtatttttaatcatcagccaagcattgttagtagtataaatatgattaataaaaatgtgcatggctttcctgaaggagattttttaattgcctttgagaataaactcataaggtctaccaagaaaataaatgttatgatgtttcacttggcttctaggaaataattaaattagtgatattaaattaaacgtctgcttgatttaattaatagtcaacaacttagccacgtgtggtcggtgtgcctgtagtcccagctactaggcagggtaaggtaggaggagcccttgtgccaggagtttgaggctgtagtacactattattgagcttatgaataaactctgcacttcagcctgggcaataaagcaagacccagtctctagaaaaaaaaaatgattaggtaaagaaaagaaatcaaattttcacaatgggagaatgtggttttactatctgctaggccccttccatcaattcttattaaattctcaaaataatcctttgaaaagggagtataattacattttacagtgacctgaaccttacccaaacaagtgggagagccaggagccaaactatcaggctccaaagcttttttttagtgcatcacaatgacaaaggggtggttttctttcacccaagaatgtgctttcctggaaatttttctagatagaatattatgtaatttgttttgaaggttttttttcctgactgtcttaaagattatgctagctntagaacacatgcaaacagctgcagctctgtgattaaaatgn

SEQ ID NO: 24922 - DNA, 624 bp, Homo sapiens
  misc_feature 1: n = A,T,C or G
nccggttcaaacattatgaagataattgcatctcttattgcattaaaggtttcatcagaatgtttagcgtggggtacttgatccagtgctgcctccgaatcccttctgcatttaggcatctgtttacacagccatctcggctactttctctcttctacaataaagaaaacttccagcttggagcttttcttggctcttttgttagtatatacaagggtactagttgcttcctgcgctggatcagaaacttagatgatgaactacatgctattatagctggatttttggcaggtatatcaatgatgttttataaaagcacaacaatttccatgtatttagcgtccaaattggtagagacaatgtatttcaaaggcattgaagcagggaaggttccctattttcctcatgcagatactatcatctattccatctctacagcaatttgcttccaggcagctgtcatggaagttcagactttgagaccatcttactggaagttccttttaagactcaccaagggcaaatttgctgtcatgaaccgaaaagtccttgatgtttttggtactggtgcatctaaacactttcaggatttcatccccaggttggatccaagatacacaactg

SEQ ID NO: 24923 - DNA, 978 bp, Homo sapiens; identical to SEQ ID NO: 22552
  misc_feature 1, 2, 3, 4, 5, 6, 7, 8, 9, 10, 11, 953, 954, 955, 956, 957,958, 959, 960, 961, 962, 963, 964, 965, 966, 967, 968, 969,970, 971, 972, 973, 974, 975, 976, 977, 978: n = A,T,C or G

SEQ ID NO: 24924 - DNA, 910 bp, Homo sapiens
  misc_feature 1, 2, 3, 910: n = A,T,C or G
nnnccgggtttgcaaaaaggagttattcagtgaagacggggtttcaccatcttggctaggctggtcttgaattcctgacctcgtgatccacccgcctgggcctcccaaagtgctgggattacatgcgtgagccaccgtgcccagcctcaaagaatcagaatcataccctgagagctacaagaactccatttttcactgtgcagaggctctctgctgaagggtcaagtggaatctggaatccagcccatgtttccccatcatcaagccatgtgaagctgcagactccaagcaacagagagacaagatttagaatactggctctggtatgaaagctggattcaggtactgttcctgcctcttgacctcaccaagcctcagcttcctcgcctgttaaatggatacaattgtcgtcattatcatctgttgagaactccctaaaatgccagctgagcataggcacagaagtttaggtgtttggaccaaggtcacacaactgatacaacagtagcttcttcacagacttggcacttctccagaaggaggaggacaaaatgacgaagtctaaggaggcagtgacattcaaggacgtggctgtggtcttctctgaggaggagctgcaactgctggaccttgcccagaggaagctgtaccgagatgtgatgctggagaacttcaggaatgtggtctcagtggggcatcagtccacaccagatggcctaccacagttagagagagaagaaaagctgtggatgatgaagatggcaacccagagagataactcctcaggagccaagaatctaaaagagatggagactcttcaagaagtaggattaaggtacctgcctcatgaagagcttttctgctcccagatctggcaacagattacaagagagttaatcaagtatcaagn

SEQ ID NO: 24925 - DNA, 1651 bp, Homo sapiens; identical to SEQ ID NO: 21898
  misc_feature 1, 2: n = A,T,C or G

SEQ ID NO: 24926 - DNA, 338 bp, Homo sapiens
  misc_feature 1, 2, 3, 310, 311, 312, 313, 314, 315, 316, 317, 318, 319,320, 321, 322, 323, 324, 325, 326, 327, 328, 329, 330, 331,332, 333, 334, 335, 336, 337, 338: n = A,T,C or G
nnnaccgaaaggtgttactaaccagtcttttgaatcacttagcagcttgctgctcaacctctagtgtccctccctggattctttgaggtgtctgctgtcgctaccactgtgcacatctgaaaactcacaaccaagaaaatccattctattttcttatcttggactggagttacctattcttgcattgctgtatacacctcatgcttatgcaatgggaagaatatgggggccagggggtgtggtacagtgatttgaaatacaataaatgaaggcaatgcatggccttccaataaaaaatatttgaagactnnnnnnnnnnnnnnnnnnnnnnnnnnnnn

SEQ ID NO: 24927 - DNA, 1191 bp, Homo sapiens; identical to SEQ ID NO: 24304
  misc_feature 1187, 1188, 1189, 1190, 1191: n = A,T,C or G

SEQ ID NO: 24928 - DNA, 1809 bp, Homo sapiens
  misc_feature 1, 1807, 1808, 1809: n = A,T,C or G
nacgaggggaactggaactttaatggctgttaaacaggtgacttatgtcagaaacacatcttctgagcaagaagaagtagtagaagcactaagagaagagataagaatgatgagccatctgaatcatccaaacatcattaggatgttgggagccacgtgtgagaagagcaattacaatctcttcattgaatggatggcagggggatcggtggctcatttgctgagtaaatatggagccttcaaagaatcagtagttattaactacactgaacagttactccgtggcctttcgtatctccatgaaaaccaaatcattcacagagatgtcaaaggtgccaatttgctaattgacagcactggtcagagactaagaattgcagattttggagctgcagccaggttggcatcaaaaggaactggtgcaggagagtttcagggacaattactggggacaattgcatttatggcacctgaggtactaagaggtcaacagtatggaaggagctgtgatgtatggagtgttggctgtgctattatagaaatggcttgtgcaaaaccaccatggaatgcagaaaaacactccaatcatcttgctttgatatttaagattgctagtgcaactactgctccatcgatcccttcacatttgtctcctggtttacgagatgtggctcttcgttgtttagaacttcaacctcaggacagacctccatcaagagagctactgaagcatccagtctttcgtactacatggtagccaattatgcagatcaactacagtagaaacaggatgctcaacaagagaaaaaaaacttgtggggaaccacattgatattctactggccatgatgccactgaacagctatgaacgaggccagtggggaacccttacctaagtatgtgattgacaaatcatgatctgtcctaagctcagtatgcaaaagcccaaactagtgcagaaactgtaaactgtgcctttcaaagaactggccctaggtgaacaggaaaacaatgaagtttgcatgactaaattgcagaagcataattttatttttttggagcactttttcagcaatattagcggctgaggggctcaggatctattttaatatttcaattattcttccatttcatatagtgatcacaagcagggggttctgcaattccgttcaaattttttgtcactggctataaaatcagtatctgcctcttttaggtcagagtatgctatgagtagcaatacatacatatatttttaaaagttgatacttctttatgacccacagttgacctttattttcttaaataccagggcagttgtggctcattgtgcattttactgttggcccattcatttcgtttttggaaattatggttttgtattttcatgtttatttacattcatttttgtttattcagggaaagctgatctttttttcaaaccagaaaaaaaaatgaactagatatgaagtagagttcattaaatatcttgctattgtcagagtttttaaaatatagacttaattttgtttttttaaattggaatacaataaagtactacctacatttgagtcagtctccactcttattgtgcagggtgagtacaagttaactataaataaactgtcctctctggtgcaactcacaaccaagatcaagattaccttaaaatttatttgtattttttagatgttttggttgtcaaactgtaggaaacttcacaacatgtaagtcttactctgtatgtaacaatccatcattcaccttcactactggtaataacatagagctgccattatccttgtannn

SEQ ID NO: 24929 - DNA, 670 bp, Homo sapiens
agtagtccaataaataatgttacctttgaactgatgctcataggagagaatataagaactctgagtgatatcaacattagggattcaaagaaatattagatttaagctcacactggtcaaaaggaaccaagatacaaagaactctgagctgtcatcgtccccatctctgtgagccacaaccaacagcaggacccaacgcatgtctgagatccttaaatcaaggaaaccagtgtcatgagttgaattctcctattatggatgctagcttctggccatctctggctctcctcttgacacatattagcttctagcctttgcttccacgacttttatcttttctccaacacatcgcttaccaatcctctctctgctctgttgctttggacttccccacaagaatttcaacgactctcaagtcttttcttccatccccaccactaacctgaatgcctagacccttatttttattaatttccaatagatgctgcctatgggctatattgctttagatgaacattagatatttaaagctcaagaggttcaaaatccaactcattatcttctctttctttcacctccctgctcctctccctatattactgattgcactgaacagcatggtccccaatgtagccatgcaaatgagaaacccagtggctccttgtggggt

SEQ ID NO: 24930 - DNA, 3041 bp, Homo sapiens
  misc_feature 3036, 3037, 3038, 3039, 3040, 3041: n = A,T,C or G
agtcgacccacgcgtccgttttggttggttttatttggcagatgtttttagaaataaaagtacttagacctagtgcagcctctaggaaaagtcttgccttttcattagagaaaacaggaccaaggtttcagttttcaaacagctgttgttgaatgtgtagaacccagttccatctgttttggttcattgttacagaacttagtccagtcatttgggctaaagccaaccaaaagcttagttgcctttctcaacaaacactggtactggtatacttttgtagatgaaaccatcacaaggtatttagtgttaacttgtgtgccaaattcagatcactatgtcgttgttgctctagccttcagtgtcataacacaggggggataaaacagaggggatgagggaaatgaattctgttaataattattcttcctggtatgcctgttttgcttcacaaaggctactatcatgctggatagataagaacaggagatggcagtggaaagggattgcttgttaccacagagaattctcttcaaattaagatatgtcattagaatgcttggaccagtcaatcttttgtacttatttgaaaatataggaacaatttagcagctgcaaatatgcccaagctatttttaatagatatactaaacttattgttgacaaatttcagcctccttaattttttttttttttggtaattacctataggcttaaaagtcattcgttgctgttctagtataattagtagttccgtgattgaaagtttattgtaattctactatcttcaaattagatacattttcaaaaggaaaagataattttttagaaacatcttaatattcactatttcctgaaaaaatccaagcagttaacgctttctggatggtaacaaagtaccttctaaaagataagtgctatgacaccatgtatgaatgtaattctcttagtaatttacctctgactatttggtgtcttaacgctttggtttatataatctcaggggttgtctgcaaaccaaaactgacatattctgtggttagcttttattacttttttttttaacagaatgctttgctttggttatatttcttctttcttcttttgtcttatatggattaataactagtctccatgaacttcacttgaaagagcctgtaaaagttagatgagtctaaaagtgctctttgaagtagcagcaaattgggagtatatgctctgttatatagaaataaattgtccttgctattttcttacatttagctttgctagattgtatatacattgagctaagaccttaggaaattcactttctgcatgataaaatgacccaataaatattccactttgcttaataatgtacatacagtgcattattttttctatttgtagatgaatttaatgacagataattgtctgttccccgctgaaactgaagaaatctagtttttttgtgaacatttttgtggtcttatggataaggtacatgaagatttttgcagcagtattagtggttcagtggctgcactttattaatcagtgtgttaatttttgacagtgattggactagaccttttcaaatagagtctgagggtatcagacagtgaaaatgtgctgtaactaagtagcatgtaaatcagttgattgtaaaacgtttcgctgggaacttattttagctatattttacttcagacagattatgatacaataatctacctgtgcatcagttagtaggtgctgcagggtttcttactatttacagaaacattttgtgcagtctttgttataaattttcagaagactatactctttactttgaaggtctattttttaattatacctcatttagctaactagtattctaatacctggtagaaaaacagtgagccagcctttaagcatctaacaaaatttagactctttgttttgttttgaactgaagacatcattgggaaaggtaggaaatattagtttaggatagagcatacatgtcatatccagtagcataaaaaaagtattatctccctgtctccattaataaatttagctgtgcaatataggtgcgtttttgcagaagtttctagtaagagattataactccattttacaggttctgaatgctcagagtctatattaaggcttataaagtttttcctgtgatcagtaagtgacacatttaagcagacattcttttcaagttcatgacttagattcctttacaaatttagttctcaatctttaaaaaccacatttcattatgttggttaattattataaattttaagcactcatttctgcaatcaggtttctcagaattttttttttttaaacagaagagacattcctttttccttgttacatccaaggggggcacaggggtgggtggaaaggaatgtctaaaaatgaaatcccttgatatagagggacctagacggacaggatatgctaaaataatttcaaattctagcacaattttagagtagaataagtcatttttttagactaataaaattaatggctgtcatgttcactctgaaaaaaatctaaatgactgaaatgtacagaattaaaaattagcaaacaattattctagggatattttcagattttacttcatttcttggaaatgcgtgtgccatatgcaatggcttttctgtgtggccaagaaaataatagaattatttcactttacctttttttaaaatgtgacttagttatcatagtccaatttttatgggcttacagatggtttatttggttggcagctgacactgcagcttcctttcatgcaagataccattaacgtgtttgatgaaatcatgcccctaatggagatctctagtttcccatatactatcctactgcctgttcacctttttattttggcccatggttatgtgaaaggccgaattaatgcctgctgtgtaatctgtagcacactactgtcggcgcgcgtttacagggttaccgggaattataagcgccaaactttgagtgaaaaaaaatggggggcgaaaaaaagggggaaattcaaccggnnnnnn

SEQ ID NO: 24931 - DNA, 4399 bp, Homo sapiens; identical to SEQ ID NO: 20975

SEQ ID NO: 24932 - DNA, 2470 bp, Homo sapiens
  misc_feature 1, 2, 2470: n = A,T,C or G
nnggctagtgaaaggaaagtacctctgaaagaaaccattttagcaaattatggttatatgttttaatttaatctacagaatgttttatagtaaaattctagcaccactagaataatcacatagcatgtacaatatatttatgctggctgaaaagacagaatctgggaataataaaattgcaaccagtttggtaatgcaaacagcagaatagaatgaaatctcagtaatgaattaaagcaacaaaaagatattgattggcaaaaagcaagatataagagatgcatttgcttaacatttctacataatatttatggtctggtcagtattggtctggtcagtattgcctggctgacgtgaaatgtaaactagtaggcgtgttattgatctgctaaaactaaccctctttttaagaggagatttaaggaagacgtcaatcaaaatgtcaaatatgtgtgtcagaatataaataatttttcacattgtattgttgctatataaaaaaaataatagaattggttgggtttctgaggtgaaatccagagtaagagtactagacagttcaacaagccacatctaatggcacagatagaggatgtagctattttatacctttcataacatttgagagtaagatatccttcaggatgtgaagtgattattaagtactcatacctgaaatctgttgtcaagattagaactggggttcatgttaaaaaccttccatattacctgagggtacctgtggggaacagttccttcccctgtgtggtagtattttgttggaagagaatgtttatacgaaaaatgaaattcttccaacagcagagaaactctaaaaagtttgatagtacctatcaaagtgctgtacttctgtgatagagaacatctgatgtaccaatttagatctatttctttatactttttctaaccaattgcttaatagtactttggatgattatcacctttgccacttaaaatatataaatatcctttttacttcatgaggaaggaggaattttttgataattactgagttcagccttttgtgatgacttatattttggacttacattttaactttaaagaatgtcagatcccttctttgtcttactagttaaatcctcacctaatctcttgggtatgaatataaatgtgtgtcatcgttatattgttcagctagatgagcaagtatcttagggtagtaggtagcctggtggttttagaagtgtttggtgatttttatggagagagttttcctaagtggtggtttataggtggtatcagatattattagggcagctttttggggagtaatctcaggtctcccagagcagcagcatttttctcattgatataagtaagattcttaggagcttttcttatcacacaagatgcctgaatcgaatgtgagaattgaaggcatttcttctgcataaacaaagaattctacctgctggacagaaacctggaaagttctttggaattcgctgaattacagtttagtatgtcctgattacagagtgacaatatttatcaagcctttgttatattggattatcttctctcttaaaatacaactgtattataattgaaatgacagcccaaaattggatggtttaccaaaaccaatgaaagggatttcacacatcaatttttatttctgttttgaagagcacatgctatataataattgctagtagcaactgcagtaaaacaggtgataagttattttctctgaaaagatccagtcctagagcaggattcttcgatcattcatggcagagtgaaaaaggtttgtatggttcttgtccaaataactcagttcttaaaattcttaaaatgatcgtaaaccattatcctttaaaggtttatttgaagatgctgttaaagtacagaattttgtgtacaggtagatttttccgtccctcattaatagtgccttcttaattaatacagactggtgttagctataacaaaactccagtaaggccaaagaatcccaagttctttgtggaaaaaaaaaaaaaatcttttagggtcagattttcccttctaatatcattgaagatgatgttgcattgatttattcataaagtattttaactataggaactctagaagataatggttaggcaagtgatttttttttaaatatggttggcgtaagttgtattttgaaattcacttattttaaaatcgaagaggattgtatcatggaaatagaatgtttgtttacctgcccaatttttttaaagatatatgattaacacatgggtggggcgttaatcctggtgcatggaggcggcggaatggattgggggcgttagtttgaaaccgaatttgcaaggtcacggttgacttgaagttaggtacatattggggaggcactaaggtggatggggttttaacaccggaaaaaaaaaggggggataactggagaaatgtatgtggttacacgagttattgtaan

SEQ ID NO: 24933 - DNA, 1916 bp, Homo sapiens
  misc_feature 1, 2, 3, 4, 5, 6, 7, 8, 9, 10, 11, 12, 1818, 1819, 1820,1821, 1822, 1823, 1824, 1825, 1826, 1827, 1828, 1829, 1830,1831, 1832, 1833, 1834, 1835, 1836, 1837, 1838, 1839, 1840,1841, 1842, 1843, 1844, 1845, 1846, 1847, 1848, 1849: n = A,T,C or G
  misc_feature 1850, 1851, 1852, 1853, 1913, 1914, 1915, 1916: n = A,T,C or G
nnnnnnnnnnnncttaggtaacatgctatccatactaatcagacttaaaattattttcaagcaattcgtgttctttagtaatatacaaagaaagctgaaaagcaatcaacttcttacagtggaatagaatttattctcttttatttcagctgcccagttttgtcagtaaggtgtagcaggtgtacaagtggttgcaacaccattaaagaatataaaagcagtagttatattaaataatgttgaagaaaacatatacatatatatttaaggaatttcactaagcactaactaaatttcatgttgttgggaggtgttatctggctggagtgcctcttaattctttttaaggtaatttaattatttcttgccaattgttctttcttgaatgaatgattacatccttaacagaaaacctgggtgtataaataatacagctgaaagaaacagaagtgtacaccttccaacaacatacactcccaaccacttgtgttgtttttggcaacaaccaaaatgccattgcttgcacaaaaagtaaataaatgatcatatgatggcaacattcatcataagagagccagtaggcagtgactgtaagcatcacagccaccaattatgtcattttagaattgtgagcaaattcacaagaacacacagtgcaatttttagctgcatacatttcttctgagctccaactcagcaatatgcaatcttgacatcaaagcattagccaaatatttgaggaaattttcttactaaaataccaagtatctgataaatcaattttaccaaaatatataaacatatagaaggataagtgcatttagtagaaatacttacaataaaaaaatctcttaaaatctatgagccattcaatgtatacacaacgcaagaagtggcaataaggctatgattacagctccaggtcctgactgacctcgccaagttccatacacaatatattttttaatgccatgtgattgcagtgtgtgtgcgtgtgtaaggtgggagtgatattcacacatatgtagttctgaacatctacacaaacggcatgcacattgttgagaagttatctgttctcttattgcatacatcttactcactgttgaatccctagcagttttggggttgggttagggtcaagcataggaaatcatcatatttctttccttctccactcttgaggatctggaatcaggtcacagactgtgctgggtccacacgcttacatatgtgaaccttcaagtaactaccattccctcaataggcccacatagacaccacggacaagcaaataaggaccctctgtctaccataaatagaacttgatgctttcactttccaggagaagctgattctgtcggctttctctttgcccctccaacttcttagttgggcctattctatgctgctacttcaagttactcaaatgtgttttgtctggtgttatttttttctccagtgttttggaccaagactagatttcctgagactttaaatacgcaagacaaatgcaaacaaaatctgccaacatacccaggctgcttttcaggagtgaatcactgaagtgcatttggatttcctataacactactttcttttgggaatgtacagccctcccccagctccccatcccccatcataatgtaaaccattctaagagaaaatatggatgttttggctgggggtggtggcacatgcctgtagtcccagctacttgggaagctgaagcaggaggaccacttgagcccaggagtttgaggctgcagtaagacatgatggcaccactgcagtccagtttgggtgacccatgacagnnnnnnnnnnnnnnnnnnnnnnnnnnnnnnnnnnnngacattttatttctggactttatccttaactgcttagcttagaatagtgcgcggacgcgnnnn

SEQ ID NO: 24934 - DNA, 2413 bp, Homo sapiens
  misc_feature 2408, 2409, 2410, 2411, 2412, 2413: n = A,T,C or G
tcgacccacgcgtccgaatattagactcttaaaaatttctgaggttttttttcttcccacgcgtccggtacatgtgattgctataatgtaaataccagtcccttaaacactgtttctataagcagaatgatgcagcacaaagtggaaaggttttcctcttattccagcagtattcttgccttcaaagagtagtccatcttgccttgatttttaaggttgttttcttggatggaaagcttaactggatagtaatttccatatgttctttataaccactctgtatattataagcaaagttttttcatattgtatctttttctgttgagcactttatgcattttagtctattgcatttgagaatgtagtttagaaattcactgtttaaagccatgtgaaaactgatagaggataatgaaaatgagtgtacattattttgaatttaacttaactgttttgtggtgggtgtgaacaaaacattagaaatatattatctttttgtgataatactctctgacctcacttaaagtgatctgccatgaggtatccatgatcaagtttatgtttattctaatacctaaggaattcagccaactttgtttctatcatcagataatctcagaaaatagtgtgttttatctatattactgcctcttttcaatatttaagagaataattgtcttctggtttctactgagcctagtaataatcactaaagacctaaaaaaggaattccttctgttaagagtatttggatagcccattcacgataatggtggtgtgaaaatcaatcatcccagcttttctgacatatctaaattttgaataattaatttccacttccaaaaaattcaaatgttttctcaaagcagtcactacttatttgcattattcctgcatattcagtgaatgtgaggtcatatttggtattgtattagaagtagtgttggtcactggtcttgcctctttgaacattatttttatttgtaaaatgagggagttggtttgttatgatgggaaatgagtcagttttcagggtcctgagaaaattgcttcattcatggctgtgtttgagataactaaagtaaattttttttcaggtatttggtgtcatgttttggagttaatatttagtgcttatataattttaagttattacataatttttattggtatatatttgataggtactaggtattggattctcaccaaaccagtagaatggtattctctcttaatatgtgattgcctgtaatggccaggtagatataccttaaagtaatatgaaaggttttatatgtatattaaaatgtttgtacttttaaatctgtaaaggttatctggaatttttactgtgttaacttcagaattatatgggcattatgactttttcattgtacaaaaaattattcataaatgttagaatacagatgttccttgacttacaatagggttatgttccagtagacccattgtaaattgaaaataccgtaagttgaaaatacatttaatacgcctaacctactgaacatcccagcttagcctagcctatcttaaatgtgttctgaacacttaacgttggcctttagctgggcaaaatcatctaatacaaaacctattttataatgaagtgtttaatatctcaaataagagtattgtaccacatatcgttatcccaggataatatcagagtacaaaatttgaagtacagtttttaactgaatgtgtattgcttttgccccattataaagttgaaaaaccataagtcaaaccattgttaagtcggactgtttgtgttacatatatttgggattttttagtggccctttttaaaaagctgtttcttatttctgatcattgtgagtggggatagatgtgggaagaaccatgtctctactaaaaatacaaaaaatagccaggcttgttggcacacacctatagtcccagctactcgggagaccgaggcaggagaatcacttgaaccgggaggcagagggcagatcatgccactgtattccagcctgggcaacagagtaagactctgtctcaaaaatgaatgaatgaatgaatgaacgaatgaatgtactatgagctgatactgggatttcaggtaccgcagtttgtgctgaatgatatgtttggggtaaatcagtttttttcttatagaatttcggcgtttttgctgcaactgccactaattttgcatttaaaagaacaaaagaggaatgtatttttcaaaggagtgaatgaggttaaaatcaagattttgaatggtataaatatgcaactaattcagttgtaggatattattaaattttttattgctaaatatgtttctttcatacgttgcagtgcttacagttccaacagcgttccaaaaatctaggtggaaacaaggaaggaacaagcannnnnn

SEQ ID NO: 24935 - DNA, 195 bp, Homo sapiens
  misc_feature 195: n = A,T,C or G
acaggctatctatgtgcctgctgatgacttgactgaccctgcccctgctactacgtttgcccatttggatgctaccactgtaccattggtagttgtttatgaaattaccagatattcataaatgtgacaaatgaacagcaggattatgaattatcaaaggaaaaagtatttgctgaggtgaaaaaatctgatgtn

SEQ ID NO: 24936 - DNA, 2504 bp, Homo sapiens
cgacccacgcgtccgcgaaccccggaccttagctgtcatttcacctgcgtcgtcccggacgccatttggctgttgacgtggttccgagccagcaaataacgccagcagccctcccagatccacgccggcccgtctctccgccggccccctcctcgcagtggtttctcctgcagctcccctgggctccgcggccagtagtgcagcccgtggagccgcggctttgcccgtctcctctgggtggccccagtgcgcgggctgacactcattcagccggggaaggtgaggcgagtagaggctggtgcggaacttgccgcccccagcagcgccggcgggctaagcccagggccgggcagacaaaagaggccgcccgcgtaggaaggcacggccggcggcggcggagcgcagcgatggccgggcgagggggcagcgcgctgctggctctgtgcggggcactggctgcctgcgggtggctcctgggcgccgaagcccaggagcccggggcgcccgcggcgggcatgaggcggcgccggcggctgcagcaagaggacggcatctccttcgagtaccaccgctaccccgagctgcgcgaggcgctcgtgtccgtgtggctgcagtgcaccgccatcagcaggatttacacggtggggcgcagcttcgagggccgggagctcctggtcatcgagctgtccgacaaccctggcgtccatgagcctggtgagcctgaattttacattgggaatatgcatgggaatgaggctgttggacgagaactgctcattttcttggcccagtacctatgcaacgaataccagaaggggaacgagacaattgtcaacctgatccacagtacccgcattcacatcatgccttccctgaacccagatggctttgagaaggcagcgtctcagcctggtgaactcaaggactggtttgtgggtcgaagcaatgcccagggaatagatctgaaccggaactttccagacctggataggatagtgtacgtgaatgagaaagaaggtggtccaaataatcatctgttgaaaaatatgaagaaaattgtggatcttccttttgtgctttctgccaatctccatggaggagaccttgtggccaattatccatatgatgagacgcggagtggtagtgctcacgaatacagctcctccccagatgacgccattttccaaagcttggcccgggcatactcttctttcaacccggccatgtctgaccccaatcggccaccatgtcgcaagaatgatgatgacagcagctttgtagatggaaccaccaacggtggtgcttggtacagcgtacctggagggatgcaagacttcaattaccttagcagcaactgttttgagatcaccgtggagcttagctgtgagaagttcccacctgaagagactctgaagacctactgggaggataacatccgagaccttcaaggtaacccaattgcgaatgccaccatctccgtggaaggaatagaccacgatgttacatccgcaaaggatggtgattactggagattgcttatacctggaaactataaacttacagcctcagctccaggctatctggcaataacaaagaaagtggcagttccttacagccctgctgctggggttgattttgaactggagtcattttctgaaaggaaagaagaggagaaggaagaattgatggaatggtggaaaatgatgtcagaaactttaaatttttaaaaaggcttctagttagctgctttaaatctatctatataatgtagtatgatgtaatgtggtcttttttttagattttgtgcagttaatacttaacattgatttattttttaatcatttaaatattaatcaactttccttaaaataaatagcctcttaggtaaaaatataagaacttgatatatttcattctcttatatagtattcattttcctacctatattacacaaaaaagtatagaaaagatttaagtaattttgccatcctaggcttaaatgcaatattcctggtattatttacaatgcagaattttttgagtaattctagctttcaaaaattagtgaagttcttttactgtaattggtgacaatgtcacataatgaatgctattgaaaaggttaacagatacagctcggagttgtgagcactctactgcaagacttaaatagttcagtataaattgtcgtttttttcttgtgctgactaactataagcatgatcttgttaatgcatttttgatgggaagaaaaggtacatgtttacaaagaggttttatgaaaagaataaaaatgacttcttgcttgtacatataggagcaatactattatattatgtagtcccgttaacactacttaaaagtttagggttttctcttggttgtagagtggcccagaattgcattctgaatgaataaaggttaaatagttcagtataaattgtcgtttttttcttgtgctgactaactataagcatgatcttgttaatgcttatagttagtca

SEQ ID NO: 24937 - DNA, 822 bp, Homo sapiens; identical to SEQ ID NO: 24606
  misc_feature 1, 807, 808, 809, 810, 811, 812, 813, 814, 815, 816, 817,818, 819, 820, 821, 822: n = A,T,C or G

SEQ ID NO: 24938 - DNA, 2477 bp, Homo sapiens
  misc_feature 1, 2, 2476, 2477: n = A,T,C or G
nngactgacttgtagctggaagaaatcatcggatttttattcttttattaaagaaaaaaaatttgaaatgccttccatgtgccaagcactgtgtcaggtgggagatgacagcttggtgaaacctctgtcaggctgtcttcctccgctttctctatccctgggtttccccctgcctaaaaaggattttgtgcttcgtggcttgtccaggcaagcaggccgtcgcgggacctagaccgagacagtgagtctctctttctcccgggcctcccttctgtttcctgggctgcaggggagcaggaaatctggggcgagattcccgccgcggacgcgcactgccgaagcctggtccctcgacctgtccctgcccagcgcgggggcgcaaccgccacgcctcctcacccctccctccggctgcacgaataatgacaacagccgcccctcccacctttggcgtcacgttcaaaacaatcctttgactacaactcccagaaggccgagcggcttagcgagtgcacccgctctcggctgctccggcaaactacacatcccaaagggcagcgccgaccgcgtgtcctttcacagcgaagtgcggaactgcgtttgtttccggcgtgggtccgggcaagaaccgcttgtagtttggtttaaattctgcacgggaggaccttctgagtttacctgttgggctcctggctgcgcaggcacagcagctacacagaagagatgggagaagaggctaatgatgacaagaagccaaccactaaatttgaactagagcgagaaacagaacttcgctttgaggtggaggcatctcagtcagttcagttggagttgttgactggcatggcagagatctttggcacagagctgacccgaaacaagaaattcacctttgatgctggtgccaaggtggctgttttcacttggcatggctgttctgtgcaactgagcggccgcactgaggtggcttatgtctccaaggacactcctatgttgctttacctcaacactcacacagccttggaacagatgcggaggcaagcggaaaaggaagaagagcgaggtccccgagtgatggtagtgggccccactgatgtgggcaagtctacagtgtgtcgccttctgctcaactacgcagtgcgtttgggccgccgtcccacttatgtggagctggatgtgggccagggttctgtgtccatccctggtaccatgggggccctctacatcgagcggcctgcagatgtcgaagagggtttctctatccaggcccctctggtgtatcattttggttccaccactcctggcactaacatcaagctttataataagattacatctcgtttagcagatgtgttcaaccaaaggtgtgaggtgaaccgaagggcatctgtgagtggctgtgtcattaacacctgtggctgggtcaagggctctggttaccaggctctggtgcatgcagcctcagcttttgaggtggatgtcgttgttgttctggatcaagaacgactgtacaatgaactgaaacgggacctcccccactttgtacgcactgtgctgctccctaaatctgggggtgtggtggagcgctccaaggacttccggcgggaatgtagggatgagcgtatccgtgagtatttttatggattccgaggctgtttctatccccatgccttcaatgtcaaattttcagatgtgaaaatctacaaagttggggcacccaccatcccagactcctgtttacctttgggcatgtctcaagaggataatcagctcaagctagtacctgtcactcctgggcgagatatggtgcaccacctactgagtgttagcactgccgagggtacagaggagaacctgtccgagacaagtgtagctggcttcattgtggtgaccagtgtggacctggagcatcaggtgtttactgttctgtctccagcccctcgcccactgcctaagaacttccttctcatcatggatatccggttcatggatctgaagtagagatcagcaggaagccttgctgcctgggacatagagatcatctggccacccctagaggcagatgggctgagataaaagactgttggggccacctgaccagtaaactgtggactagtagaaagttcatattctacctctaaaaacaggtagtggtaacctgactcttctaatcttgaaccaaaaggaaaaccatgagactgtaattggtttcttagaccacctaagatgccactttgaattctctaagaccctggagaattgcatttctttcactgtgctactatgtggtttttaaaaaatcaatgctttatattccatatgtggttcttacccatttatctaggatgaaagtgtgaattagagggactccttccaataaagttcaaacttaaaaaaaatcattttaataaatatttttgccatatcaaaaaaaaaaaaaaagggcgccgctcgcgatcggacgcgtgggtcgacnn

SEQ ID NO: 24939 - DNA, 3807 bp, Homo sapiens; identical to SEQ ID NO: 21505
  misc_feature 1, 3805, 3806, 3807: n = A,T,C or G

SEQ ID NO: 24940 - DNA, 1728 bp, Homo sapiens
  misc_feature 1725, 1726, 1727, 1728: n = A,T,C or G
ggctgctcagcgccaggcatcagctgggaagctggcgtgggcaggccagctgtacctggcctggagctccagattagaagaggagccatgtcagaagaaacagtaagtgaatcacagttttccttgaagacagcagcgctaagagtgtttgatcttcctctgacttggtactattctctctcccagatcaaattttctccggtggctaaaaagttgtttgtggtaactgcagtgagtgctatatctgtaatttttctggctcatcactttaaaagaaaacgtggaaagaagaaaggaaaaatattaccatgggaaccagagcacctcatacttgaatacactaaaagagcagcatcagacaaaggttcaagttgttccagtagcagacagaatttgacattatctttaagttctaccaaagacaaaggatctcaagtttgtaactatgctaatggaggacttttcagtaaatattcaggttctgcacagagtttggcctctgtccagagtgtcaattcttgtcatagctgcgcttgtggcaattctaattcctgggacaaagcagatgaagatgatattaaacttgttaatattcctgtgactactccagagaacttatacttaatgggtatggaattgtttgaagaggcattgcgtcgatgggaacaagctctgacctttcgcaatagacaggctgaagatgaagcctgtggttccattaaactgggtgcaggagatgccattgctgaagaaaatgtagatgatattattagtactgaatttatccataaactcgaagctctgctgcaaagagcctatcgtctccaagaggagtttgaagctacccttggggcatctgatcctaattcccttgctgatgatattgataaagatacagatatcaccatgaagggtaatgtggaagactttggcctgcgagacaccttgagcatcgcatccacggattcctttgcttccgcagcagagcttgcagaacacagagaagtacggcatacctacagcctggagtccctttgtcactgcccattttacgaggaagccatgcatttagttgaagaaggaaaaatttactccagagtactgagaactgaaatgttggagtgcctaggagacagtgattttcttgccaaacttcactgtattcgacaggcttttcaggtaattctttcagaatcagctaacaggatattcctcgctgagagcggaaggaaaattttatcagctttaattgtgaaagcacgaaagaatccaaagaagtttgaagatgttttcgatgaaatgatctattttttagagcagaccgatcactggggtagtactgaaatggaacttgctgctagaggggtgaaaaatctaaatttttatgatgttgttctggattttatattaatggactcctttgaagatttggaaaacccacccacatccatacagaatgtagtaaataatcgatggctaaactcatccttcaaagaaacagctgtggcttcaagttgttggtcggtgctgaaacagaaaagacaacagatgaagatcccagatggattttttgcccatttttatgccatttgtgaacacatcagtcctgtcctagcctggggctttttgggtcctagaaattctctgtatgatttatggtgcttttttaagaatcaagttcttttatttctcaaagacatttttgactttgagaaagtgcgctannnn

SEQ ID NO: 24941 - DNA, 1178 bp, Homo sapiens
  misc_feature 152, 1173, 1174, 1175, 1176, 1177, 1178: n = A,T,C or G
ctcatcatcttcatttcgtttcctcttgccaacagtcagttaatctggttctgactcctgcttctgtaagggtgggaagaacctcagatatgtcatcttggtacaccccaatggccctgtttattaaatgtagtggattaagtgtctgtcancaaatacaccaaaaccattttttatagaaacagtatttaatggtcactcaatagctttcaaaatacatttttgtattacagcactgcacaagctattctaatagtgctctggcctcatcattcctgcaaagcttgctttggggagttggataatgtgaaaattttaagtacctaggggagcaaagagccatgtaactatctgtaataaacttgtagcatatgtaaagttttcttggcctttatcttacaaaaatggagtattttagtatgaatttgctgaatgtaagaccgtggactgttttttataatatggcctaattttaaaggtccaaaataacttgtctttaaagtttgcccttgtgctaaagtgccagtgtatgtatgttatacttgatttggttgtaaactatatttcaaagtaaaccctagtgtaataagttttataactaaaaaggtttaagctgctaaaactatttctaagacgcatgtgaaatgcagtatgggactatctttttttcctcctctaagcccaaagattaactagagtccctccaaccttatagatcgttggctttcacaatcttataacctaggatacaggtagtttcgagtatggtgccagtgatgtctcgtccacgtccggtcaacgggtagagtgcaacccaatggaccacctctatgcaaacagactgtaccctcctgcattactaccatcgactaccatggtataggccaacctctaaatgcttaaaacactagcgaaaccagtagcacgtatgtggcgcagggtacacaatagaccgctcactgccctacttactacactgacacctcctagcagcctaacctcgttactctttccccaccacctataactcccacccaacctcacactacgtaccctccccccctaccttatacacgcataccaaccctcttcacaaacccagccacacctgcccctcaacccatactcaccacttaccataccctcaccctctcacacctccatcactaccannnnnn

SEQ ID NO: 24942 - DNA, 1782 bp, Homo sapiens; identical to SEQ ID NO: 21380
  misc_feature 1766, 1767, 1768, 1769, 1770, 1771, 1772, 1773, 1774, 1775,1776, 1777, 1778, 1779, 1780, 1781, 1782: n = A,T,C or G

SEQ ID NO: 24943 - DNA, 1815 bp, Homo sapiens
gagtcgaccacttccgcttgacctggcccggacgccagaaaatgttccacgtgggataccctgcgtggggttcactgtagtagctgcactaggtgattcttggagcgggcctgagagacaaggacatgtggatcccagtggtcgggcttcctcggcggctgaggctctccgccttggcgggcgctggtcgcttttgcattttagggtctgaagcggcgacgcgaaagcatttgccggcgaggaaccactgtgggctctctgactcctctccgcagctgtggcccgaaccggatttcaggaatccgccaaggaaggcgtctaaggccagcttagactttaagcgttacgtaaccgatcggagattggctgagaccctggcgcaaatctatttgggaaaaccaagtagacctccacacctactgctggagtgcaatccaggtcctggaatcctgactcaggcattacttgaagctggtgccaaagtggttgcgctcgaaagtgacaaaacttttattccacatttggagtccttaggaaaaaatctggatggaaaactacgagtgattcactgtgacttctttaaactagatcctagaagtggtggagtaataaaaccacctgctatgtcttctcgagggctctttaagaatttgggaatagaagcagttccttggacagcagacatccctttaaaagtagttggaatgttcccaagtagaggtgagaaaagggcactttggaaactcgcatatgacttgtattcctgtacttctatatataaatttggacgaatagaagtaaatatgtttattggtgaaaaagaattccagaaactaatggcagatcccggaaatccagacttgtatcatgtattaagtgttatctggcaattagcttgtgagattaaggttctgcacatggagccttggtcatcatttgatatatacacccggaaagggccgctggaaaacccaaagcgtagggaattattagaccaattacaacaaaagctgtatcttattcaaatgattcctcgtcaaaatttatttaccaagaacttaacacctatgaactataatatattttttcacttgttaaagcactgttttgggaggcgcagcgccactgtaatagaccacttacgttcattgactccacttgatgcgagagatatattgatgcaaataggaaaacaggaggatgagaaagtagttaacatgcaccctcaagacttcaaaacactttttgaaactatagagcgttccaaagattgtgcttataaatggctgtatgatgaaaccctggaagataggtagcaactagactgtcgtttttggtggagcggttcatttatttggaaactatgacatgaaaaccaaatttgaaaactcacatcctttcagcagaaggtaactgttcttgtcttgcacaagccaggcagatcatttctcctaagctgatatcattggcttattggatgaaacagtgtctgctattttattcacaattgaataaaatgaaaacttcaattaattgtggatttgatcagattgaattcgttttgtttcagattcctatttaaatatttcacttgtactgttgctgatttttgcatcttcttgaagagcaagagtctgtacattattaagcttagaaagtaagcaaaactgatttactggtttgcctttcagtttgttgaaatgtattgtcaagtactgtacaatgaaattgtttaaattttaatatgatttaagctttttagaaattaaaatattttcattagaaaaaacaaaaaaaaaattgttgcggcccggg

SEQ ID NO: 24944 - DNA, 1027 bp, Homo sapiens
  misc_feature 1, 1027: n = A,T,C or G
nctgtgtcgggcattaccagaagagtcttcatgtggacagtctcagggacaccatgtagagaattttggtctcgattcagaaaagagaaagagccagtggttagttgagacagtagaagagaaaaaggaacctatcctagtgtgtccacctttacgaagccgagcatacacaccacctgaagatctccagagtcgtttggaatcttacgttaaagaagttttgggttcatctcttcctagtaattggcaagacatctccctggaagatagtcgtctaaagttcaatcttctggctcatttagctgatgacttgggtcatgtagtccctaactccagactccaccagatgtgcagggttagagatgtttttgatttctataatgtccctattcaagatagatctaaatttgatgaactcagtgccagtaaatctgccccccaatttgaaaatcacttggagttactaagcaaatatcggaagagacacacattgaaatcactgtctttccctgagcaagggggctgctcattagatcttttgatactttaccatgtgaaatactaccagaactgttctctaaacccactttttctgtagaggaatgtatcatctttttttttctcatattacaaatggacaaataacggactttctattttcatatttgctgaaaccattttttaaatgaaattaggtcattatttatgaaaagttttgagagggcactgtcaacttgggtttaagacaggaggacattgcaagttcacacctttcataagcataaagtagttgcaagaaagtattttcatcctgttaggattcatatctaagatagagttatgcattgcacatacacaaataaacttttattagatagatacctataaaagaaacataaaagtatgttgtgtattactgacagttctagattaatttcttttagaattaaagtagatttgttaaagtgaaaaaaaaaaaaaaaaaaaaagatctttaattaagcggccgcaagcttattccctttan

SEQ ID NO: 24945 - DNA, 3418 bp, Homo sapiens
  misc_feature 1: n = A,T,C or G
ngctgtgttcgcttgtctgtgcttgggcttggttgtcgatgacgtgatgtgtcggtcttgtgttgacttcagtatgctgatcgggtggtgttgatttgttgggcgctgcattgattttgattgtgttcggtggcgtgtgtgtttgttgtgctgttgtgtgttgatgcggagggtgcctgttccttgggtccgcgagatgtttgacgaatttgggtccgttgtgtttggttgcgttgtatctgctggtgggttgtttgcagtggtgtccctttgattttcgtgggatggacatagtttctattaggtacaaacttaacattaaaatttcatgaccacttataatatttaaaaaatcaaatttaaaaagtatgaccatacattgaacatattaagaaaaacacaacagtaaattagatattgaccctgtatgccaactttgtaatataaatactacaataagaatcatattggaagcaacgattaagcaaaactaatgaacctatcaaactaaaggatctatttaacgttacgtaaggagaatagcatatagaacctaaaagtgagtgagaaaagatttaggtttcaatctgagcattttactagctgtagaccttgactggtctacttatctttctatgcattaggtttttcatctgtcaaatggaaataatagtacccaaatcctagggttgctctagaatccaataatatgtgcaaaggacttattagcacagtgtgtgagacttaaatcaatacatgtaactataattatctttattatgcagcaaaattttttaaattgctaacttttaacttcatgtagaattattcagtctaacaatatgaactgatcttttcttctaaagtatagaataattacaggatagatcagagagaaataatacagaaactgaatatagttaaactaattgaatgaaagcacaaaatgctttgtatgtaaaattcaacaatatatgggtaatgtgcagaatatttttgcgttaaaaaaagttaatctcccagatgtgagctttgttagtcaccaacaaattatgtactgactgaactgctgtctctcaaacacagttcaagcatgccttagccactaccttaggtacttgaccactttaaggggttttgtggcatttcaaaaatcaaaatctctttatccagatccttgtaaatattcaccattacaggtaagaaaaacgcattttagggaagcagtgaattctccacttggaatcaatctactgattgataattaaattatttcactgtgaaccagaaggctagtatttagaaagcaaaatatttagaagtgaaagaggggggaaaaaagaatgatctacaatgtaatataaattaacctaatttaaattagattttaatttaacctactttgatagttttttaaaacaaggaagatcctaaggacttgcaactatggcaatcctcaaaatgggaccaaaaattgtcctggaatggtcaggtggtcatccatctaaagatccatccagctactatttaataattcttcataaggacacttcatctactctggttgactgtcattttcaacatcataatttacataaggtaggcttcctttattaaattcgtattctgtatttcagatatttctcaattttagaaaaacaatgcacagtgtgttaagagcatattttcaacttcattcaatgcattacctaaatactgcatattagctcatgcggtattgtgtaatactgcaaagaccgtacttacgtaaatgttggttaaagttaccaattatacaaagctccactctctacctaaaattttaccatgtgcaaaacgaaaaacattttagttattgatcatctcttctgagccatacactttgggcaaaattttgtgatggctataaatatgaaaacacttaaaaaatcagaatacaaagaatgcatattgcctcacatgacacatttttttttttccctcagagaaagaccatctgtttaggataaatttctagtcttgtttatatagtcaagtattttttgctaaaaaagaaaatgagaagacctgtgctgtgaaaaattttaaaaatctcaaatttttaaataaaaaatcatttataaaattcaggatggatggctctaaaatataaaaagagtgaaataaaaaaaacaactgcagggaatttgtttattgagcattaatgttaacacttttaaattaagtattcacttacgaattttgtcactgtcctatcaacggacataatagaaaatattgcacagaactcaaacatgaaaataataaacaaaataactaagcaacaagtatatgctttacattttaaaaattaatccaaacaaaataatttgaagcacttctctgatttggaagtcttaaaatgttatctcatgttttatttgagattttttttcgttttttcttttttacaaattgacactgtacaaagagcttaaatggccagtaaaactactgccttaaaattgttggctttaagtaacagaggtaaaatttgaattcacatcagagctttctaaaatggcaatagtacaagcaaatgactttctctagtatccaaaacctgcgctggctctcccttggctagaaacaagacagccttctaaagctgccataatgtcctaaaatgctctgaaagaagttggtatacttcattccccagcttaccttggtaacactggactaaacagaaaatgaagaaaattcagtcaatagtaacttaaacagtactaagttagctctggacttagaaggtttggtaaagttgatgacattcagaataaggttctcagaagaaaagcagttttccaaaaataggctaaaaagcctatattaaagaaaaaatgccaagagtgaattgaatacttaagtttatctgttcctagaagactatgaacaccacaatgggagctgaaacactatatataatttagaatgcattctcccagagcaagtttataaggtttatagaatagtaatggcctttctaaattttcacttgatatttaaaattttataagtgatttattatgtcatcaaattaagccaattccattaactatatccaagtaggaataacttcagaaatgctttgaaaaaggacaatgacagacctatagacatgaaaagcaaacagcctttgcaaagctcatctccaaatctatcaattctcaattcttcttaaaataaaagactaaccacatgttcagccattccatcttattcaagtttagcattacgacagaaatctcaaagggctgcatgttgctaaacactgtcagtatttcctatatgcaccatttagactatacctcacttttttttacttcccttataatattaaaataatgaataaatatggtcctttagttaagcggac

SEQ ID NO: 24946 - DNA, 7146 bp, Homo sapiens
  misc_feature 1, 46, 47, 81, 109, 7142, 7143, 7144, 7145, 7146: n = A,T,C or G
naattccctggatacagcctttttatgacttttacttcctttatanncaaattccaacgtcttctcattcctccaccaggnctgtgccaacctgggcccaacccaaggncctcactaaaccatccaatcagtaggagccatagactactttatttagccaaagcaaaaatgagtcaactgaattctgtttttccatttacttctgtctgtttttccttcctcttgccaccctcagtgccacaagaggggacccctctcggtagccctgaggctctggcgccttcaagtgagaagctaagcaccagcctctgctgggctgcagaagcggcggcggcggcagcagcagcagcagcatcaggaaggctctcgggccagcgcggtgaacccgggctgggcagcaggtcgcggagccgcgagccaggatggaggcagagggcagcagcgcgccggcccgggcgggcagcggagagggcagcgacagcgccggcggggccacgctcaaagcccccaagcatctctggaggcacgagcagcaccaccagtacccgctccggcagccccagttccgcctcctgcatccccatcaccacctgcccccgccgccgccaccctcgccccagccccagccccagtgtccgctacagccgccgccgccgccccccctgccgccgcccccgccgccgcccggggctgcccgcggccgctacgcctcgagcggggccaccggccgcgtccggcatcgcggctactcggacaccgagcgctacctgtactgtcgcgccatggaccgcacctcctacgcggtggagaccggccaccggcccggcctgaagaaatccaggatgtcctggccctcctcgttccagggactcaggcgttttgatgtggacaatggcacatctgcgggacggagtcccttggatcccatgaccagcccaggatccgggctaattctccaagcaaattttgtccacagtcaacgacgggagtccttcctgtatcgatccgacagcgattatgacctctctccaaagtctatgtcccggaactcctccattgccagtgatatacacggagatgacttgattgtgactccatttgctcaggtcttggccagtctgcgaactgtacgaaacaactttgctgcattaactaatttgcaagatcgagcacctagcaaaagatcacccatgtgcaaccaaccatccatcaacaaagccaccataacagaggaggcctaccagaaactggccagcgagaccctggaggagctggactggtgtctggaccagctagagaccctacagaccaggcactccgtcagtgagatggcctccaacaagtttaaaaggatgcttaatcgggagctcacccatctctctgaaatgagtcggtctggaaatcaagtgtcagagtttatatcaaacacattcttagataagcaacatgaagtggaaattccttctccaactcagaaggaaaaggagaaaaagaaaagaccaatgtctcagatcagtggagtcaagaaattgatgcacagctctagtctgactaattcaagtatcccaaggtttggagttaaaactgaacaagaagatgtccttgccaaggaactagaagatgtgaacaaatggggtcttcatgttttcagaatagcagagttgtctggtaaccggcccttgactgttatcatgcacaccatttttcaggaacgggatttattaaaaacatttaaaattccagtagatactttaattacatatcttatgactctcgaagaccattaccatgctgatgtggcctatcacaacaatatccatgctgcagatgttgtccagtctactcatgtgctattatctacacctgctttggaggctgtgtttacagatttggagattcttgcagcaatttttgccagtgcaatacatgatgtagatcatcctggtgtgtccaatcaatttctgatcaatacaaactctgaacttgccttgatgtacaatgattcctcagtcttagagaaccatcatttggctgtgggctttaaattgcttcaggaagaaaactgtgacattttccagaatttgaccaaaaaacaaagacaatctttaaggaaaatggtcattgacatcgtacttgcaacagatatgtcaaaacacatgaatctactggctgatttgaagactatggttgaaactaagaaagtgacaagctctggagttcttcttcttgataattattccgataggattcaggttcttcagaatatggtgcactgtgcagatctgagcaacccaacaaagcctctccagctgtaccgccagtggacggaccggataatggaggagttcttccgccaaggagaccgagagagggaacgtggcatggagataagccccatgtgtgacaagcacaatgcttccgtggaaaaatcacaggtgggcttcatagactatattgttcatcccctctgggagacatgggcagacctcgtccaccctgacgcccaggatattttggacactttggaggacaatcgtgaatggtaccagagcacaatccctcagagcccctctcctgcacctgatgacccagaggagggccggcagggtcaaactgagaaattccagtttgaactaactttagaggaagatggtgagtcagacacggaaaaggacagtggcagtcaagtggaagaagacactagctgcagtgactccaagactctttgtactcaagactcagagtctactgaaattccccttgatgaacaggttgaagaggaggcagtaggggaagaagaggaaagccagcctgaagcctgtgtcatagatgatcgttctcctgacacgtaacagtgcaaaaactttcatgccttttttttttttaagtagaaaaattgtttccaaagtgcatgtcacatgccacaaccacggtcacacctcactgtcatctgccaggacgtttgttgaacaaaactgaccttgactactcagtccagcgctcaggaatatcgtaaccagttttttcacctccatgtcatccgagcaaggtggacatcttcacgaacagcgtttttaacaagatttcagcttggtagagctgacaaagcagataaaatctactccaaattattttcaagagagtgtgactcatcaggcagcccaaaagtttattggacttggggtttctattcctttttatttgtttgcaatattttcagaagaaaggcattgcacagagtgaacttaatggacgaagcaacaaatatgtcaagaacaggacatagcacgaatctgttaccagtaggaggaggatgagccacagaaattgcataattttctaatttcaagtcttcctgatacatgactgaatagtgtggttcagtgagctgcactgacctctacattttgtatgatatgtaaaacagattttttgtagagcttacttttattattaaatgtattgaggtattatatttaaaaaaaactatgttcagaacttcatctgccactggttatttttttctaaggagtaacttgcaagttttcagtacaaatctgtgctacactggataaaaatctaatttatgaattttacttgcaccttatagttcatagcaattaactgatttgtagtgattcattgtttgttttatataccaatgacttccatattttaaaagagaaaaacaactttatgttgcaggaaaccctttttgtaagtctttattatttactttgcattttgtttcactctttccagataagcagagttgctcttcaccagtgtttttcttcatgtgcaaagtgactatttgttctataatacttttatgtgtgttatatcaaatgtgtcttaagcttcatgcaaactcagtcatcagttcgtgttgtctgaagcaagtgggagatatataaatacccagtagctaaaatggtcagtcttttttagatgttttcctacttagtatctcctaataacgttttgctgtgtcactagatgttcatttcacaagtgcatgtctttctaataatccacacatttcatgctctaataatccacacatttcatgctcatttttattgtttttacagccagttatagtaagaaaaaggtttttccccttgtgctgctttataatttagcgtgtgtctgaaccttatccatgtttgctagatgaggtcttgtcaaatatatcactaccattgtcaccggtgaaaagaaacaggtagttaagttagggttaacattcatttcaaccacgaggttgtatatcatgactagcttttactcttggtttacagagaaaagttaaacagccaactaggcagtttttaagaatattaacaatatattaacaaacaccaatacaactaatcctatttggttttaatgatttcaccatgggattaagaactatatcaggaacatccctgagaaacggttttaagtgtagcaactactcttccttaatggacagccacataacgtgtaggaagtcctttatcacttatcctcgatccataagcatatcttgcagaggggaactacttctttaaacacatggagggaaagaagatgatgccactggcaccagagggttagtactgtgatgcatcctaaaatatttattatattggtaaaaattctggttaaataaaaaattagagatcactcttggctgatttcagcaccaggaactgtattacagttttagagattaattcctagtgtttacctgattatagcagttggcatcatggggcatttaattctgactttatccccacgtcagccttaataaagtcttctttaccttctctatgaagactttaaagcccaaataatcatttttcacattgatattcaagaattgagatagatagaagccaaagtgggtatctgacaagtggaaaatcaaacgtttaagaagaattacaactctgaaaagcatttatatgtggaacttctcaaggagcctcctggggactggaaagtaagtcatcagccaggcaaatgactcatgctgaagagagtccccatttcagtcccctgagatctagctgatgcttagatcctttgaaataaaaattatgtctttataactctgatcttttacataaagcagaagaggaatcaactagttaattgcaaggtttctactctgtttcctctgtaaagatcagatggtaatctttcaaataagaaaaaaataaagacgtatgtttgaccaagtagtttcacaagaatatttgggaacttgtttcttttaattttatttgtccctgagtgaagtctagaaagaaaggtaaagagtctagagtttattcctctttccaaaacattctcattcctctcctccctactcttagtatttcccccacagagtgcctagaatcttaataatgaataaaataaaaagcagcaatatgtcattaacaaatccagacctgaaagggtaaagggtttataactgcactaataaagagaggctctttttttttcttccagtttgttggtttttaatggtaccgtgttgtaaagatacccactaatggacaatcaaattgcagaaaaggctcaatatccaagagacagggactaatgcactgtacaatcggcttatccttgcccttctctcttgccaaagtgtgcttcagaaatatatactgctttaaaaaagaataaaagaatatccttttacaagtggctttacatttcctaaaatgccataagaaaatgcaatatctgggtactgtatggggaaaaaaatgtccaagtttgtataaaaccagtgcatttcagcttgcaagttactgaacacaataatgctgttttaattttgttttatatcagttaaaattcacaataatgtagatagaacaaattacagacaaggaaagaaaaaacttgaatgaaatggattttacagaaagctttatgataatttttgaatgcattatttattttttgtgccatgcattttttttctcaccaaatgaccttacctgtaatacagtcttgtttgtctgtttacaaccatgtatttattgcaatgtacatactgtaatgttaattgtaaattatctgttcttattaaaacatcatcccatgatgggatggtgttgatatatttggaaactcttggtgagagaatgaatggtgtgtatacatactctgtacatttttcttttctcctgtaatatagtcttgtcaccttagagcttgtttatggaagattcaagaaaactataaaatacttaaagatatataaatttaaaaaaacatagctgcaggtctttggtcccagggctgtgccttaactttaaccaatattttcttctgttttgctgcatttgaaaggtaacagtggagctagggctgggcattttacatccaggcttttaattgattagaattctgccaataggtggattttacaaaaccacagacaacctctgaaagattctgagacccttttgagacagaagctcttaagtacttcttgccagggagcagcactgcatgtgtgatggttgtttgccatctgttgatccaggaactacttcagctactgtgcatttgattatttccttttttttttttttcaacgtcggaaaaacacaactgggggacacatacttttctttccccaggtggatttataccaatccttgacttttattcaaaggtccttgggaatacaaagacgctcaataggaagagtggattggattggcatgtgcgccaaagtaactcgtggggggacatctatcacataaagattcctgaccttgttcacggcgactacttacacgagaaccactcctggctgttaaacctaaaatttttttccacttaagaatagacccatggttctacttatatggtaacccaatctattaaagcaggggggggatgtcgtacattggagagagcttcattatcctcaagattggtgcgcacaccttctgggtgagacttcaaaattcacttgtaaggggcgcctaggaggacttttaggtgtcgggaaaccccgaatgcccctgaagggtcgaagaagacttgagaaggcctctatcttttgaacagatatcgccgagttgaaagcacaaacacggtcgtccagggagaatctccgnnnnn

SEQ ID NO: 24947 - DNA, 2576 bp, Homo sapiens
  misc_feature 9, 45, 2409, 2572, 2573, 2574, 2575, 2576: n = A,T,C or G
cgcggccgnttcgaactacggctgcgagaagacgacagaaggtangctgcgagaagacgacagggggggggcggggccaaggccagggcctgactaaacctggagactcgggtggccgaggggcttcataccagctgaagagcgacaagccgctggcagccgcggatctcaccgccgctcagggtttttagaacttcagccataaaaatgggcagaattttccttgatcatatcggtggtacccgtctgttttcttgtgcaaactgtgatacgatcctgaccaaccgctcagaactcatctccactcgtttcacaggcgccactggcagagcatttctttttaacaaggtagttaacctgcagtacagcgaagttcaagatcgggtcatgctcactggccgccacatggttcgagatgtgagctgcaaaaactgcaatagcaaactgggatggatctatgagtttgccactgaagacagccagcgatataaggaaggccgcgtgatcctggaacgtgctctagttcgagagagtgagggctttgaggagcatgtaccatctgataactcttgaagatacagagagaaatccatcttttcccaggtctccttcactgaaaacaaaaatctacttacatacactgtcaccttagcatcagagtcggattaatgaactgcggaacaagaggttgtgagaatctaagatggaacctttctttctttctttctttttttttaaattttgtattttccatccaacagcagtgtgtagagagaatattatgcagatgccgttaattttttaccctatgtttacatcttgaggcagcagagtctgtctgcagctatgtggtgagctatgtaaggaaaaaaatctgggctgttagagtgaaaaagtgtgttttatgtcaattgtgaaaggaaaatgttaggagtatggtttttaaacttgggcttcattttaaacttttttttttaaacccagttatttcacttgatttgctagcttcagagaagagatccgaatctgtgcccagcgctaaaggctcagtgttagcatggcttgtgctggccggtgtgccatattcttgttggagatgaaccgtagcaccagagcccattcttccttgtcagtcttggcccaaagatgtcaccattcctagttatttgtcaccacataattggtgttgattggaaactttttctgagatgggacagaactgctgggttgtctttttccatgtaacttaagcatagtaatataaataaagtaatagttggatgcttttggtcctgtgttgcttttaaaaacaccttataaaagaggagagtatttgataagcaattttcatagtagtaaagttttttttcatctcttaaactaaattgaccatgcatataatattctttgtttaaatgaaagcatactgttgaaacccgcagtgttgcatttagaaaacagttgaacagaatgtcaatgtgcattcatgcaaaaaaacatttaatctgcatctgttttagaaaagggggaaatgaagcaacttgtctaaaaatactgctttacaaagcatttcagcctttccccctcagttttgcattgattttttgacaagtctgtagagcctaatagtttccatcaaaggcctagatctcttatttagcatttttttcagctcttctctcagaagttcagctgttgaaacgaaaactgtactttgtaccctcacatacaaagggatcaaatttgacctggtgttattttagccccaaatttatgacattacacaatattaaaatgtaaatgtttctttacccaaactacttctagatattctagtatttgcttctggtggaattaaatgacggtaaaattggctaattatttgaatgaatgaatggatggatgttttgcatgctcaatttctaggtcctttgtctagaaaggaaatttgcctcagttgaattagtgaaatatttctgtcgttgatattaaaagtgacttctgagtacagttaagttcctcctatttgccactgggctgttggttagaagcataggtaactgattaagtaggtatgatactgcatttgaaataagtggacacaaactatcctttctccaccatggactcaatctgagaacaacagcattcatttccattcatttccatactggcttttgattatatgcagattcctagtagcatgccttacctacagcactatgtgcatttgctgtcacaataaagtatattttgtcttgcaaaaaaaaaaaaaaaaaaaaaaaaaaagggccggtacccaattcgccctatagtgagtcgtattacaattcactggccgtcgttttacaacgtcgtgactgggaaaaccctggcgttacccaacttaatcgccttgcagcacatccncctttcgccagctggcgtaatagcgaagaggcccgcaccgatcgccctttccaacagttgcgcagcctgaatggcgaatggcaaattgttagcgttaatactttgttaaaatttcgcgtaaacttttgttaaatcagctcatttttaaccaataggccggaannnnn

SEQ ID NO: 24948 - DNA, 1033 bp, Homo sapiens; identical to SEQ ID NO: 22857

SEQ ID NO: 24949 - DNA, 1370 bp, Homo sapiens
  misc_feature 1, 2, 3, 4, 1370: n = A,T,C or G
nnnncgcggccgcgtcgacacggctgcgagaagacgacagaagggctccgccatcgcggacgcagcctcgtgccgggagtcgccgcattgtggtccgcttctctgcactatgtcgggtggcctcctgaaggcgctgcgcagcgactcctacgtggagctgagccagtaccgggaccagcacttccggggtgacaatgaagaacaagaaaaattactgaagaaaagctgtacgttatatgttggaaatctttctttttacacaactgaagaacaaatctatgaactcttcagcaaaagtggtgacataaagaaaatcattatgggtctggataaaatgaagaaaacagcatgtggattctgttttgtggaatattactcacgcgcagatgcggaaaacgccatgcggtacataaatgggacgcgtctggatgaccgaatcattcgcacagactgggacgcaggctttaaggagggcaggcaatacggccgtgggcgatctgggggccaggttcgggatgagtatcggcaggactacgatgctgggagaggaggctatggaaaactggcacagaaccagtgagtggtgagagctctgtcagtgacaaacactcctttggcctgttgaatttgctgaagaacatcacctaaagtctgcacacgagcccatttttaccaagatttgatcagtgtctttactgagctggaagcctctgaaagttattaaaggacagaatccaaaagaatgcctttaattcttgtctgagaatcttggccatgtgtcagattatcagaacaattttgttaccaggtcagaaattgtgttctttgacaacagattggatctgtaatgttgattagtctttagccataaccactacacttttagaaagacagaaaaatgtaagaatttgtttttaccataatgagtcttaagtaggttcatgatctacattggggcctgggattatttttttaattttaagtttgcatgagatagcctaataaatggaggtggggccaggcatggtggctcacacgtgtaatcccaacactttgggaggctgaggaggaaggatagcttgaggccagagttgagaatagactgggcacctagaagaaccgtctttacaaagcaaagataaaacaaaggggtgtgcaaggtggatagcttgcacaaataggacggttgacatgactgttggtgaattaactcaaggggtagaggaggcctctggtagtggaagagatcacgagagggtcaggcgaaatggagggcaaggtaacagtgaaagagttcatagaacggtagcaaataggggagtgaagataaaagggagcattggggaagggagaggcctactgagggttan

SEQ ID NO: 24950 - DNA, 3429 bp, Homo sapiens
gaaaaaattttaatagataggaatttaatgtgtatgagaaacataacttgcacatctaacctttgataatcatggacattatcacttaggccaagtgagctcaataaaagggaaatattaactaaaaatatatgtgatacatggaaatggcaaaaatcacggtgaagctatgcaaacgatgcaagttcagaaagtgctgtgttaagtcatgggtgtggtggataaattcacccaaggagagagtaagagtgagaagaaaagagagttgacattgggtggcggggaatggagaagaagaacccatgaaggaaactgaggaagagcagccagacgaataggaggaaaaccaggagaagatggtctttggagtccaaatgaagagttctgaggaggaagtggtccacagcgtcaaacttgtgcaccatggacaattttgctgagggagatttcactgtggcggattatgccttgttagaagattgccctcacgtggatgattgtgtctttgctgctgaatttatgagcaatgattatgttcgtgtgactcagctttactgtgatggggtgggtgtgcaatataaagattatatccaaagtgagaggaatttggaatttgacatctgcagtatatggtgtagtaaaccaatttctgtcctgcaagattattgcgatgccattaaaataaacatcttctggccacttctgtttcaacatcaaaacagttccgtaatatcacgattgcatccctgtgtggacgccaacaattcacgtgcttctgagataaatttgaagaaactacaacatcttgagttgatggaagatattgtggatttggcaaagaaagttgctaatgattcattccttattggaggcttattgagaattggttgtaaaatagaaaataaaatcttggcaatggaagaagctctgaattggataaaatatgcaggcgatgtaacaattctaactaaattaggatcaattgacaattgttggcctatgttaagtattttctttactgaatacaagtaccacataactaaaattgtaatggaagactgcaatttgcttgaagaacttaaaactcaaagttgtatggattgtatagaggaaggagaactaatgaaaatgaaaggaaatgaagagttttccaaagaaagatttgatatagctattatctattacaccagagccattgaatatagacctgaaaactaccttctttatggtaaccgagctctttgttttcttcgtactggacagtttagaaatgcactcggtgatggaaagagagccactattctgaagaacacttggccaaagccaggagctgcacttagagataacaatgaaaagctgagtgaaggggagacggctggatggaagatctagcctgagcacatcccccatctgtctgcactcttcggagggtcattatcgttattgtgatgctctttctatgctgggggaatatgactgggccctgcaagcaaacataaaagctcaaaaactctgtaaaaatgaccctgagggaatcaaggatctaattcagcagcatgtaaagttacaaaaacaaatagaagacctacaaggtcgaacagcaaataaggatccaattaaagccttttatgaaaacagggcctacacacctaggagtttatcagcacctatatttactacttcacttaactttgtggagaaggaaagagatttcagaaaaattaatcacgaaatggccaacggtggtaatcagaatctaaaggtggcggatgaggcgttgaaggtagatgattgtgactgtcatcctgaattttcaccaccatcaagtcagcctccaaaacataaaggaaaacaaaaatctcgaaacaatgaatcagaaaagttcagttctagttcaccattgactttaccagcagatttgaagaacatcttggagaaacagttttctaaatcttccagagctgcacaccaggattttgctaatataatgaaaatgctgagaagcttaattcaagatggctatatggccttattggagcagcgttgccgcagcgctgcacaggcctttacagagttgctgaacggtttagatcctcaaaaaataaagcaattgaacctggccatgattaactatgttttggtcgtctatggacttgccatttctctccttggaataggacagcctgaggaattatctgaagccgaaaaccagtttaagaggattattgaacactaccccagtgagggccttgattgcttggcctactgtggaattggaaaagtatatttgaaaaaaaacagatttctagaagctctcaatcactttgagaaagcaagaaccttgatttatcgtcttcctggagtgttaacttggcccacgagtaatgtgattattgaagagtctcagccacaaaaaataaagatgctgttagagaaatttgttgaagaatgcaagttccctccagtgccagatgccatttgttgctatcagaagtgccatggatattctaagatccagatatacataactgatccagactttaagggttttatacgcatcagctgttgccagtactgtaaaatagaatttcacatgaattgctggaagaagttaaaaactacaacctttaatgataaaattgacaaggattttctacaaggaatatgtcttacccctgactgtgaaggtgtcatttctaagattatcatcttcagcagtggtggtgaagttaaatgtgaatttgaacacaaggtcataaaagaaaaggttcctccaagacctattctgaaacagaaatgttctagcctagagaaactaagactgaaagaagacaaaaaattgaagagaaagatccaaaaaaaagaagcaaaaaagttagcacaagaaagaatggaggaggacttaagagaaagtaatccacccaaaaatgaagagtagaaagaaactgtagacaatgttcagcgttgtcagttccttgatgacagaattctacagtgtataaagcagtatgctgacaagattaaatccggcatacagaatacagccacgcttctcaaagaattgctttcttggaaagttttgagcacagaagactatacaacctgtttttctagcagaaattttctaaatgaagcagtggactatgttattcgccacttgattcaagaaaataacagagtaaagacaagaatatttctgcatgttttgagtgagcttaaagaagtggagcccaaattagccgcctggatccaaaaacttaatagctttggtatgtccctttatattccagagcaataaactttaatacgaaggggaaaaaaaaaaaaaaaaaaaaaaaaaaaaaaaaaaaaaaaaaaaaaaaaaaaaaaaaaaaaaaaaaaaaaaaaaaaaaaaggggggggccgttaaactagtttaaaaaaaaaacc

SEQ ID NO: 24951 - DNA, 6135 bp, Homo sapiens; identical to SEQ ID NO: 23942
  misc_feature 1, 6115, 6116, 6117, 6118, 6119, 6120, 6121, 6122, 6123,6124, 6125, 6126, 6127, 6128, 6129, 6130, 6131, 6132, 6133,6134, 6135: n = A,T,C or G

SEQ ID NO: 24952 - DNA, 2055 bp, Homo sapiens; identical to SEQ ID NO: 24301
  misc_feature 1, 2: n = A,T,C or G

SEQ ID NO: 24953 - DNA, 2413 bp, Homo sapiens; identical to SEQ ID NO: 24934
  misc_feature 2408, 2409, 2410, 2411, 2412, 2413: n = A,T,C or G

SEQ ID NO: 24954 - DNA, 3807 bp, Homo sapiens; identical to SEQ ID NO: 21505
  misc_feature 1, 3805, 3806, 3807: n = A,T,C or G

SEQ ID NO: 24955 - DNA, 1615 bp, Homo sapiens
  misc_feature 1614, 1615: n = A,T,C or G
gcgtccggtcgcccagactggaatgtggtggcatgaacatagctcactgttaccttgaattctgggctcaggtgatccttccgcctcaccctcctgagtagctgggactacaggtgtgcaccaccacacctggctaattcttcttaaaatttttgtgtagagacagggtctcactatgttgcccaggctggtctcaaactcctggcctcaggtgatcctcttgtctcaccctcccaaagtgctgggattacaggcatgagccactgtgtccttccctgccttttttgcagcagggatagtactcaggaccagagttaagctgataccttaggcacacaggttggacttacatagaggaaagaaagcaagaaatgccctatgtacatgaggttttacctcctccattcctgaccaataaccacccataactacggcattctctgtgacttccttaaacagcagtgatgggaagggatccaatagtatcttcaaggccttggggaaacttgcagtgggtcagtggtctgtgccaaccaaacgatagccccatccaagccagctgagaacctaggaaggagtagtaggaatatggttgattagattggatctcccaagttttaattgaaaggagactgaacgaaaacctttctgctttctgtccgttaaagagctcctcatctgatcttgcagctagaccctttgagacttaagagctgcatcccaggatcagaagccagggctaattggggtaggacaatattcccagcccctaagctctgtagataatgcataagaagcaccaagtcaggctcagatgcaactaaaacacatctttgagccttttctttttcccttctcccctttctaaacaaaaaccttcctaggatggcatcttttgctctaactgggagacagtcataattggttgtagtcaattctactaagcagtgttggggtggttggaaagtctcttttttgtaatttgtttttgcaaatcattgtgaggccactttttctttctttctttctttctttctttctttctttcgttctttcgttctttcgttctttctttctttctttctttctctttctttcttttgctttccttctttcatctcttttttgtaattggttgttgcaaatcattgtgaggccacttttctttccccttccttgccttcctttgtttctgtttcatttgtgtttgttttcttccccagagtctggctcggtcgcccaggtggggcgtgcagcgggcggatctcgggctcatggaaccctctggcctctggggtacaaggcgattctccggcctcagcctcccaaagtagctgggattacagggagtacacacaacgccccattaattacgagcatccggaaggggcgcggttcaccccagaaggccagcgtggatatggaccccgtgaccgcacaaatagcagtggccccctcgggctccaaacggctggaccacagggcatagaccctgggccagcaccaggtctactattcccacaaacatgggatgcggacccctggccggctggttggcacagagaaccgtaccctcaatttcaactcgcagagaagacacgaaacgcagcacann

SEQ ID NO: 24956 - DNA, 340 bp, Homo sapiens
tctggactctaccacttgggtctccagattttctgttacgtccttgtgggtcaggatatttctggaagtcactccgtgaggctggtaatcctcagacccagcttctggtcgactctggaatggactgaagctgggcaggatgatgagagccagggaaaaaagaagaatcaaaacacaagtgctggtctgggcagctttgttggaagtttgagcaattagcgtctgcagctgacggacctgagctaccaagaagatgttgtgcctcaccagatccaggaccgcattagctctcagacccacagactggttttgcaacgcttacaccgactagccaggaagt

SEQ ID NO: 24957 - DNA, 4802 bp, Homo sapiens
  misc_feature 1, 2: n = A,T,C or G
nnagtttcgagcccgctgccctttgcctcctgggcggagaagctgcttcctcctgggaacaaccgcctcccgctcctagcaggttgctactgccccgaacccgcgctgcagggaacagcggggcaaacagtgagtggggttcagcgtagactctggaccaggagaggcccgcggtgaccgaggcctgggccccggaaaccaatagagccatggcgactccctctgctgccttcgaggcccttatgaatggtgtgacaagctgggatgtacccgaagatgctgttccatgtgaactgcttcttattggagaggcttcatttcctgtgatggtgaatgacatgggccaggtcctcattgctgcctcctcctatggccgtggccgcctggtggtcgtgtcccatgaggactacttggtggaagcccagctcacgccctttctcctgaacgcagtggggtggctttgctcttcccctggggctcccattggtgtacacccatccctggcacctttggccaaaatcctcgagggctctggagtggatgcaaaggttgagccagaagtgaaagactccctgggggtttactgtattgatgcctacaatgaaaccatgacagaaaagctggtcaagttcatgaaatgtggtggcggcttgctcataggaggacaagcctgggattgggccaaccagggggaggatgaaagggttctgttcacgttccctgggaacctcgtgaccagtgtggctggcatttactttactgacaacaaaggggacacgagtttctttaaagtctccaagaagatgcccaagatcccagtgttggttagttgtgaagatgacctctccgacgacagagaagagcttctgcatgggatttcagagctggacatcagcaactcggattgtttcccatcccagctgctagtgcatggggctttagcctttcctctagggttagattcctaccatggctgtgttatagcggctgcccgctatggccggggccgggtggttgtgactggccataaggtattattcactgttggtaaactgggcccctttctgctcaatgctgtccgctggctggatgggggccgcagaggcaagattgtggtgcagacagagctgagaaccctgagtggcctcctcgcagtggggggcatagacaccagcatcgagcccaatctgaccagtgatgcaagtgtctactgctttgaacccgtgagtgaagtgggggtcaaggaactgcaggagtttgtagcagagggtggcgggctatttgttggagcccaagcctggtggtgggccttcaagaaccccggagtgtcccctttggctcgattcccaggaaacctcctcctcaacccctttggcatcagcattacaagccaaagcctcaatccagggccctttcgtactcctaaagcagggataaggacctatcacttccgctccaccttggccgagttccaggttataatgggcaggaagagaggaaatgtggaaaagggctggttggcaaagctgggaccagatggtgcagctttcctgcagattcccgcagaagagatccctgcctacatgtctgtgcatcgactcctgaggaagctgctaagtcgatatcggcttccagtagcaacccgagagaaccctgttatcaatgactgctgcagaggtgctatgctttccctggccacagggctggcccactctggaagcgacctctctctgttagtcccagaaattgaagatatgtacagcagcccctatctgcgcccctcagaatctcctatcaccgtcgaggtcaactgcaccaatccaggcaccagatattgctggatgagtactgggctctacatacctggaaggcaaattatagaagtctcactgcctgaagctgctgcctctgccgacctgaagatacagattggctgccacacagatgacctgaccagggccagcaagcttttccgaggcccactcgtaattaaccggtgctgcttggacaaacccacaaaatcgatcacgtgcctctggggtggactcctctatataattgtgcctcagaacagcaaactgggttctgtgcctgtcaccgtgaagggggctgtgcatgctccatactacaagctgggggagaccaccctggaggagtggaagaggcgtatccaggagaatccagggccctggggagagctggccacggacaacatcattctgaccgtgccgaccgcaaatcttcgtactctggagaaccctgagccgctgctccgcctctgggatgaggtgatgcaggctgtggcgcgactgggagctgagcccttccctttgcgcctgcctcagaggattgttgccgacgtgcagatctcagtgggctggatgcatgcagggtaccccatcatgtgccatctggagtcagtgcaggagctcatcaacgagaagctcatcagaaccaaggggctgtggggccccgtccatgagctgggccgcaaccagcagcggcaggagtgggagttcccaccacacaccaccgaggccacctgcaacctgtggtgtgtgtatgtgcatgagacggtcttgggcattcctcgaagccgtgccaatattgctctgtggcccccagttcgggagaagagagtcagaatctacctgagcaagggtcccaatgtgaaaaactggaatgcatggaccgcactggaaacgtatttacagctccaggaagcctttggttgggagccattcatccgtctcttcaccgagtacaggaaccagaccaacttgcccacagaaaatgttgacaaaatgaatctgtgggtcaagatgttctcccaccaagtgcagaagaacctggctccgttctttgaggcctgggcctggcccatccagaaggaagtggctaccagcctggcctatctgcctgaatggaaggaaaatattatgaaattgtacctcctcacacagatgccccactgaaattgaagtcaagaaatgcaaaaaggaactgacacatctcagcaaagaaaactgaagggatttggttataagtggagaggatctcagcatatttctggaagatagaaagtggatgaagcatgataatgaaagagtgaagaacctttcagataaaatgtaagctgatctgaacaacataaccccaaagagacttgcgcacctgaaaagcttgtctactgaagaattactccagttgtaagattgagccctctcctactctcccccaactcttatgcacagaacacaggcagtctccactattgataccagttaaaaatttcttgttattgttgctgttgttgtttgtataaaggaattgaacaggctgcttgcagagagataagagttggtgctccagaaaaaaatttctcttctagtggaaataagtgcccctacccccagccggtcagctaattctctactgacagctgagacctcctactcaagtgcctgttgccttcaggtatagaagaggtttcctgaagaaacagacctaactgtacaacagcagaggaaacccatgccaactgttatacaagttaacagttatgttgattcttaaatgggaatggtgagttagaaattcccagacatgggcgatggggagggaagaggaataagaaaagtcacgaggtagaattaggggccttgaaaatatgacaaactctgagggaaacaaagacaatgtggaaagaataacttaattttaattccatctccagagagatttgaggtgtatttaagatgaaaaacaggatactacaaagaaacggaaaactcaggagttcaagaccagcctaggcaagatggcaacatcccgtctctacaaaataatttttaaaaattagccaagcatggtggcatgtgcctgtggtcctagctacttgggaggctgaagtgggaagatcacttgagcccaggagttcaaggcttcagtgagccatgatggtgccactgcactccagcctgggggacagagtgagaccctgtctcttaaaaagcaagaaaagaaagagaagactgagaataagaagatctctttgaaaataaaataagactgctaaaagtatttggtatacagtctggaaaataaagttgagggaatctctccagataaagagcaaaaagaaatagatagaaaaatataaagaaagaaaaaagacatagacaatcaatatgtaatgttaggagttcctggaagagagaacagagacagtgtaggtgaagaaataaaaagaaaaagaattgaagaacagagcaagctaagtctccagattgagagggcccaatacaatctacatctagacacaatattgtaaaattttggaatattaaggatagaaggaagatattaaagtggccagggagaaaacaaatgaggtcatcacgattagctcaacacaaaaatggatgagaaatagactgctaacagatttgtcatcagcaacactgaatgccagaagtcaatggatcaacatcttcagagcttaaggaaaatttttgtacctagaatttcatagtaaggcagactgtcaagaagaacatcaaagtgaagacattttctgtcaggcaaattttcagaaagtctcctttgcacccttactgaggaagtatcttgaggaaattctccagcaaaatgaggatgaaaaccgggaaaagaaaaaaaaaacaaagatggggcgcgcgcccaaaaagataaacattgggggcgagcccaagaagaacgcacgcggccagcacggcgaaagggggcaccaaaacggggcgggtgcaacaggcgcgcggaaa

SEQ ID NO: 24958 - DNA, 531 bp, Homo sapiens
  misc_feature 1, 2, 3: n = A,T,C or G
nnnatgttacatacaagaaatttattaggagaaacacctgggaagcataaaggggagggtgccaggagagcttcagagtatgccaggagagcttcagtctgtgtcacaggtcttaaacctcttgtcagggcctggaacacactgtgctgtcccttggggaaagccctttaggaccatgatgcctttgaaaggtttttgtgtcattgtaaatgtctttaccttgaagattttctttcaaatgatggaactgccagctggtgtattgtagggtgcagagacgcataatccttgaatccctcatggccattgttgcttcatttcttgtgctagcaaactcttgatcacctcaccaggtagggctactgacttcctgaggaaagactcacagtccctttccaaccacaggcagaaaatggctttcagaggacgtgcttctaaaagtcctgttgccatgattatttggcccacctccgcggcagcgcattcgtcgaccctcttcgcggattctggcatctcttcactcccccgcgt

SEQ ID NO: 24959 - DNA, 2494 bp, Homo sapiens
  misc_feature 1, 2, 3, 2482, 2483, 2484, 2485, 2486, 2487, 2488, 2489,2490, 2491, 2492, 2493, 2494: n = A,T,C or G
nnncaccagtaacaggtggtcacaaggcatggtatggcgaagaaatgcagcgtatggatgttcctacctcttgtatttactttgtttacttcagctggattgaggatagtatacttcatatctggaggaagatgacaaaattttaccattaaattcagctgaaaggaaacctggtgtgaagcatgcaccatatataagcattgcaggtgatgatcctcctgcaagctgcgtgtttagtcaagttatgaacatggcagccttcctagcccttgtggtagctgttctgcgcttcatacaactgaaaccgaaggttttaaacccgtggctgaatattagtggattggtggctctgtgtctggcttccttcggaatgaccttacttggtaattttcagctcacaaatgatgaagaaatccataacgtcggaacttccttgacctttggatttggcacattgacctgctggatccaggctgcgctgacactcaaggtcaacatcaagaatgaaggacggagagttggaattccacgggttattctgtcggcatctatcactctctgtgtggtcctctacttcatcctcatggcccaaagcatccacatgtatgcagccagggtccagtggggcctggtcatgtgcttcctgtcttattttggcacctttgccgtggagttccggcattaccgctatgagattgtttgctctgagtaccaggagaatttcctaagcttctcagaaagcctgtcagaagcttctgaatatcagactgaccaggtgtaaaccatcagtttttccttgctggtgaggtgggtgtgacagtgggggaggggccagtaggacacactcacaggacttgacatagaacctcatttcacacacacacacacacacacattcatggccacatttgccaaatgagcttttcagggcgagttatttctttaatgaaaaagcacaagcccttatgtgtcgaaatacacgctgttacactgaaaatatatgcacgacagagcaagaagcttgtgcatgatcacttcttatccgtccccttcccagcactccctcctcttcccattctctccacatgtctcaagcaccctaccgagtagggcaggccaaatgttccttgggagtaatgccaactcccgacgttgccttcaggtccaaagggcttggaaccagctcgtgaggaagttctgaatctggcactaatattcttgagtggataatagtgtatcatagaataggacggaaattgtattgagatgtgaccctgtgtcgcctgtggaaaggcatagtgagaagaactttcccacgaaagcccccttcatcgttgttcagtggtcggctgtgtggatcccaggagagacatatgccacagactgtgagagcaaagcccgccgctgtgatctggacttgatgcactgtgactgagaatgatttccaaatgtgaatatgtgtagggacgtggtctatcaggcctggaacaagatgggggcagtgaaggtatggtttagtgtttgctttcatagtatgccatgtacaatgttttatatttcatagtttcttttaagtaactaccatgagtctctctaagcctcatggacaaagatgtagaccaaatgcaagagctgagcttgctttgggttcaaccatgatcaaagaaaaactgaggtcacctgcaggcttacgtgggaagctaagaaaatatcacagaaaaatggaaagaaatatggatgtgcagaggtaataaaaagagctgctgctggacatttatcaaagataggcaccttacagtatcttgttgcaagtccaaatcaggggagactttgttaatatgtatcttttgctcaaatttagtagggtttttttttttttggattaagggcttttcaaatttggaatttgtagaagccaattaaaagaatacccttcctaaaaaccaaattgacacagctggcccccctgctagccaacccgcagttcccagttcccacctgctgagagttcagaactcagaccgtaggtgtgggcttatgagactgtgcttcatgaagaaaagcagaattccaaattcaaactgttggagtgagccaagtggacagaccctccatgagtgcactttcttccaagaaatccccagatttaccccatagaggtctgggattacctggaatataatatgaaaaacattttttaggctgggtgtggggctcacacctgtaatcccagcactttgggaggctgaggcgggcggatcacctgaggttgggagctcgagaccagcctgaccaatgtgaagaaaccccgtctctactaaaaaaatacaaaattagcctggtgtggtggcgcatgcctgtaatcccggctactcaggaggcggaggcaggagaatcacttgaacccgggaggcaggttgcggtgagacgagatcacgccattgcactccagcctgggcaaaaagagctaaaaactccatcnnnnnnnnnnnnn

SEQ ID NO: 24960 - DNA, 1054 bp, Homo sapiens
  misc_feature 1, 2, 1053, 1054: n = A,T,C or G
nnccgcggactcgtgggtggctgtacagctcgatctaggttctgcggcacgggatggcggaggcgcctcctgtctcaggtacttttaaattcaatacagatgctgctgaattcattcctcaggagaaaaaaaattctggtctaaattgtgggactcaaaggagactagactctaataggattggtagaagaaattacagttcaccacctccctgtcacctttccaggcaggtcccttatgatgaaatctctgctgttcatcagcatagttatcatccgtcaggaagcaaacctaagagtcagcagacgtctttccagtcctctccttgtaataaatcgcccaagagccatggccttcagaatcaaccttggcagaaattgaggaatgagaagcaccatatcagagtcaagaaagcacagagtcttgctgagcagacctcagatacagctggattagagagctcgaccagatcagagagtgggacagacctcagagagcatagtccttctgagagtgagaaggaagttgtgggtgcagatcccaggggagcaaaaccaaaaaaagcaacacagtttgtatacagctatggtagaggaccaaaagtcaaggggaaactcaaatgtgaatggagtaaccgaacaactccaaaaccggaggatgctggacccgaaagtaccaaacctgtgggggttttccaccctgactcttcagaggcatcctctagaaaaggagtatcggatggggtatggagccagacgaaatgagcagagaagataccacagaaaaggcctcctgggaagtggagggggcagggcacgaacaggcagaaatcacaaacgagggcccgacatacaaagcgaacacgaaacacttgggcccatcaagggactcatgaagaccgaactcacgggagggacggggcccacagttccgggtgcccaaagcgggcggggaccacaaaaccttccggacaacggtaaggagccggtctgccacaaaagtcggggatgcccccggaataaagactccaagggaccacgacaacaccgaaann

SEQ ID NO: 24961 - DNA, 1103 bp, Homo sapiens
  misc_feature 1, 1100, 1101, 1102, 1103: n = A,T,C or G
ncctcctgaatgtgatgaatacggcaaagcctttaatcacatctcagcccttagcatcggaaagcttatactgtaaataaacttgatgaatattatatgtgaggaaaactttcatgtatagcactcattgcttcagacagaaaatgaattccgtcggtatgttccaatcgtgatgaatttgagaaacattgcaagagggagctcaatcttggccgggcgccgtggctcacgcctgtaatcgcagcactttgggaggccgaggcaggcggatcacgaggtcagtagttcgagaccagcctggccaacatggtgaaaccttgtctctactaaaaatacaaaaaaaaattagctgggcacagtggcgcacgcctgtagtcccagctactcgggaggctgaggcaggagaatggcttgaacctgcgaggcggaggttgcagtgagctaagatcatgccactggcactccagccttgagtgacagagcgaggctctgtatcaaaaaaaaaagttgcgggggggtgctcaatcttaactgcagaggatctacagatgaaaaaaaatgtggggaaatgctttaaaaaaatagcaaaatgtgcaacttcttacaaaaatggttaacgtcaggtactgtcgtatatattttatatgaccataatgtccgtgtgtgtttggtaccttcagatcccttgttatgttccgtatattacctgtaagcagatactgtattttattttagcctatttgacagaacacatcactcagaaaaagtgaagtttcagagcaaacagtgaaggaaatcagggtgattggtagacaaaaagtcggttcacagaacggagcagcggggagaggaagggaaaagcttcataagtttgggtgttatcacattcaagagatggtaaatttctgaggaaagacggtaatggggcactgaatggacaatctttaaagtgggctttgaatttctcaaacaagattgggactttgagtgcggtgaccgttgcagggaggtctttggagaaggtttccgagggatgatgtgatggcaggaggtcggcaggttaaggatggtccaattatttttaagagagggcgggcgannnn

SEQ ID NO: 24962 - DNA, 475 bp, Homo sapiens; identical to SEQ ID NO: 21297

SEQ ID NO: 24963 - DNA, 652 bp, Homo sapiens
  misc_feature 1, 2, 3, 4, 5, 6, 7, 8, 9, 10, 11, 12, 13, 14, 15, 16, 17,18, 19, 20, 21, 22, 23, 24, 25, 26, 27, 28, 29, 30, 31,32, 33, 34, 35, 36, 41, 42, 43, 135, 652: n = A,T,C or G
nnnnnnnnnnnnnnnnnnnnnnnnnnnnnnnnnnnnccccnnntggcaagtcaacctggtaaagcccaacctggaatcctttcatgtactcgtaaaaacctgggaaaaatgaatcccttcccacaatccttgcantaataaggtccaacccccgttgtgtgttatcatgtgtgtaagaacacttgttgtgggaaatgaaggctttcccacattcccttacatgcatagggtttctctccagtgtgagttctttcgtgtactcgaatagaactggaacaactgaaggctttcccacattgtttacattcatagggcttttctccagtgtgaatcctttcatgaactcgaagcgaactggaacaactaagagcttttccacattgcttacattcatagggtttttctccaatgtgagtccgctcatgtctttgaaagggctggtgatatatgaaggtttttccacattgtttacatttatagggtttttctccagtgtgactcctttcatgtctttgaaaggatttgagataactaaaggctttctcacactccttacatttatatggcttctcaaatagctcgtatccagtgtgagacctcatgtgtctagtaagggatgagagactctgtgaggctaaagaaggtagtccan

SEQ ID NO: 24964 - DNA, 863 bp, Homo sapiens
  misc_feature 863: n = A,T,C or G
actggggaatcacaggactctctccccgccctgtctagtggagacaggatagcttcttgatggccaggggtggtgtctccacctggaactggctggaaacattgtcacatgatcatctgaagcttgatggtctctaggtgacaggaaatgaatttggttaagagtttaacaaacatggtccaaaaaccaaggcaagtatagtcattactaatgggctggccagaggaaggagccatgaaccccaacttagcatttttgaccaggagccccatgactcagatagctgttgttgtattttagaggcccagttgggtagttcttgggtggcatttgttactaatcctcattgttcggcataaaaacagcattcttcctctagaaaaagacctaagcccccctttacagcagttaggagatctcatccccttctgttttgccaagcaactgctgctgaggcatctatttgatttcgtatggtgatgatactttggccaatgtctctattttttcttttttactttgggcaatgtcattcaagctttccataaaatccttggaaaagcattggtaataggatagggatgttacaacccggctgactcccattcccagtcccgcggttatttgtagtcctaccaaaagggatgtgagttggatggttcatttgtgtctggcaattgcagttaaaggtataatgagggattggttcttgggagctatattaatttcacaggctaaataaacaagtgtaaaggttctagtccaattggctggtaaacataagtaagaactagttccacacaggtaaaaggctcctagtttttcaagacaagaattttctatggtaaacatgtgggttagcn

SEQ ID NO: 24965 - DNA, 1643 bp, Homo sapiens; identical to SEQ ID NO: 21150
  misc_feature 1, 2, 3, 4, 1615, 1616, 1617, 1618, 1619, 1620, 1621, 1622,1623, 1624, 1625, 1626, 1627, 1628, 1629, 1630, 1631, 1632,1633, 1634, 1635, 1636, 1637, 1638, 1639, 1640, 1641, 1642,1643: n = A,T,C or G

SEQ ID NO: 24966 - DNA, 968 bp, Homo sapiens
  misc_feature 1, 2, 967, 968: n = A,T,C or G
nnaacatagttgtgtaatataatctttatttgcttacctgaccactttttattaagctgtttgtttaaaagctttggttataggcatgaatatgttttgatggttaacttcactgacttatctgtaagtgtcattttatagtactttacagttgtcaaaaaaaatcttacatatattgatctagttgatcggtagaggaagcttgtgaagtaggtaggacaggttatgatgtcttcactgtatggacgtgaacccagggttctaataggttggcttgcccaaggtcacctgctagcttgtaaggtaggaatagggctcaaagtaaaacttttggttcagaagcttgactcataaactatactatatattcccaaaaatgtcagtattgacaacacagtctaactcttaaataaaattatgctaattagttacattcaaaataatgtttataaatttatttgtctatactagtagaagtgatcagtgacatactataaataatcctaaatggttatatttgatagaattcataacacattaaagagaaaatttcacattaaaggaaggtttaaaaatctattttcagattataaaaggtgtctttactggttttcattccttttatctacatgtaattggacatgtaaacttgttaaaaatcaaaatcttactgattgtacagggagaaattaagcattctgttttaaaaattaggcttattgctagactgtaagtttaaaaacaattcatgttcaaaggagcttttcaaattacccagtccaccacagaatcagctaatgtgacgaagaaatttggcgtcaaatgcaaaacagggattttctgagtctgaagactaaaagggggagagtctcacgagcggagccacacattaactggacagcgtagagaggaacccccaatatgggatatatgaccaggaagactataccattttgtttaaaataann

SEQ ID NO: 24967 - DNA, 958 bp, Homo sapiens
  misc_feature 1, 2, 958: n = A,T,C or G
nngcacgatgcactccacctttactggctaaagggttgggccggaggacccccctttttttgcttgggagtagttactttatttattggagagaattaagatatgggaaatatgtggccaacggtaaattatggcgcaaacaattaaaatattagggactccaggagggaaaccccatacagtcagaaagctgccttactttctcagctgttacaccagagaactggtacatactaaatacttaaactacattaattgcttttgcgctcaacaaatttggtgaattagtaataaagacaaagtcccattcatttcaaaatccaagcaaacttcaaactcattcatgagatatttattaaaataacacatttagggaaaaaaatcaatacaatgtatacatcattactgaaaactgtataccatcatacaaaaaaggattttattttgggaaattgttttctaatttatggcaagttttactttcagaaataaaaccacaacaacacaatctaattcaatcttaaaggctggcatgctgagcaaggaatgttcttattctttgtaggagctccttctttacactgtcaggtaccagggctctgccttttggagtgatttcagccaccaagtcatcaacagtaacgtgttctagtcctttttctttaattacctctttacagtgtgccttcaactgatccttccagccacattcaattaatttagctctcagcaactctttgaggcgttctctttctccagtttctatcaacttttggttaatcgctgctctcatctgcgcatctttgttcatcttgctaaccaccatcaccgcgggcgagggccgtcccttcccagcgacgaaatgacccttgcgctgaggaccgttacctaccacactcttcggctgcccggacttagaccctcagtagctcgggcacctaagcacacagaaagctan

SEQ ID NO: 24968 - DNA, 2552 bp, Homo sapiens
  misc_feature 1, 2, 3, 4, 2547, 2548, 2549, 2550, 2551, 2552: n = A,T,C or G
nnnnggctcttggctctgcttgtcttctgcgggcggtcgcgcgctccgttcgctccgcgctcgttctctccagctgagtcgctggtctcccgtgcctcgcctctatccccttctcgcggctctgcgcagtgctggctcttgatgtgcagggcggtgtgttacgcggtcggtgtgcttcatgctattcgcgtgccgtctcctccggcgcctcctcgctgggacgctgcgcttggctagctcgcacctcgctattctcgctccttgcccctgtggtccgcgcggcgtccgtgtggctggtggggggtcgtgcgtctgcggatagtgtgtatgttatattattgattgtagttatgtatatctctatagtggatatgtagtaggttttattatgcgtcgttggtctgttatgttcactgtgtctatttgattgtttgtgttggtgtgtgtgagttgatggtctgtgctattggttggggtgtattagtgtgtttgtttgtttgttgcttatggttgtgcgtttgtgtctttgctgtcgcttgtctctgtgctgctgtccgctggtgtcgtgtgtctgctcgcccgttgtgctcttgtcttcttctcgctgtttttcttgtgtcttcttctgtcttctccccttctgttggcggtgctcgcttgtgcttctgccgcttctctctcttcggcccctctccttgtctcttattcattctctagctgcactctctctttgtcgcgttctgctctcctgtctgtgttgcttcgttctgccgcccttgagtgcttctcttctctcgcttccgccgtttcttgtcttctcgtctcgctgtccgcgtctgcggctcttcctgctcgcgtgcttccaatactctcacttccttctctccagtcttcttttattgtcttgtgcattcctctgctcctgcgtcctgtgatcgacctcgctcgactgtggcttcgttcagctccgctgctccgcctctctcgctcgcactctctcgcttcttcgctctcgcgatctgtgctgcccccggtctggtccatctctgtccgtctgtgttgtttgtgtgtggtgtgcgtgtgttgtgtgttttctgttctgtgggtgctttgctgtggttttgtgttgtctgtttctctgttgttgttatgtgtgtgtgtgtgtgtttcgtttggctctgcgtcgtgtcttgtctctcgtttgtttgggtgttctttgctttgtttgcttggtgttttttgtgttgtttggttctccgctgttgttatcgtggctaccatgtcaagtcgtctaccctgattgtatcatacaacattccactttatgctaacacctatgaactccgagtgatcccacaacgtttgtactaactaactctatggcttgcgtaaatcgccggcgccagtaacctattgaccggtccttaagtttagtctagtcctttcgctcgtcgaacttcgggcaccgagtgtagtacggtgccaggaaccaccgtgggttgggggtaagcttgatgtcgctagcgctgagaccaagggctaaagctgggagactgaaaaaatgcagaccgccggggcattattcatttctccagctctgatccgctgttgtaccaggggtctaatcaggcctgtgtctgcctccttcttgaatagcccagtgaattcatctaaacagccttcctacagcaacttcccactccaggtggccagacgggagttccagaccagtgttgtctcccgggacattgacacagcagccaagtttattggtgctggggcagccacagttggtgtggctggttcaggggctggcattggaaccgtgtttggcagcttgatcattggctatgccaggaacccgtctctcaagcagcagctcttctcctatgccattcttggctttgccctgtctgaggccatggggcttttctgtttgatggtcgccttcctcatcctcttcgccatgtgaggctccatggggggtcaccggcctgttgctactgcaactccacaccattcttggtgctggggtgtgttaagctttaccattaaacacaacgtttctccaaaaaaaaaaaaaaagaagaaagaaaaaaacttttccgcgccacaatgggacccgagaaacttttcacacaatccgtgtgggcggcgcgacccaatggcatagagacagtggacaagcgtaccaaggaaatcggcacgacagcggcggctttccacaataaaagtccgggcgcacacggcggcttgacaacccaaagggagcgctggaagaagctgaggcggtcactacacacccgaccacagcataaaagtccaacacgcgcaccaggagatggaaggggaaacaagcagaaggacagacccacgagccaacaaagcagcacaaacaacaacaaacaagaccaaacgagtacaagacagcatgcagacgaagcagaaaaaaaaaacacacaaggagagacacacaactgcaggcaacagaatcagagcgacagagaagacagtaacgaagcagcacaaacaagaaacagcagatannnnnn

SEQ ID NO: 24969 - DNA, 618 bp, Homo sapiens
  misc_feature 1, 616, 617, 618: n = A,T,C or G
ncatttgtctacacacatgagagaaaaatctttccaatgtaatgagagtggcaaatcctttaattatagctaactcttaaggaaatatcagataatccatttaggatagaaacaatataaatgtgaggtatgtgacaaggtctttaatcagattgattccttgtatgccataatagatgtcacactggtaagaaaccttacagttgttatgagtgtggcaagaccttcagtcagacgtcatcctttacatgctatcgtagacttcatactggagggaaaccttacaagtgtagtgagcataacaagacctttggttgaaattcagcccttgtaattcataaggcaattcatactggagagaatccttgcaagtgtaatgaatgtggcaaggtttttaatcagaaagcacaccttgcacgtcatcatagacttcatactagagagaagccttacaaatgtgaagaatgtgaaaaagttttcagtcgcaaatcacatcttgaaagacaaaacttaaaagaggtggcgttgcccttgtttttgagaatgccctactgtgtaagtggtagtgttctttcttttttttttttttggaaaggggttttcccttgaccaaccnnn

SEQ ID NO: 24970 - DNA, 2670 bp, Homo sapiens; identical to SEQ ID NO: 24256
  misc_feature 1, 2, 3, 4, 5, 6, 7, 8, 9, 10, 11, 12, 13, 14, 15, 16, 17,18, 19, 20, 21, 22, 23, 24, 2643, 2659, 2660, 2661, 2662,2663, 2664, 2665, 2666, 2667, 2668, 2669, 2670: n = A,T,C or G

SEQ ID NO: 24971 - DNA, 1301 bp, Homo sapiens
  misc_feature 1, 2, 3, 4, 5, 6, 1301: n = A,T,C or G
nnnnnnaaatcatttttatctcagaacttaaacaaaaattagatgtcgtgcacggactgtgtgaaagaagatgctttgcatatttgctgcactgcatcagtatcttactaaaaatgtgaaatgaaaggactattgtacactgaaatgcttaaatgtatctgaaagcacaaggtgatactcatttttatggtcttcccatttgtgctggtttttgcctcttgaatcgtcatcagattaagggtgagaagtgaatgtaacaggtataaataacatttttaaaaacaataactttgctataatcacagttgttccagagcactgtcagatacattctaatgaccagaactggtttaaaaaaagaaaatacaaccatgggaaagaaatcttaaatgaaaaacgcatctcattgtaggcatttttgcctcatattttactgggccatgtttgtttcctggtactcatgtattttttttttccagatctctttccccaagttgctattgtaagagtattctgctgcgtgtggatgcagttatacacattaaagcagatctggagtctgaagtagctataaagcagctataaaacagaaatacatgcatagctgcagaaaccatgataggtagaggacttttcttttggttttgttttgttttgttttgttttgtttttggttttacagagaagagatttttattacaaagaaaaaaattccagtgaattgtgcagaaatgctggtttttacaccatcctaaagaaaaactttacaagggtgttttggagtagaaaaaaggttataaagttggaatcttaaattgtaaaattaaccattgagtgtcaaagttctaaaagcagaactcattttgtgcaatgaacataaggaaagactactgtataggttttttttttttctccttttaaatgaagaaaagctttgcttaagggttgcatacttttattggagtaaatctgaatgatcctactcctttggagtaaaactagtgcttaccagtttccaattgtatttagcttctggttggaatttgaaaaaaaaagaaaaaaagaaaaagaaaacctaaataaaataggtgaaagttccctgactattcaggtgaatacacaaaataaaaagagtaaccttaaactccatcctgggtcggccctaaaatttcagcggcactgattcacacaaacaaaaatgtcgccgccagacaacacgcgggcaaggaatgagctcgacgcgatggccaaacgggctgcagtgtgcacgcacgcgcgaagagcgcaacacacgccgagcn

SEQ ID NO: 24972 - DNA, 716 bp, Homo sapiens
  misc_feature 697, 698, 699, 700, 701, 702, 703, 704, 705, 706, 707, 708,709, 710, 711, 712, 713, 714, 715, 716: n = A,T,C or G
acacagctggcaccagagcatcacagagagccctgtgagccaaaaagtatagttttggaacttaaccttggagtgagagcccagggacaggtccctggaaaccaaagaaaaatcgcatttcaaccctttgagtgcctcattccactgaatatttaaattttcctcttaaatggtaaactgacttattgcaatcccaagacccatcaatatcagtatttttttcctccctatacagtgccctgcccacccttatctgcacccacctcccctgaaaaagagagaaaaaaaaaaacctggttttgctttccatgtataattcaacgacacaaaatgggaccatgtcagaatctgtatgatcctattctgtgttagctccaatcagccagctgagagccatcctaaatattaataggatgagagagtaactcctaactgtgcataaattacagccttaagaaagaaggccacccggtctctggggacatgttttgggagggtgtggctgcctcatatagcctacctttgctttaatcagcattttatcagtcaactctgggattaatgaacatatccgactttatgggtatgtgtatattcagtgccagtaccacctcccaggctaatgtgttaacagtgttttctatgattctaaacttgttttctttgtatttctaagaaatacaactaggccctaacnnnnnnnnnnnnnnnnnnnn

SEQ ID NO: 24973 - DNA, 1842 bp, Homo sapiens
  misc_feature 1841, 1842: n = A,T,C or G
cgcgccgttcgaccaagtaacgctgattgggtgagtgttgaagcgggggagggagctgccggaagtacatccgggggagcggaactgcaagaggaaaggctcgggtaggcttctgggagcgaccgctccgctcgtctcgttggttccggaggtcgctgcggcggtgggaaatgctggcgcgcgcggcgcggggcactggggcccttttgctgagggtgagagcgaggcaacctttccagagggtcaggacagagattacctgggttctccgctggaaaagagcgaaattccaacttttggagaggactggggtcagaggtcatggtccccatgtgattctccgaggatcctgagggtcgtggtttatggagatgccttcaggaccgaggggcggcgtgtctggccagatgggatctctgctcaccctcttctttccttcagggctctctactggcttctggccgcgctccgcgccgtcgccttctgcgagcgaccggctccgctcgtctcgttggttccggaggtcgctgcggcggtgggaaatgctggcgcgcgcggcgcggggcactggggcccttttgctgaggggctctctactggcttctggccgcgctccgcgccgcgcctcctctggattgccccgaaacaccgtggtactgttcgtgccgcagcaggaggcctgggtggtggagcgaatgggccgattccaccggatcctggagcctggtttgaacatcctcatccctgtgttagaccggatccgatatgtgcagagtctcaaggaaattgtcatcaacgtgcctgagcagtcggctgtgactctcgacaatgtaactctgcaaatcgatggagtcctttacctgcgcatcatggacccttacaaggcaagctacggtgtggaggaccctgagtatgccgtcacccagctagctcaaacaaccatgagatcagagctcggcaaactctctctggacaaagtcttccgggaacgggagtccctgaatgccagcattgtggatgccatcaaccaagctgctgactgctggggtatccgctgcctccgttatgagatcaaggatatccatgtgccaccccgggtgaaagagtctatgcagatgcaggtggaggcagagcggcggaaacgggccacagttctagagtctgaggggacccgagagtcggccatcaatgtggcagaagggaagaaacaggcccagatcctggcctccgaagcagaaaaggctgaacagataaatcaggcagcaggagaggccagtgcagttctggcgaaggccaaggctaaagctgaagctattcgaatcctggctgcagctctgacacaacataatggagatgcagcagcttcactgactgtggccgagcagtatgtcagcgcgttctccaaactggccaaggactccaacactatcctactgccctccaaccctggcgatgtcaccagcatggtggctcaggccatgggtgtatatggagccctcaccaaagccccagtgccagggactccagactcactctccagtgggagcagcagagatgtccagggtacagatgcaagtcttgatgaggaacttgatcgagtcaagatgagttagtggagctgggcttggccagggagtctggggacaaggaagcagattttcctgattctggctctagcttccctgccaagattttggtttttatttttttatttgaactttagtcgtgtaataaactcaccagtggcaaaccaaaaaaaataaataacaaaaaaacctggggccaaatcgcgggggcgcacaaaggttcgacacgggccctggccaaggggtcccggaccnn

SEQ ID NO: 24974 - DNA, 3621 bp, Homo sapiens
  misc_feature 1, 2, 3, 4, 5, 6, 7, 8, 9, 10, 11, 12, 13, 14, 15, 16, 17,18, 19, 20, 21, 22: n = A,T,C or G
nnnnnnnnnnnnnnnnnnnnnnctcccagtcacgcacctgtccataaatatgatttattgtacatttcacattgtattttcacattataagttaaattattttccacctttcattaaagtttttttagggttttttgtttattgtggtaaaaatacatataaattttccattttaaagtgtacagttcagtggcattaagtacagtcacaatattgtgcagtcactagcattgtccatttctggagctttaccaaggcgatgaaaacttttagaaaggttaatagttacaagtaagtaggctggacttcactgatgatgagctaggatctgaaattaaatgacagaaaattcaacttgacacagtcccagaagccaagctcatttccctcactctaacttccaggcctaagatggcattaaagttaaaggattcagggctctctccaagcatagttcagttaatagagttgaaaaataaaagtataggcccttggttggggagatcctggtttccccttctcagcccatgaaggagctgttgcttacagtagaaccaagcttctggaaggaagagagcagtgtggcagagggtgtgtctgtgtgtataggcagtatgctaacaggagacttgagggtaagaaatctagaggctgtctttggttctgtttttaggtctttttcatttaactttgacctaagttccttaatttaggaaatgatagctttccacttgacagtctttgaagtctcttccaattttaatatccagatttagagtatgaacatagcttttcttcctgattccagagtttcctgcagacttgtggtcttactgaaggccctcttgaaacctgatttgtgatgtagcaagggatccaaaccttacacctgagtctgttaagagcgccctgctacaggaggccacagactgcctgattctcctggaccgctgttctcaaggacgggtaaaggtaaggcagactgaaacttggtttcagttgggcctcattatccttatgtaattcccatgattgattataatttactatgtatgtgcctgaccaagtctggaaatgaacatggagggttttagatctccatatgagccctctagcctcaaaagagcttgatcttttttcttattcatcttttaaagctattcagaaccatttagaactaaaggcaggaggatcagcacatgtcactggggctaaggacgagacagtatgggcaaaagcattatgatcaaaagtttgtaaaatttaagttctgttctagtcttctgaattaaaaaaaaaaagtaaaaataatgggctataagctcccaggaataataacataaatagagcatttcagatgtttccagttttttagggacaaccatcttttaggtagatgtttttccctattcttaatttatctacatggaaattcttcctttggtttcatattccacaaaagttaacttctcaaagccacagcatataatagctgtgtacttctatgtatttaataaactactgcctcatttcttaccccttttagaaatctttagttgaagattgaaggtagcatgaaaagaaattcatgccataagtcactggacaatctacccagcaggaaaaaaaaattcatatcctaaaaatatgtagagatagtatgaattgttattttaccagtttattcaaactatttcatcttagctctttaatcttgggcagttttcaagccctagatccaactgaatttgccttggctggaattctgctgtttcatgagccagcaggagatttgcaagtacattaacacagtttttaaagtagcaccttcaatacatgagagctatataaatttaaaaataataaaaaaccaactaatacctattctgcttagtgacctgtccctaagtgtcatccattctttcctcctttgaatatgataccaaggaagaagaatcaagcaaaaggggaaagtaattaaaaaaaaaaaaatatcaaagcctgtttggtttcatgtttcagggtctcctggccaaaattccccaaagctgtgaagacagaaaagtggtgaactatatcagaaaagtgcagcaggtttctgaaggcgcaccctacaatggaacttaagacttgtattactttcccaagaggaaaggattttcttcccatcccaatttgtatgaatggagttatttaagaaaaaaagatatttttacacgaaactttgtaagtgaaagctgctttttccttccttctttccttttacctccataagaatagggaaagtagaacaagaaaaaattgaactccttccatttctaaataaagtttgggagaaaaaaggacaccaagtaatgtagcatttaaaatttagaaatatttacatccgtcatctcatcccagattcaagaactcatctgttaagtttctcgggcacaagctgttacttcaacacatatgctataaaaacactcttgttcacaacttagctttcttcactcactccagatttcttgccccactgacgtggcataaataataaaaacacaaatattgtgttcagtacaacacaaaagagcaaaaactggaggtgtgtatgtgtttaagataaaaaaaaaaaaaaaacagttctgcatgttcagtcctgggtataaatgctgaaagggaaatcacgtggttttggctttggccacgggctctgtctcctgctcgtattctatttccacataggctcgttttctctgcagtggtcctctcaagggcattttgcctttgtgtttcgcactaagggccttttcttcctcctcctcactggaggatttaccatcctgatcttcatcactgctggcatccagtttatccatatcctcaaaatcacttatgtcactctcatctacctcaccatcttcgacaaattctcttttccccacatcttcctcatcatcatcatcatcatctttttcctcagtatctgaagagtcactctctgcctcctgttgttccagggctttgtcgaaggcatgaatggggaagttgtagatgtcgccatacgtatcttgtttcagtctctccagtaattccttctcaatggcattgtccagctgagcagctattaatgccttttcctctcttcttttctccctacgctccaccttcttactcaaaggaacaagtttcctctgtcgctttagtgtaagttttctaattcgaattaggtattgggtgatcttggtgaatctctgcttacatttgtgtcgaatgaaacggggccagtaaatcagattttcatctatttgctccagtgctttctcatagtttttactaagccggacccgttcccagagacgccgaggaaaagccgctcgttctataaccttcatatacaagtagcactgtcctttctcttctttaatagtggcatactgactatttgccaggggacaggatgaccgattacacagtccagtcaggctatattcatttcggcagaagctctgagtcttggttcttattttgaaggaacaaaattgcttgtttcctagtgtatcccagataacatcatccgactgcatggtgtccgcggctcagcgcccacgcgtccgcggacgcgtgggtgactcc

SEQ ID NO: 24975 - DNA, 7290 bp, Homo sapiens
  misc_feature 1, 2, 3, 7288, 7289, 7290: n = A,T,C or G
nnnctcagagacaacgtgaagacggataagcaggcatcaggagcagagtggcctctcaggtctttttggaagtggatatctactcagacagtaagaattataagagctgtaagagctcattttggaggaatattggatgaaccatctcccttggcccaacctctggagctgaaccagcactctcgattcataataggttctgtgtcagaagataactcagaggatgagatcagcaacctggtgaagctggacctactggaggagaaggagggctccttgtcacctgcttctgttggctcagatacactctctgatttggggatctctgccctacaggatggcttggccttgcacataaggtccagctggtctggcttgcacctagtaaagcagggcggagacagaaagaaaatagattctcaacgagatttcactgtggcttctccagcagaatttgttactcgctttgggggaaataaagtgattgagaaggttctcatcgctaacaatggcattgcagcagtgaaatgcatgcggtctatccgtaggtggtcttatgaaatgtttcgaaatgaacgtgcaattagattcgttgtcatggtcacacctgaagaccttaaagccaatgcagaatacattaagatggcagatcactatgtgccggtgcctggaggagcaaacaacaacaactatgcaaatgtggaattaattcttgatattgctaaaaggatcccagtgcaagcagtgtgggctggctggggtcatgcttctgagaatcccaaactaccggaacttctcttgaaaaatggcattgccttcatgggtcctccaaaccaggccatgtgggctttaggggataagattgcatcttccatagtggctcaaactgcaggtatcccaactcttccctggagcggcagtggtcttcgtgtggactggcaggaaaatgatttttcaaaacgtatcttaaatgttccccaggagctatatgaaaaaggttatgtgaaagatgtggatgatgggctacaggcagctgaggaagttggatatccagtaatgatcaaggcctcagagggaggaggagggaagggaattagaaaagtcaacaatgcagatgacttccctaatctcttcagacaggttcaagctgaagttcctggatctcccatatttgtgatgagactagccaaacaatctcgtcatctggaggtgcagatcttagcggaccaatatggcaatgctatctctttgtttggtcgtgattgctctgtacaacgcaggcatcagaagattattgaagaagcacctgctactattgctactccagcagtatttgaacacatggaacagtgtgcggtgaaacttgccaaaatggtgggttatgtgagtgctgggactgtggaatacctgtacagccaggatggcagcttctactttctagaattgaaccctcggctacaggttgaacaaccttgtacagagatggtggctgatgtcaatctccccgcagcacagctccagattgccatggggattcctctatatagaatcaaggatatccgtatgatgtatggggtatctccttggggtgattctcccattgattttgaaaattctgctcacgttccttgtccaaggggccatgttattgctgctcggatcactagtgaaaatccagatgagggttttaagcccagctcaggaacagttcaggagctaaatttccgcagcaataagaatgtttggggatatttcagtgttgctgctgcagggggacttcatgaatttgctggttctcagtttggtcactgcttttcttggggagaaaacagagaagaagcaatttcaaacatggtggtggcattgaaggagctgtctattcggggtgactttcgaactacagttgaatacctgatcaaattgttagagactgaaagctttcaaatgaacagaattgatactggctggctggacagactgatagcagaaaaagtacgggctgagcgtcctgacaccatgttgggggttgtgtgtggtgccctccacgtcggagatgtgagcctgcgaaatagcgtctctaacttccttcactccttagaaaggggtcaagtccttccggctcatacacttctgaatacagtagatgttgaacttatctatgagggagtcaagtatgtacttaaggtgactcgacagtcccccaactcctatgtggtgatcatgaatggctcatgtgtagaagtagatgtacatcggctgagtgacggtggactgctcttgtcctatgatggcagcagttacaccacgtatatgaaggaggaagtagacagatatcgcatcacaattggcaataaaacctgtgtgtttgagaaggaaaatgacccatcggtgatgcgctcaccttctgctgggaagttaatccagtacattgtagaagatggaggtcatgtgtttgccggccagtgctatgcagagattgaggtaatgaagatggtaatgactttgacagctgtggagtctggctgtatccattacgtcaagcgtcctggagcagctcttgaccctggctgtgtactcgccaaaatgcaactggacaaccccagcaaggttcagcaggctgaacttcacacaggtagtctgccacggatccagagcaccgctctccgaggcgagaaactccatcgagtgttccattatgtcctggataatctggtcaatgtaatgaatggatactgccttccagatcctttctttagcagcaaggtaaaagactgggtagagcgattgatgaaaaccctcagagatccctccctgcctctcctagaattgcaagatattatgaccagtgtgtctggccgcattccccccaatgtggagaagtctatcaagaaggaaatggctcagtatgctagcaacatcacatcagtcctctgtcagtttcccagccagcagattgcaaacatcctagatagccatgcagctacattgaaccggaaatctgaacgggaagtcttctttatgaatactcagagcattgtccagctggtacagaggtaccgaagtggcatccgaggccacatgaaggctgtggtgatggatctgctccggcagtacctgcgagtagagacacaattccagaatggtcactatgacaaatgtgtattcgcccttcgagaagagaataagagtgacatgaacactgtactgaactacatcttctctcacgctcaagtcaccaagaagaatcttctggtcacaatgcttattgatcagttgtgtggccgggaccctactctaactgatgagctgctgagtattctcacagagctaactcaactcagtaagaccaccaatgccaaagtagcacttcgagcacgccaggttcttattgcctcccatttgccatcatatgacgttcgccataaccaagtagagtctatcttcctatcagctattgacatgtatggacatcaattttgcattgagaacctgcagaaactcatcctatcagaaacatctatttttgatgtcctaccaaacttcttctatcacagcaaccaagtagtgaggatggcagctctggaggtgtacgttcgaagggcttatattgcctatgaacttaacagcgtacaacaccgccagcttaaggacaacacctgcgtggtggaattccagttcatgctgcccacatctcatccaaacagagggaacatccctacgctaaacagaatgtccttctcctccaacctcaaccactatggcatgacccatgtagctagtgtcagcgatgttctgttggacaacgccttcacaccaccttgtcaacgcatgggcggaatggtctcttttcggacttttgaagattttgtcaggatctttgatgaagtaatgggctgcttctgtgactccccaccccagagtcccacattccctgaggcaggtcacacgtctctttatgatgaggataaggttcccagggatgaaccaattcacattctcaatgtggctatcaagactgacggtgatattgaggatgacaggctggcagctatgttcagagaattcacccagcaaaataaagctaccctggctgaccatgggatccggcgcctgactttcctggttgcacaaaaggatttcagaaagcaggtcaactatgaggtggatcggagatttcatagagaattccctaaattttttacattccgagcaagggataagtttgaggaggatcgtatctatcgtcatctggagcctgctctggctttccagttagagctgaaccggatgagaaattttgacctcactgccattccatgtgctaatcacaagatgcacctgtatctcggggcagccaaggtggaagtgggcacagaagtgacagactacaggttctttgttcgtgcaatcatcaggcattctgatctggtcaccaaggaagcttcttttgaatatctgcaaaatgaaggggagcggctactcctggaagccatggatgagttggaagttgcttttaacaatacaaatgtccgcactgactgtaaccacatcttcctcaactttgtgcccacggttatcatggacccatcaaagattgaggaatccgtgcggagcatggtaatgcggtatggaagtcgcctgtggaaattgcgcgtcctccaggcagaactgaaaatcaacattcgcctgacgccaactggaaaagcaattcccatccgcctcttcctgacaaacgagtctggctattacttggatatcagcctatacaaggaagtgactgactccaggacagcacagatcatgtttcaggcatatggagacaagcagggaccactgcatggaatgttaatcaatactccatatgtgaccaaagacctgctgcaatcaaagaggttccaggcacaatccttagggacaacgtacatatatgatatcccagagatgtttcggcagtccctgatcaaactctgggagtctatgtcaactcaagcatttcttccatctccccctctgccttctgacatgctgacttacactgaactggtactggatgatcaaggtcagctggtccacatgaacaggcttccaggaggaaatgagattggcatggtagcttggaaaatgagccttaaaagtcctgaatatccagaaggccgagatgttattgttattggcaatgacatcacataccgaattgggtcctttgggcctcaagaggatttgttatttctcagagcttccgaacttgctagggcagaaggtattccacgcatctatgtatcagccaacagtggagcaagaatcggactggcagaagaaattcgccatatgtttcatgtggcctgggtagatcctgaggatccttacaagggatacaggtatttatatctgactcctcaagattataagagagtcggtgctctcaactctgtccattgtgaacacgtggaagatgaaggagaatccaggtacaagataacagatattattgggaaagaagagggaattggacccgagaaccttcgaggttctggaatgatcgctggagaatcctcattggcctataatgagatcattaccatcagcctggtgacgtcccgggccattgggattggggcttaccttgtccggctgggacagagaaccatccaggttgagaattctcacttgattctaacaggagctggagccctcaacaaagtcctcgggcgggaagtgtacacctccaataaccagctggggggcatccagattatgcacaacaatggggtgacccactgcactgtgtgtgatgactttgaaggggttttcactgtcctgcactggctgtcttacatgcccaagagcgtgcacagttcagttcctcttctgaactcaaaggatcctatagacagaatcatcgagtttgttcccacaaagaccccatacgatcctcgatggatgctagcaggccgtcctcacccaacccaaaaaggtcagtggttgagtggcttttttgactatggatctttctcagagattatgcagccctgggcacagactgtggtggttggtagagccaggctaggaggaatacctgtgggagttgttgctgtagaaacccgaacagtagaactaagtgtaccagctgatccagcaaacctggattctgaagccaagataatccagcaggctggccaggtttggttcccagattctgcgtttaagacgtatcaggccatcaaggacttcaaccgggaagggctgcctctgatggtctttgccaactggagaggcttctctggtggaatgaaagatatgtaccaccaagtgctgaagtttggtgcttacattgtggatggcttgagggagtgctgccagcctgtgctggtttacattcctccccaggctgagctgcggggtggctcctgggtggtgattgactcctccatcaacccccggcacatggagatgtatgctgaccgagaaagcaggggatctgttctggagccagaagggacagtagaaatcaaattccgcagaaaggatctggtgaaaaccatgcgtcgggtggacccagtctacatccacttggctgagcgattggggaccccagagctaagcacagctgagcggaaggagttggagaacaagttgaaggagcgggaggaattcctaattcccatttaccatcaggtagccgtgcagtttgctgacttgcacgacacaccaggccggatgcaggagaagggtgttattagcgatatcctggattggaaaacatcccgtaccttcttctactggcggctgaggcgtcttctgctggaggacctggtcaagaagaaaatccacaatgccaaccctgagctgactgatggccagattcaagccatgttaaggcgctggtttgtggaagtggaaggaacagtgaaggcttatgtttgggacaataataaggatctggcggagtggctagagaaacagctgacagaggaggatggtgttcactcggtactagaggaaaacatcaaatgcatcagcagagactacgtcctcaagcaaatccgcagcttggtccaggccaatccagaggttgccatggattccatcatccatatgacgcagacatataacccactcagcgagcaaagtcataaggatcctctcacaacggattccccttccacgtaagaacccgctgcagctgaatctcacacgggcacaccgctaacgcccgccaacacagccccccggaacgccacccacacacgcacggaaaaccccgacaccaaaacgagcccgaacagcnnn

SEQ ID NO: 24976 - DNA, 2297 bp, Homo sapiens
acgcgtccggttgttaaactacttattgttggtaggcacatcgtgtcaagtgaagtagttttataggtatgggttttttctcccccttcaccagggtgggtggaataagttgatttggccaatgtgtaatatttaaactgttctgtaaaataagtgtctggccatttggtatgatttctgtgtgtgaaaggtcccaaaatcaaaatggtacatccataatcagccaccatttaacccttccttgttctaaaacaaaaaccaaagggcgctggttggtagggtgaggtgggggagtattttaatttttggaatttgggaagcagacagctttactttgtaaggttggaacagcagcactatacatgaaatataaaccaaaaacctttactgtttctaaatttcctagattgctattatttggttgtaagttgagtattccacagaaagtggtaattatctcttctctcttcctccattagaaaattaggtaaataatggattcctataatgggagcatcaccacttattaaaacacacatagaatgatgaattaaaaaagttttctaggattgtcttttattctgccacatttattgataaacagtgaaggaatttttaaaaaatttttaagaattgtttgtcacgtcatttttagaaatgttctacctgtatatggtaatgtccagttttaaaaatattggacatcttcaatcttaaacatttctatttagctgattggttctcacatatacttctaaaagaaacttttatgttataagagttactttttggataagatttattaatctcagttacctactattctgacattttaggaaggaggtaattgtttttaatgatggataaacttgtgctggtgttttggatcttatgatgctgagcatgttctgcactggtgctaatgtctaatataattttatatttacacacatacgtgctacccagagattaatttagtccatatgaactattgacccattgttcattgagacagcaacatacgcactcctaaatcagtgtgtttagacttttcaagtatctaactcatttccaaacatgtaccatgttttataaacctcttgatttccagcaacatactatagaaaacacctgctactcaaaacacaacttctcagtgtcatccattgctgtcgtgagagacaacatagcaatatctggtatgttgcaagctttcaagatagcctgaacttaaaaagttggtgcattagttgtatctgatggatataaatttgcctcctagttcactttgtgtcaagagctaaaactgtgaacctaactttctcttattggtgggtaataactgaaaataaagatttattttcatgctcacttcttaaaagtcataaaaacaatcaaataggatcatgtttattgtcatgtgtttcctggtttctgacctgtgtgcacacccctgtgtgtttataatttttaaattgaattttatatggggtttttatttgctaaaaaccaggctgttgaatcacatttgggaagggtacttatcttaatgactaatgacttaattgggaaagttgaattcttgtaaaatacaaaatccaaggacttcttggatttaatctgattgtcacttcttagcagatcacttttttgataatgaaagttaagcatactgaatgctacttttgattgacaaactggctataatagtctaggggaaaaatccctaaacagataaagattcctaaagtaatggtggcagctgatgtttcagtgaacttttatcttgatgcgtttaaatggaagtaatgccagacctgagatttttaaggcatttttacagcttgtattgaaatgattggagacatggtttctttattagctattttgagacctgtggagttaagcaagacttttaaaaattggcaccatatacatctagttagttcctttactcttatttttttaaataaaagtagtacacatcatttccagggttgtaaatatatttggggcttgtttttggtatggatttaaaaggaggatattaagtattcattctaattttgttatttttctagttgccagagatggttgcactgaaatagaacagggagttgcatacaaagcctaaatgtgtattggatttcgaaaatactaggttggtgcaattggttttgtaccaacctaacatgtttttaggaaagtaccattatgtggaaggaaacaacaggtgttaaaaggttcaaagggatgagaaataggaagttactagaacctaactgatgttgacctta

SEQ ID NO: 24977 - DNA, 364 bp, Homo sapiens
aggagtaattaaaaacaagcaaaacaaaacaagacttagtttttaaatgaccaaacttgtccttaaagatgttgttattaactcgagttagttcttatttcctctgtttattttttattctaagtacgcggggatggaaattgttacagaatttaaagatttgatgaagtaagatgtagcagattttttgtagcaagtttctggtaaaagggttttttgcaagtctcaggttcttgctgcactatttttttttaaatatttattccagttattctaattcagaagcattcttttcaagtaacagcagcacttgtgaaaggaaaaaaaaatgcacatgtttcttagtaggttactaaatttgtat

SEQ ID NO: 24978 - DNA, 1023 bp, Homo sapiens; identical to SEQ ID NO: 22481
  misc_feature 880: n = A,T,C or G

SEQ ID NO: 24979 - DNA, 2023 bp, Homo sapiens
  misc_feature 1, 2, 3, 2018, 2019, 2020, 2021, 2022, 2023: n = A,T,C or G
nnnactgctgctcgtgcctccggctccggcccctgagcgatggtcctttccttctgccacggcgggatcgggcactcacccagttgcaagtgcgagcactatggagtagcgcagggtctcgagttgtggccgtggacttaggcaacaggaaattagaaatatcttctggaaagctggccagatttgcagatggctctgctgtagtacagtcaggtgacactgcagtaatggtcacagcggtcagtaaaacaaaaccttccccttcccagtttatgcctttggtggttgactacagacaaaaagctgctgcagcaggtagaattcccacaaactatctgagaagagagattggtacttctgataaagaaattctaacaagtcgaataatagatcgttcaattagaccgctctttccagctggctacttctatgatacacaggttctgtgtaatctgttagcagtagatggtgtaaatgagcctgatgtcctagcaattaatggcgcttccgtagccctctcattatcagatattccttggaatggacctgttggggcagtacgaataggaataattgatggagaatatgttgttaacccaacaagaaaagaaatgtcttctagtactttaaatttagtggttgctggagcacctaaaagtcagattgtcatgttggaagcctctgcagagaacattttacagcaggacttttgccatgctatcaaagtgggagtgaaatatacccaacaaataattcagggcattcagcagttggtaaaagaaactggtgttaccaagaggacacctcagaagttatttaccccttcgccagagattgtgaaatatactcataaacttgctatggagagactctatgcagtttttacagattacgagcatgacaaagtttccagagatgaagctgttaacaaaataagattagatacggaggaacaactaaaagaaaaatttccagaagccgatccatatgaaataatagaatccttcaatgttgttgcaaaggaagtttttagaagtattgttttgaatgaatacaaaaggtgcgatggtcgggatttgacttcacttaggaatgtaagttgtgaggtagatatgtttaaaacccttcatggatcagcattatttcaaagaggacaaacacaggtgctttgtaccgttacatttgattcattagaatctggtattaagtcagatcaagttataacagctataaatgggataaaagataaaaatttcatgctgcactacgagtttcctccttatgcaactaatgaaattggcaaagtcactggtttaaatagaagagaacttgggcatggtgctcttgctgagaaagctttgtatcctgttattccccgagattttcctttcaccataagagttacatctgaagtcctagagtcaaatgggtcatcttctatggcatctgcatgtggcggaagtttagcattaatggattcaggggttccaatttcatctgctgttgcaggcgtagcaataggattggtcaccagaaccgatcctgagaagggtgaaatagaagatatcgtttgctgacagatattctgggaattgaagattaccatggtgacatggacttcagaatacgtggcactacttaaggaatagctggcttacaggctgatattaattactggataccataaacatggaggaaggaataaacaagctcaagggcaaagggaattgatcatcgtgacaaggctttaaaaacccgcgcgctctgtaagaccatggccctgtgttgcgacacgttccggggcacaacttaaaaaggcgacacatcgtggacccggcgtgcaatcatcagccacccggcgtaacaggttattaccagagacgcaacaacgcctcgtcgcccacagcgtacgtatgagacctacacgaagaacagcaacagaagagtcctcaaaaaaaggtcacttacaaggatcaaagtcatggttgcttccatcatctcttgcacacttaccaccnnnnnn

SEQ ID NO: 24980 - DNA, 1117 bp, Homo sapiens
  misc_feature 1, 1117: n = A,T,C or G
ncgtccggaagggagttttgcggttcccaggagtgactctgtggctatacttgagaccattccagttctaccagttcattccaatggatcaccggagcctggacagccagttcagaatgcgataagtgatgatgattttctggaaaagaacattccaccagaggctgaagagctgtcatttgaagtgtcttattcagaaatggttacggaggctgtgcggagaaatcaacttactaaatcagagattaagaaagaagactatgttttaactaaatttaatgttcagaaaaccagatttggcttaactgaagcaggagatctgtctgctgaagacatgaagaaaatccgccatctctctctgattgaattgactgccttttttgatgcctttggaattcaactgaaaaggaacaaaacagagaaagtaaaaggacgagacaatgggatttttggagttccacttacagtcctcctggacggtgaccgaaagaaagaccctggagtgaaagttcccctggtattacaaaaattttttgagaaagttgaggaatcaggtctggaatctgaaggaatttttcgactttcaggatgtactgctaaagtcaagcaataccgtgaagaacttgatgccaagtttaatgctgataaatttaaatgggacaaaatgtgccatagagaagctgcagtaatgttgaaagcgtttttcagagaactacccacctctctcttccctgtggaatatatacctgccttcatcagtctaatggaaagagggcctcacgtcaaagtacagtttcaagccttacacctcatggtcatggcgctgcctgatgccaacagagatgcagctcaggccctcatgacattcttcaataaagtgattgccaatgaatcaaaaaaccgaatgagtctgtggaacatttctacagtgatggcaccgaaccttttcttcagtagaagcaaacactctgattatgaagaattactggtagcaaacactgggggccacatcatccgcctaatgcttaagtaccagaagattttgtggaaggttccatctttcttaatcactcaagtaagaagaatgaatgaagccacgatgctattgaagaatcan

SEQ ID NO: 24981 - DNA, 502 bp, Homo sapiens
  misc_feature 502: n = A,T,C or G
accaaatataaaatgctgcaagattttgaatgaatggtgagagtgtaagaaaatgggctgtatttcaatgctcctgtggcaggatgtcaatcaagagcttggagccaaagaaaaagaaatcccttcctagcacaaagcttggctgttcagtgaatagcgtttaaataaccgtaaagtaaaaatcctgtttatgatttttattgattaggggcctacttaattaaggttaccaagtggaatgcaaatgttatctgccatattttaaaaatatcagcggaaatacaagtgggaacgttgaaggagagagagaaaggtaaatggaatggtgatagtgtccttataaagtggacagttgagccaggcacagtggctcacacctgtaatcccagcactttggtaggccgaggcggggggatcacctgaggtcaggagttcaagaccagcctggccaacttggtgaaactccgtctctaccaaaatacaaaaatcagccgggtgtgan

SEQ ID NO: 24982 - DNA, 311 bp, Homo sapiens
  misc_feature 153, 154, 155, 156, 157, 158, 159, 160, 161, 162, 163, 164,165, 166, 167, 168, 169, 170, 171, 172, 173, 174, 175, 176,177, 178, 179, 180, 181: n = A,T,C or G
acataattattaacgacaatatttctcatctgcaatttttaaacatgctttctcaaataacaaacacgtatttttgtaagttttaaaggcaaagggggcagaatgatgacagacataaaaagctcacatttaaattactggtagattttatcnnnnnnnnnnnnnnnnnnnnnnnnnnnnncaccactgcacaacagtatccaatttgaagactaatggtaaagaaaattcttcaggaaaaactgaaaatccatcaagctgaaaatctaaaattagttctactttctaatgaaaaatacataaaagtgcat

SEQ ID NO: 24983 - DNA, 1290 bp, Homo sapiens; identical to SEQ ID NO: 20742
  misc_feature 1, 2, 1281, 1282, 1283, 1284, 1285, 1286, 1287, 1288, 1289,1290: n = A,T,C or G

SEQ ID NO: 24984 - DNA, 3156 bp, Homo sapiens
  misc_feature 1, 2, 3156: n = A,T,C or G
nnagtctccactgaaaggctaaatgggaggatcttcccccgtgacctcaaaagctattgtggatgctgatggaagaatttatattcggaactggcagggtggcatcctgtctgggggctttgagaagaacccgaaaccaattttcactgagggcaagaaccagctggagattcagaatctacaggaagactgggatcactttgagcctctgttgagttcccttctgaggaggatgccagaattagagactctggagatcatgaagttggtgaactgcccagagaccttcacaccagacatgaggtgcatcatgggcgagtctcctgcagtgcagggctactttgtcctggcaggaatgaactctgctggcctttcatttggtggaggagccggaaagtaccttgccgaatggatggtacatggttatccctcagaaaacgtttgggaattggacctgaaacgttttggagccctccagagcagccgcacctttctgcgccaccgggccatagaagtcatgcctttgatgtatgatctgaaggttccccgctgggacttccagaccggtaggcagttacgcacctctcctctctacgaccggctggatgcacagggagccaggtggatggagaaacatggatttgagaggccaaagtactttgttccccccgacaaggacctcctggcattggagcagagcaagactttctataagccagattggtttgacatcgtggagtctgaagtcaagtgctgtaaggaagctgtgtgtgtcattgacatgtcctctttcacagagtttgagataacaaccacggggatcaggcattagaagttctacagtacctcttctccaatgacctggatgtgcctgtgggccacattgtgcatactggcatgctcaacgagggtggagggtatgaaaatgactgcagcatagcacgactgaacaagcgcagtttcttcatgatctctccaaccgaccagcaggtccactgttgggcctggcttaagaaacacatgccgaaagacagcaacctgctcctggaggacgtcacctggaagtactttggcctctcaaatccatgtcctcgagctgtggatgtgctgtctgagttgtcctatgcccctatgactccagaccacttcccaagcctcttttgcaaggagatgagcgtgggctatgcaaaggggatccgggtgatgagcatgacgcacacaggagagccaggattcatgctctacatccccatagagggcatgatttcattggtcgcgatgccctcctgcagcagaagcagaatggagtgtataaacgcctcaccatgttcatcctggacgaccatgattcagacctagacctttggccttggtggggagagcccatttaccggaatgggcagtatgttggcaagaccaccagcagtgcctacagctacagcctggagcgccacgtttgcctgggctttgtgcacaatttttctgaggacacgggggaagagcaagtggtgacagcagatttcatcaaccggggagagtatgagattgacatcgcgggataccgcttccaggccaaggccaagctctaccctgtcgcctccctcttcacccagaagcgccgaaaggatgacatggagctgagtgacttccttgcccttccacctcctcctcctaatattcactctgggctcttcttcccttcccacccctcactcagctgctcgtggtggcaggaggtatgtctgacaggacagaagcaagctccccatcatcttgtcctagagtgggcgtcaccttggagcttctcttccttccgcctctgttcctcttctggagcctttgcctcccatctcttatctccttgatataattttgaacttgacctactttaaacttttttgctctgctgtgctgtgggctggcactcgatacctctggcaagaggatgatcatctacctcactgataagaggcatcgcatggacgttctctggtctgtagtggagacaagcagttaacctagcaccatcctcatcctccctgcagaagccattagcagacctttgggccagggcagcctccctataattttcttcatctcttgctaatctctataataaggttgctttttctttcttagttgagtaaacaagtaagccacagtgtttgaaaggaaaaaaccatgttgccttgtgtgttgcttttcccagtcaaaagggtctgaccttagaaagtccccaccagtgatgctgagtgttctgctatggaaacaatgctgcttttctctcagctgtccaaagttcagccgttcctccttccccttctcccagtgcgtttgactttgtcaggtcagcctcacttgtccctttcacagttggcccataaagtcatgtttctctccctttagaatagggaggggaagggatcaggtgtgttgtcctgggcctttcaaccttgcgggctgtgctgagttccagagagctgccggaattccaggtttgactctccagcacagagcagagctacacagaggtgacccacgttagtccactgagagttctgagtccaaagggtgtacgttgcataaggctagagaccgcttttcctcctttccccccaggctctttgtttccctccacccacccttccatatcctctggagcaggagacaatgtgggtgcccagaagtgccctgcgctttcaggcagtgtctctgttttcccaaggtgaaacttagatatcatggactgttgtccagcctcaatgcttcattttccccttgcatatcaactgccctaatctgactttttttaagtgcaaataaactgctataagacattttgggtagtaaaactctacctttggcgtgttggtatcttggaagcattagctctgatagggctataagtggattaagggacatccttccattcattagagcagcttaaaatgctcaggtgtctgccttctctggtgtttctttgggatctctgtttacccacttacgctggctccttctagacatttcttgccacttccccaactagaccactcctagtgattactgactttagtgcccacctttttggaaggttctggttggcttgttagaggagcatatgagtacgaattactgtcttgggggtctagttagtcn

SEQ ID NO: 24985 - DNA, 2071 bp, Homo sapiens; identical to SEQ ID NO: 21824

SEQ ID NO: 24986 - DNA, 1314 bp, Homo sapiens
  misc_feature 1310, 1311, 1312, 1313, 1314: n = A,T,C or G
gcgtccgcttgccctttcaagccttatacagtagtacactgtacttgtttttagtagtaagacctactttcccactatatttagatagtttgttttcactgtgccagaatctcaggtgcctgcttagagtatttctttaatcacagtcactgggaagtaaggagatgtatatatgtgtatatatggtaacaaagcatagcagttctctaggggagaggcctggcattgcacatggtgttacatggctacaagtaaggaaaaaatcagaaagtgaaagaactgatgtaataaaaggttgatttggttggttcccatgaaagttagtaagatgcccttttaaatataaggatcagtgctttgttctgcagcagagtttgctgataaatgtctgttggattctttttggatttctttaattaatttgtaagtaaccaagataattattttcccccttgctctctatattaatacgtagctataaagcaacagttggttttcttatcctttgataaaagcatcccataaaatataaagtagtaagttaacatagtattattgtcacacacaatgctttttttggttaaatgttgatacgaagcaatgttttggaattactttaattgatggagtagtggtggtagagagaaattaataacaaaaagagtgaaaatattttaattagcagtagatggtgctactggctttcatttgctgacttgattattccctttctcttaaaaaccatggcattagactgcactaaattaacaagcatgttagttgctggtagaggttttggaggttaatttaccttaaattggaagacttttaattgcagtctctttctaccttccctctgttagtcatttgtaaattctaaatggtcaccataaaatgtattaggtaggagaagatacgttttatgtataatatatctcagactgagttactgcctgtcttatcaggatggataaaacactacagtctcttatcaggaaatagagatgatgtggctatttatttattacatatataacacaggatcatttatatattagcatttctgcttatggggaaatagccaacacattctttattcttgttaccctcttgagacggtttgcttacccgacctggtgactcgcgggctccctcttgggcgggacctctctaggggacggcgcgctacccagagtcgttcgagggccggggcccggtcccttggcgcgtggcggttaccccacggttcgcgcctggcccggcgcacgttttttctcccccgcggcctcctcctcctgctgctgatctgnnnnn

SEQ ID NO: 24987 - DNA, 1262 bp, Homo sapiens; identical to SEQ ID NO: 21868
  misc_feature 1, 2, 1261, 1262: n = A,T,C or G

SEQ ID NO: 24988 - DNA, 1066 bp, Homo sapiens
  misc_feature 1, 2, 3, 4, 5, 6, 75, 1023, 1064, 1065, 1066: n = A,T,C or G
nnnnnncgcgccccgagtgagcagtcctggcccggagcgtcggtcctggtaatctgtaggaaaagcgctgcggcncagggggtaaagagagatcagcctctgtggactcggtgcttctcctggcaagtaaaccccaaggaggactgaccagttcttgaatttctataccatggcccttcgatcagtgatgttcagtgatgtatccatagacttctctccagaagagtgggaatacctggacttggaacaaaaggacttgtacagagatgtcatgttggagaactacagcaacttggtctcactggcaggatgcttcatttctaaaccagatgtgatttcctcattggagcaaggaaaagagccttggaaagttgtgaggaaaggaagaagacaatatccagatttggagaccaagtatgagaccaagaagttatctttagaaaatgacatttatgaaataaatttatcccagtggaagataatggaaagaattgaaaaccatggccttaagggtctcattttaaaaaatgattgggaatccacaggaaaaattgaaggacaggagagacctcaagaaggatacttcagtagtgtgaaaatgccatctgaaaaggtgtcctcttaccagaaacgcacatctgttactccacatcagagacttcattttgttgataaaccctatgaatgtaaggaatgtgggaaggcgttcagagtgcgccaacagcttacttttcatcacagaattcatactggtgaaaaaccgtatgaatgtaaggaatgtgggatggccttcagacagactgcacaccttactcgacatcagagacttcattctggtgaaaaactctatgaatgtaaggaatgtggggaagctttcatatgtggtgcagatcttagagtacatcagaaaatgcatattggtgagaagccctatgaaatgttaaagaatgtgggaaggcttttagggtacgaggacaacttactctgcatcagaggattcatactggtgagaaaccctatgtntgtaaagagtgtggaaaagcctttagacagtacgcacaccnnn

SEQ ID NO: 24989 - DNA, 1955 bp, Homo sapiens
  misc_feature 1, 2, 3, 4, 5, 6, 7, 8, 9, 10, 11, 1954, 1955: n = A,T,C or G
nnnnnnnnnnngtcttccgcgagaggttgacagaaacactgacgcgcggtttgtggccctgcgcgttgaatcctttctcggccccccattttaacttcgcgcccgccaatttttttttttttttggtgggggagttgaaacctaattttgtggcgtagcagctatgcagcttgaaatccaagtagcactaaattttattatttcgtatttgtacaataagcttcccaggagacgtgtcaacatttttggtgaagaacttgaaagacttcttaagaagaaatatgaagggcactggtatcctgaaaagccatacaaaggatcggggtttagatgtatacacataggggagaaagtggacccagtgattgaacaagcatccaaagagagtggtttggacattgatgatgttcgtggcaatctgccacaggatcttagtgtttggatcgacccatttgaggtttcttaccaaattggtgaaaagggaccagtgaaggtgctttacgtggatgataataatgaaaatggatgtgagttggataaggagatcaaaaacagctttaacccagaggcccaggtttttatgcccataagtgacccagcctcatcagtgtccagctctccatcgcctccttttggtcactctgctgctgtaagccctaccttcatgccccggtccactcagcctttaacctttaccactgccacttttgctgccaccaagttcggctctaccaaaatgaagaatagtggccgtagcaacaaggttgcacgtacttctcccatcaacctcggcttgaatgtgaatgacctcttgaagcagaaagccatctcttcctcaatgcactctctgtatgggcttggcttgggtagccagcagcagccacagcaacagcagcagccagcccagccgccaccgccaccaccaccaccacagcagcaacaacagcagaaaacctctgctctttctcctaatgccaaggaatttatttttcctaatatgcagggtcaaggtagtagtaccaatggaatgttcccaggtgacagcccccttaacctcagtcctctccagtacagtaatgcctttgatgtgtttgcagcctatggaggcctcaatgagaaatcttttgtagatggcttgaattttagcttaaataacatgcagtattctaaccagcaattccagcctgttatggctaactaaaaaaaagaaaatgtatcgtacaagttaaaatgcacgggcccaagggggattttttttttcacctccttgagaattttttttttttaagcttatagtaaggatacattcaagcttggttaaaaaaataataataaaacatgcatcatttttcatttgccaaccaagcacaaagttattttatactgactgtatattttaaagtatactctcagatatggcctcttacagtatttaagatatagcaaggacatggctgatttttttttataaaaattggcactaataagtgggtttattggtcttttctaattgtataatttaatttagtacaaagtttgtaaaatatcagaggatatatatatattgtttctacgacatggtattgcatttatatctttttactacagtgatctgtgacagcagcagcttcatgttgtattttttttactgaaattgtaaaatatccatcttaaagacatcaactattctaaaaattgtgtacaggatattcctttagtggtggaattaaaatgtacgaatacttgctttttcaaaaaaatgtattttctgttaaaagtttaaagattttttgctatatattatggaagaaaaatgtaatcgtaaatattaattttgtacctatattgtgcaatacttgaaaaaaacggtataaaagtattttgagtcagtgtcttacatgttaagagggactgaaatagtttatattaagtttgtattaaaattctttaaaann

SEQ ID NO: 24990 - DNA, 1120 bp, Homo sapiens; identical to SEQ ID NO: 22234
  misc_feature 1, 1119, 1120: n = A,T,C or G

SEQ ID NO: 24991 - DNA, 3042 bp, Homo sapiens
  misc_feature 1, 2, 3042: n = A,T,C or G
nnagtgctgcttgccgatgctcatctcctctcctcgaaagctcctggaaatcatcaggaactggtagaatgctccataggggaagagatcttcgtctgtttggtccattgctgtcttacgcttctgagaggtgacagcgtgctggcagtcctcacagccctcgcttgctctcggcacctcctctgcctgggctcccactttggcggcacttgaggagcccttcagcccaccgctgcactgtgggagcccctttctgggctggccaaggccagagctggcaccctcagcttgcagggaagtgtggaaggagtggcgtgagcgggaaccggggctgcgtgtggagcttgcgggccagatggagttccgggtgggcgtgggcttggcgggccccgcactgggagcagccggccggccctgtctcacttcatcacagaagaggacaaagaccagcgagtacaggaccagctcgggggggtgtggcaccgaatggaaatccatgagcagcacgtaggcaaacagcaggaggaaggcgatgtagaagaccacattccaggagaagaccacgaagggggaggtgatagaacggccgaggtaccaaagcagcttcttgtgcttgtcgacaggtttcttcctaaatgatacaaagccacagcccaccaagggtataataaacagacacaggataatcttccagttcttggtgtctcgggaaatctctccataccattgcttagaaagaaaattctggaccccaggctgggcgatgaaatgctggtctgtggcctccaccgccagctccagacagttgcttccaccccaagcttcacaggaatagaccagcagctgttctgccaagtcttcatcgctgctgtaacactcagtgaacagctcaacagcccgggtctcgtacctgcccggggcaatgtctgtgccacatggcagatccgcgcccaccacagcattccacactgtggactcaccaacagcccgggtcaggtactcattagccagctcctcggactccccagcagcattgatgtcgttcttcactttggccagagtcttcagaagcttgctggctcccagggctgccagagtgcagcccctggtctgctcccaaatgactttggagagttccttcttattctgaagaatggcccagatgaagagagcttgcagggggtgccgagtaataggagacacgtcgtggagttctatgtccatctcgtcccggccatttctgtcttccttccggaagcctcttcggaagttcgcaaccagtttccagacaaacgtgaggagggcatcattataggaattcttggcgatctgcagattccggtacacaagcgtgctgaagtggttggagaagagttcagtgaggacatcatgggtgagaaacttccgtaggttcaagccattctccagaaagaggcggacaaacttgggtctgtcctttatgagagccgtaaacatgacttcttgaaggtcagcagacttgagaaccaccagcatatgagaagaggctttgccgtcagtcacatctttgctctcaaccttgattctaccattttccagccatgtgacctggattattgtgtctctgagcctcggtttgctcttctcccatcggcggtcattggtgaaaatctcatcattggctaagtccagctggttccactccagcagaagcttcagctgcccattccagttatccttgtcttgctcactggtgctgaaggctttgtatagagcgtaggagatggcattgctcacaatttcatccccagcttcttccattttaataactgttaataggtgagaacattcgagaatttctttgagccatttgatccaactctcagtctcctcctcaggcagccgggacaccgtgcggggtaaaaagcgcaccagcttctccttgacggcagaagatgtcagggcatcctccacctccaccaggctagcgatcacatcagcgatctggcccgagccttccaccaccacacaaggaattttatttttgatggaggtattgatggctttcaaagtctcttttccacctccttgggcaaaacacacaatggggatcttgccaccatagttggaatcttgaatagtgcgctcagagatatacttctctagctgattccggagctttgcttcgacagtgggatgtccatgacagccattgtccacgagcagcaaatgtgtgtggttgttgtccaggatatacagtggatctcttgtgaagtcatccataaggtactgggctaaaaaatagccctcagcatcgcaattcctgatgagggtgtcccggttggagaccatgccccaagctgctatgccaatggccacaatattctcctctgaactcctgctgatggtgttatctctcaccacctccccgaggtacttcatcaggccataatgggtgcctcccgtgagaatccaagcacctttggactgcgcgatgtagatgagccggctgaagatcttgcgcatgcgcggcttcagggcgaagttcttggcgcccccggtcacagaaatgaccaggttgggtgttttcaggtgccagtgctgggtcagcagctcgtaaaggatttccgcgtccgtgtcgcaggacagacgtatatacttccctttcttccccagtgtctcaaactgaatatccccaaaggcgtcggtaggaaattccttggtgtgtttcttgtagttccatttctcactttggttgatctgggtgccttccatgtgctggctctgggcatagccacacttgcacacattctccgtggccttggaatctttggtaaagaagacacattctcgtttcttaaaatttgcttgaataaaattcaccaagtcgctttcactgtaagacaagtctgtgctccgagacgcgctggagtacagggtccgggtgctgtccagagtgtcattccttctgttcctcatgctgagcctggctgcccgaaaggacatcttttcctttacttctgcaggctccacgtcttctgtccacctgcatcctccaaccan

SEQ ID NO: 24992 - DNA, 2133 bp, Homo sapiens; identical to SEQ ID NO: 21530
  misc_feature 1, 2, 3, 4, 5, 6, 7, 8, 2133: n = A,T,C or G

SEQ ID NO: 24993 - DNA, 2435 bp, Homo sapiens; identical to SEQ ID NO: 22543
  misc_feature 2433, 2434, 2435: n = A,T,C or G

SEQ ID NO: 24994 - DNA, 4990 bp, Homo sapiens
ttttttttttttaaatttttttttttttttttttttttttttttttttttttttttttttttttttttttttttttttttttttttttttttttttttttttttttttttttttttttttttttttttttttgaatgtataggcacatttatttcaatcaagtcataatctgaacctaaaatgcaaagcaaaacattaacgtgcatttaatacgtatttcaagtctttgtaacagagaataaaaatcattacaaaattaaggtatgagacatcaagtcactaatgatagagttgattagacaatggcttccatgttccatctaacgacatggaacaatgtacatttgacaattcagccttaaagggttaagtagaataaactgcagccagctccttacactcaactgcctcagtaacaatgactcaaagaatagatattttccctatcaatgacaatatttcagtgctaacacttgcagtttaatattggataaaagctaaggagtggttcatcctgacagattataaaagataaaacttattggcttcaagaaggattaaacctgttagaattgggaccaatttttgtttatatactcaacagaaaaacaaatttctaattttaaatttctggcccacatactcaaaacaaatgacctatacctcatcaagctttcataaaaactgatggcattacacacaaaatccacctatttccctagcatgcccaatgaaacaaaaagaaggtacagaacacatgatgaaagtagaagagatatactcaggtttgtgctaaaatctaggccaaagaagcttcagatgcacacagagcaagaccagcaaagaatcttccacatatactctggttcataaaccatttgtttgggtttggggactttttattctaagtccagtagcctatacttcctaagaaatatgattaaaaacatacataacagtaaaaataataaaatagaattacttagctgaggtatttggatttatatttagaggatgacaaaatgatatttgacaaagtatatatctttacctcaaaaaggaagacatgttaatataatttattataaacttcaacccaatcagtcttaaatgtttttgactctatgactaagcgttaattatggacactgttaccctagaacaccacttgatagccctgcatgaattctgccaaaccaaagacatacctttttaaaataaaaataaagcaaccatttacacttactaagaaaaacaaaaatttacttcaaattgtagtataggcttttcaatcacaaaaagaaagaaaagaacagtgatctgacagtggtcacatcctgtgcaaaaaacttgatacaaaaatgatagcacatggtatctgagctgcttacattacaagaaaaaggaaatacagtagctgaaatatggcactcctgggaatcaacttctaaaccaaatagaatgcctttgaaatgattaaatttatttgtgtattagtaagaaagccccaccaccataaatagtacaatatttaaaaataaaaaaaaatatatctatctaagatagatagtgtatttgtactgttagacttctttaagtgcagaaggtggttcaggttttgcctttttaattaaataactgaccatatgctttataaagtttcactcaatcacaaaagccaatttaaatcaaggaatatgatatcaaagttgcataatttcatttgggactgccagcaggttaaagtcttaagtctttaacattaatgttcatttttagtcaatgaatagttaaaaagttctcaaatcttcatatcctcttgaacttgcccttctaaatgatcctcagactgcaattcctagtttgcaaataaaataatgcaatatgcatcatacttcaagaaaagatgatgatgtcgaactaacatgcttctggatcttttccctgctcctttcaaccttctttataatttctgccactatgcacactgatgaggtgagacccaaaagaaacaacagatccagtatgcttaggctctcagtctgaaaaaccttctgaagcggaggaaagtaaataactagtaattgtcccatgatggatccaagaactgcatagcaaaacattctattactgcagagtccaatctcaaacacagacttggtctgggatctggaacttagtgcattgaacatgtcaaaaaacacaaagcatgtgaaggtcattgttgtgtctcgaggtgtaatcacattgtctcgtagctcacgccagaagacaaacaaagtcccacaaacaatgattattgatgaaacaagtattttaagtatcaagtttttagtcaaaatgctgtctttccagttgcgaggaggtttacgaatgacatctttatccactggttctactccaaggctctgagctgggggtccatccataataatattgatccacaaaatctgcatggcattgagaggattaggaaagttcattaatgtagccaatgagattaaagttaatgctgctatactcgtgctcagctggaatctaacgaaatttttaatgttattataaatccctttaccctcttcgattgcagacattatggtttgaaaatcatcatccactaggatcatgtctgctgcctctttgcaaacatctgtaccagtctggcccatcgcaactccaatgtctgcagccttcagagcaactgcatcatttactccatctcctgtcatggctacaactgaaccgttcttctgtagcgacttaataattttcatcttgtgccttgggctagctctgtaaaatactgcaacctttggtactatttgtgaaagctgctgaacatccattgcatctatttcttctcctgagactgactgggaagttttggaatacaattccagacgactggcgattgcaactgcagtctcctgtgaatctccagtaatcatttttattgatactcctgaggcaatgagtgttgtaacagcttctttcacaccagttctaggtggatcaatgattcccaccaagccaagaaatgtcagctgtcccagttcaggaccagaagccaaagcaagaactctgagtcccgctgagcccatgcgtgccttctcttgttggtacacatctctctgctgctgagtaagtgtcaaggtctgccctttgctctggtatgtagtacagtacttaattacttgttcgtaagcacctttcataaaacaaatctctggtctgtcctgctgtgtccggtgtacacacttaacagccatccacttttgctcagagctaaaagggtattcagcttttctgatgtagtcttgttgaagtccatcaagacccatcttcattgcaagagcaattaaggccccttctgttggcttccccattagagtattgtttctaattacagcatcattgcacacacagcccgcctcaacaattctgctaacagctgggttatagaatccatgaacaacatcaccatcaacaatcacttccccaaattgattatagccaactccagtaacctcagtatgcagaccatctgaagtaaatatgtgagtaacagtcatttcattcttcgtcagtgttccagttttatctgaacaaatcacattacagcagcccagagtttcaacaataggcagctttttcacaatggcccttttcttcaccattctcataacaccaagagctagcgtcactgtgaccacaatggggagaccttcaggaattgctgctacagccaaacttacactaatagtaaacatttccaggatatcttttcccagtaaccagccaaccaacatgatgattcctattataccaaaggagtaaaaggaaagttgttttcctaagaggtccatgctcttctgcagaggggtttttggtgcctcttctgcttgcatcattttaaaaacctccccaaattcagaattttctcctgttccaatgacaacaccctttgctttgccacatctgaccagtgttcccataaaggcaatgttacttctcgatgcaagatctccattagttgcagctggctgaggagctgtcaccttagaacaaggcgttgtctcacctgtcaagctggactcatcaatggaaagatccacagcctcaaacaagcgtaagtcagcaggaactctatccccaacagaaaggcaaactgtatcacctggaaccaagtctcgggcaagtgtatgctccaattttccttcacgcacacaatggcattctggtggcacaagtttactcaattcttcaagagatttttctgaacgatattcctgaacaaaggcaactgtaacaacgataagtattgccacagtgatactgacggcatcatcaaactgatgcattaaaacactgatgactgcagaagccagaagcagcataataaggggatttttaaactgagaaatatacttcttccacagtggctcatcttcactaatatcaaactcattccagccatgaaaggctcgcctatgactaacttcacatttgtttagaccattctgaagatcagcttggagaatgcttgcaacttcactgactggtaattcacttgctttttttgatgtcaatacaggaatcattgtctcattttcaccattaggtattttttgaaaacgtgcaacctgttcttcggctctttggtttctcagcgtcgataaatatctcctaattgcatggagaggatattttttgaaataagagaatctagatggaggcaacagactatccatagtgaggaaagcaagagggtccttgtctgcacctccttgtcagcaaccatatgaaattagaaacttagcaattcctcagatgcctaaagatttgtttgtagctcgaccacttccctcctacaaacaaagcaaatgttctccttgctgtttcctcttttgggtagagttcctggtgaaaccagacagccaagtatgaacactgtctagaagcgtccagaaatgcaatgcccacggacgcg

SEQ ID NO: 24995 - DNA, 5147 bp, Homo sapiens
  misc_feature 1, 5143, 5144, 5145, 5146, 5147: n = A,T,C or G
ngctggagggggagccgtgggtgcggggcaccgtgggggccgaggccccgggacgcccgcccggccccaggccccgctcagcccgggcgcccccacgggtgccccccccttcttggtccgagcagtgtgagtgtgccagggagcccggcggcggcggcggcggtggtggcggcggtggcggcggcgtggaatccggcgtgggctggggggtccgagccgcggggggcagtgccatgcacaagcaccagcactgctgtaagtgccctgagtgctatgaggtgacccgcctggccgccctgcggcgcctcgagcctccgggctacggcgactggcaagtccccgacccttacgggccaggtgggggcaacggcgccagcgcgggttatgggggctacagctcgcagaccttgccctcgcaggcgggggccacccccacccctcgcaccaaggccaagctcatccccaccggccgggatgtggggccggtgcctcttaagccagtcccgggcaagagcacccccaaactcaacggcagcggccccagctggtggccagagtgcacctgtaccaaccgggactggtatgagcaggtgaatggcagtgatggcatgttcaaatatgaggaaatcgtacttgagaggggcaactctggcctgggcttcagtatcgcaggtggcatcgacaatccccatgtccctgatgaccctggcatttttattaccaagattatccctggtggagcagctgccatggatgggaggctgggggtgaatgactgtgtgctgcgggtgaatgaggtggaagtgtcggaggtggtacacagccgggcggtggaggcgctgaaagaggcaggccctgtggtgcgattggtggtgcggaggcgacagcctccacccgagaccatcatggaggtcaacctgctcaaagggcccaaaggcctgggtttcagcattgctgggggtattggcaaccagcacatcccaggagacaacagcatctacatcaccaagatcattgaggggggtgctgctcagaaggatggacgcctacagattggggaccggctgctggcggtgaacaacaccaatctgcaggatgtgaggcacgaggaagctgtggcctcactgaagaacacatctgatatggtgtatttgaaggtggccaagccaggcagcctccacctcaacgacatgtacgctccccctgactacgccagcacttttactgccttggctgacaaccacataagccataattccagcctgggttatctcggggctgtggagagcaaggtcagctaccctgctcctcctcaggttccccccacccgctactctcctattcccaggcacatgctggctgaggaggacttcaccagagagcctcgcaagatcatcctgcacaaaggctccacaggcctgggcttcaacatcgtaggaggagaggatggagaaggcatttttgtctccttcatcctggcaggaggcccagctgacctgagtggggagctgcgcaggggagaccggatcttatcggtgaatggagtgaatctgaggaatgcaactcatgagcaggctgcagctgctctgaaacgggccggccagtcagtcaccattgtggcccagtacagacctgaagaatacagtcgctttgaatcgaagatacatgacttacgagaacaaatgatgaacagcagcatgagctctgggtctgggtccctccgaacaagtgaaaagaggtccttgtatgtcagggccctgtttgattatgatcggactcgggacagctgcctgccaagccaggggctcagcttctcttatggtgacattctgcatgtcattaatgcctctgatgatgagtggtggcaggcaaggctggtgaccccacacggagaaagtgagcagatcggtgtgatccccagtaagaagagggtggaaaagaaagaaagagctcgattgaaaactgtgaagttccatgccaggacggggatgattgagtctaacagggacttcccggggttaagtgacgattattatggagcaaagaacctgaaaggacaagaggatgctattttgtcatatgagccagtgacacggcaagaaattcactatgcaaggcctgtgatcatcctgggcccaatgaaggaccgagtcaatgatgacctgatctccgaatttccacataaatttggatcctgtgtgccacatactacccggcctcgacgtgataatgaggtggatggacaagactaccactttgtggtgtcccgagaacaaatggagaaagatattcaggacaacaagttcatcgaggcgggccaatttaatgataacctctatgggaccagcatccagtcagtgcgggcagttgcagagaggggcaagcactgcatcttagatgtttccggcaatgctatcaagagactgcagcaagcacaactttaccccattgccattttcatcaagcccaagtccattgaagcccttatggaaatgaaccgaaggcagacatatgaacaagcaaataagatctatgacaaagccatgaaactggagcaggaatttggagagtactttacagccattgtacagggtgactcactggaagagatttataacaaaatcaaacaaatcattgaggaccagtctgggcactacatttgggtcccatcccctgaaaaactctgaagaatcccctccaaccattctcttgtgaacagaagaaatcaagtccctcttccctcctccctcttcattcctgtccccatggggagaacaaatgctactgttcttgtccccttttttagatatgtcaaaaaaaattaagttttctagtcctgttcttttttttttttaagtttttgtttgtttcagtttattttttgggatgatgccatctcattcatcatgtgactgtgcccattcctgcatggacctttcccaagcgctagcacaggtgcaaaatccatcagagccattgttttcataaaaaccaagcagaagtgaagagaaaagaggaggactgatggaaagacagactctggacagctgcacggcttgtgaagtgagctaaatgcaccacatgatgagatgctcctgggcatttctccctatctgtactgctgtcttgcagctctgaacggtgcaacgtaatggcgacagaaagtatcttatttatatatagatatatatatgtaatttatataaaatatatagaaattattatatatatatattatacactctcatataatatatatatattcacacacatttgggttagaaaatctatggagacttcatcaatggtactatgttattagagaaatgctttaattttcatattccaatcagatggcatcttctatcccagctggttgggaagggattgaagatggtagcaagtgctgcactaagggcactcgcatttggtcattctcttgagagctaggaggggtcagcctgaggccggagaggaagggcttttgcctggggtgagagggtgagagacttgacctgaaagcagctgctgcccctgaggtgcagccagagtcctgtgtgcggacagagagaatggctaatgatgctccgcgtggaattgcctattgttttatgccacctgatgtgtctgcatgagaggtttcctttttgttcctttttaagctgctgttaaaccaaaaccatgttgtgctactgtgtcagccttttcattattgcaaattttacttttactatttaagtgaatgcatagaatccaatttgccaaggttctaaaggcttatgaggtcctgaaggagccaggccttgtgatggagtaggtgacacaggcctggttgtcctgtcagcagaagggaaagcaggggctgggctgagaggaggacacggagggctctgctgaggttccttcctgggttccaccaacagggacagggagtcacttgccttccagttctgtgctgggatggcgggacagcacttggcttgcttggccagctgcgtcatgagtttgatttggttttttttttttgcagctgcttcatatgctctgctccagcccctccccaacagctggtagcttatggtttcttcaagaggaaagtagactttatgctgtacatttgagctgtagagctaagattcgcttactggtgagctgtgaaaccttgttgctttttcccagagtctgatggcagtgactgtgatcaagggaatcttcaccgccacaagtgcaggcagcaggtgtggttcaggtccccccccaccccactgtgctcctttgaagccaacgtgcctccctcgcctccatactggagggacgacgcaggggagaacagagaagtgcttggccctaggattgaggcacttgtttcctagcccgctgggttagggctggtgcaagcgaggcaatgttgaggatgctttaagcactaccagccgaatccgggaactctgttaacagttgtccaaccagcagaatgaggctaactgtataaagcatgggacccaggatgaggataaggaaaggacagcggctttccctgggcagtacaatggcttgaaggcaaaaagggataaagtgacagccgactgtgactctggtgaggaggggtgagcagggaggttgattctctgatgttaactaagtggcaaagtctcaaccgtgctcagccctccccctcccagggaagagaaacaaagattcaaagtaagcatgatactagtgggtttaccagtgtttcttccaaggagacatatattttttaataaacgatagttgcaatgaactgtggctcagagaccttcttaaagtagttgagaagggagggcgtgggcaaagcagtgggaagaacatcccaaacttttgggggccagagggctctctccttagtgatgatcagctagccgagctgggccgtcctggggatcggtacagctccctggggtggtgacaggccctttgtgaaagttgtgtgcttggtcttccaccccagccccagacactgcttcaaatagcaccaaccagatgggagtccacatctgtggtggcaaaatgctgacattttcccagagtacacggggaaagctgcgtgccacgcggttacaaagccggcctgtacaccacaactggttgacagcgaaatgcnnnnn

SEQ ID NO: 24996 - DNA, 1467 bp, Homo sapiens
  misc_feature 1, 2, 3, 1464, 1465, 1466, 1467: n = A,T,C or G
nnngtcaatgaagtaggtgtaaaagaaggattgatgatatagtgtgtatttcgtgttttttggttttcgtttctagtttgttttctttttttattttctgtgttttttctttgttgttatttattttgtattttgctttgtgtgttaggtatggtgtatttcttatacatgaggagtatattcgcttttgtttttttttctttttcgtttgttttattatgttcagctgaaggtggtgcggcgttctctttgcttgctgtctttgttgtttgttttcgttgtgtgtccggtttgtggtcttgtcggtgttttgttctattgttgtttaggtgtttgtttgccatgtctgcggtttgctgtgtgccgttcgcagtcttgtttctgttatgaccttcgcgtggcttccgttgtgtgcctttaggcaatttcaggatcattcattccaagaggtccttttttcaaagtcttttcaatcatttgaattgcaattccaaagaagtttttctttcattactacatccaccactcctttgaaagttttggcttcaccaattggtaactgtaaaagcaaaggctttgcctttaacttctctctgatgctttcaactgcatacttaaagcttgctccagttttgtccatcttgtttaaaaaacagattcgaggtatattgtgtttatcagcttgcctccatactgtgagagtctgggcctctacaccagcagaggcatcaaatacagccactgcaccatccaacactcttaggcaccgctcaacctccaaggtaaagtccacatgacctggtgtatcaattagattgactctataacctttccaatcaaatgtaacagcagctgattgaatagtaatgcctctttctcgctcttgggccatgaaatctgtcactgtgtctccatcatcaacatctcccagtgatcttgtatatccggaatagtacaatattctttctgtggtggtagttttgcctgcatcaatatgagccataattccaatattacggattttagctatgggaggattgatgatggaatgaagggatttgatatcatttcctattaagcctggtagagaactgcaatttcttccaagcggcacatgtggctttaatctttttaaacttgctcttattttatagcagcatatattattaatatacacactgggtattgtctgatgactcattgcaaatatcctcaagttggtcaacatcttgatcctccaaactgttactgtctggcattaggccgcgtgccgcaggccagctctcaccgctgggctcttgaagcaggaggcgcgagccgcgccaaagtctgcaacggcctcaagtctcgacgccagcctaggcaaaaggcaatgtatctaaacgaaaagaaaataggctttctccgctctaccgcctcgggcagccacacctccacacttccggccggacgcgtgggtcgacnnnn

SEQ ID NO: 24997 - DNA, 1286 bp, Homo sapiens
  misc_feature 1281, 1282, 1283, 1284, 1285, 1286: n = A,T,C or G
acttaattttttttttttttttttatttgagacggagtttcgctctgtcgcccaggctggagtgcagtggcgcgatctcgactcactgcaagctccgcctcccgggttcacgccattctcctgcctcagcctcccgtgtagctgggactacaggcacgcgccaccatgcccggctaatttttgtatttttagtagagatggggtttcaccgtgttagccaggatggtctcgatctcctgacctggtgatccacccacctcggcctcccaaagtgctgggattacaggcgtgagccaccgcacccagccagggggaatgttctataaccagctctgtaaaggaaaagcactgatgtgtggtagtcaccaatttctgtggtgtaaatactcccaccatggttgatttcaagccaccagtggtttaataaccagctcataaatctcctaaatattttacagttgactctcatgagctgattggagtcagctggaacataccactgcctctagactaaggccagcagatttagcaaatacagactgccccagttcattgaattttagataaatgaaataaatctataaggttaagtatgtccccagaactgcatggaacatgcttaatctaaacaatgatttgttgttcacctgaaattcaaatttagctgggtgtcctgtatttcatctggcaaccctacttcagacccaggtgtaaggtacatggatgtgctttggtcaaggaataggccaaggcagagatccatgcctgcatgactcagtgggtttggtgcacaggcacacacctccacttgttatataacctgtttgtgtaagttcatacttggtctgagccactgttgtctgtaaaaggtaattgtcctgctaatgctgtacaggggctcttggggttcggctcagctcaacatggcttgacatggtgggcacactggcgcccagtaagagagagagagagccaaagctgtccgttttgcagatggacaggaaggagccaggacacagctcagcttgctcacgcccagagagagaaaaagttaagctgctgaccctgaaggcaagggagagcaggctgcacagctgtgtgtggaagccacgggctcaagcagccaaggcagggcggacagtgtgagagagctagtgtaagctgttgatgagagctgttgctgaataaaaccatattcacctgcctaaaaaaaaaaaagagaatagtccaaaaaaggggttactccaggagaacccccggccgttttaaaactagtgggannnnnn

SEQ ID NO: 24998 - DNA, 3780 bp, Homo sapiens
  misc_feature 1, 3778, 3779, 3780: n = A,T,C or G
nagttgtagccgaggtggcggcgcggggcggggcgggcggagagagaaggaaggaggtggttgtgcaggatggcgacggcggcctacgagcagctgaagctgcatatcacacctgaaaaattttatgtggaagcttgtgatgatggagcagatgacgtacttaccattgaccgtgtgtccacagaggttacccttgcagtcaagaaagatgttcctccttcagctgtcacaagaccaatatttggtatactgggcacaatccatctggtggcaggtaattatcttatagtcattaccaaaaagataaaagtaggtgaatttttcagtcatgtagtctggaaagcaacagattttgatgtcctttcttataagaagacaatgttgcacttaactgatattcagttacaagataataaaaccttcctagcgatgctaaaccatgtcttgaatgtggatggattttacttttcaacaacatatgatttgacccatactttgcagcggctatccaacactagtcctgaattccaagaaatgagtctcttggaaagggcagatcagcggtttgtatggaatggtcatcttctaagagaactttctgcacagccagaggttcatcggtttgcccttccagtgttacatggctttattaccatgcattcatgttctattaatggaaaatactttgattggattctcatctcgaggaggagctgtttcagagctggtgtgcgctattatgtaagaggaattgattcggaaggccatgcagctaactttgtagaaacagaacaaattgtgcactacaatgggagcaaagcttcgtttgtacagactcgaggatcaatacctgttttctggtcccaaagaccaaacctcaagtacaaaccactgccacagatcagcaaagtagcaaatcacatggacggtttccaaaggcattttgattcccaagtaattatttatggaaaacaagttataatcaatctgattaaccagaagggctcggagaagccacttgagcagacatttgcaacaatggtgtcttccttgggaagtggaatgatgagatacattgcctttgacttccataaggaatgtaaaaatatgagatgggatcgactaagtattttattggatcaggtagcagaaatgcaagatgaattaagttattttctagtggactctgctggccaggtggtggcaaaccaggaaggcgtgttccgaagcaattgcatggattgtctagatagaaccaatgtgatccagagtttgttagctcgtcgttcacttcaggcccaacttcagagactaggagttttgcatgtgggacaaaagcttgaagaacaagatgaatttgagaagatttacaaaaatgcctgggctgacaacgcaaatgcttgtgccaagcaatatgcgggaactggtgccttgaagactgactttaccagaactggaaagagaactcatttgggacttataatggatggctggaactcaatgatacgatattataagaacaacttttccgatggatttagacaagattccatagacttatttcttggaaactattcagtggatgaattagaatctcatagtcctttaagtgttccaagggactggaaattcctggctttgcctattatcatggttgttgccttttcaatgtgcattatctgtttgcttatggctggtgacacttggacagaaacactggcctatgtgctcttctggggagttgcaagcattggaacattttttatcattctttacaatggcaaagattttgtcgatgctcccagactggtccagaaagaaaagatagactgaatttgtatttgtggaaagcggcttggcttggaagattccattgtgcagaactggagtctttactgacccgctttccacatcagcccaaggtctttttaatgcctttatccaaaagcacatcttgtgctccatgcaggatgatgacagaattgatctgatgttactgccttgatggtctctttactattgggacagttagatttataatttgaagctattctgtaattaaaatataacctgaattcagcttgcagaatggaagctgaatctgttcattgtattctattgattgtcaatttaattagctgttgcagaataagtaatatattttaaaaacctagctcctttcattatttaaaacagcaaaattatttttgtagctcagtttcattattgtcattgtagaagcggtcactattagcaggcatacttttccacacatctttggacttttcttaaaagttcagtaataagctaactgtgtttataaaatgtaagtctcttacagacatcaagtagtttgatgagacagtctgtgacttcatgataggaaagaggaggatgaggtctggggttctttaaagtctctggtgggctgcctcatgactttaatcagcttgaactgccagtgcaccagcagtttaggtgtgatgagagaattcagatatactttatctttttaaaaaagtgtaaataaaatcaaagaatgtaaagtctatctcttacgctagaggtccaaagctgcctctgttttaaagattatcccaatgtggaagatgcccatgactggtcagctacttcctcctatacattttggtttctttgagggtcactcattgagacacgcaggcctctgagagggtcttgttctagatttcatattgcacttggagggtaacagctgctttttcacgcatggtactcttgatgtttttcactctgtcaaggattttgttggctatcaatgaatgtgtctaaaacttagtgcttccaggtagttatagtactccaaatcaaggaccaacttaaacgttaatttttgtgcaaaaacaaacctgaaaaatatgcttcggaaactgtgcatagttctaattgtaagtcagattgtatattcaaattgtaattaagagatttaaatattagaacggtatgtaaggtagtataattaccactattttaaataattcagttaaacactgctgcaatatttcagtgttgtgcttgaaaatatgtacagtttttttccaatattaataccttatgttgtccttaaatatttctaaaagcgcctttatttcagcattacctttttttcatcactatcttttataaaacattaatataagtcgttacttttagaaactaaaggaaataatagctggaaaaccctctgtagtttaaaatcagtcattaaactcacaatagggtaagtaaatatagccacctgttaacatgtaaataagcataatttgttccaaagatggaatattgaaacttagttcatgtctgctgtaaaatattatttaaatgctgctgggcatttcacttaaagaacttaatgtcaacagctacaacaaagaccaaatctgaactgctaatgtggctgctttgtagggaatggactaatatcagtgtgttagatcttaaggtatcagtatttcagaatcctgcgacgattttatttctaaattcatgtactgtatgtccataagtgaaaataaaatgtcatattcttttctattattggtatcaaaaaaaaaacaaaatttgtgttggccgctgcgccccggaaaaaggtttttgacacaactcgtgggggcccggcccagaggttagggaagtgccacgcgttccaggaaccggcctgaatgggttggttccccaaaaaagcccggggaccggcgttgaaacccagggtgggcagggtaagggcagggcataaccnnn

SEQ ID NO: 24999 - DNA, 1062 bp, Homo sapiens
  misc_feature 1, 2, 3, 4, 5, 6, 7, 8, 9, 10, 11, 1060, 1061, 1062: n = A,T,C or G
nnnnnnnnnnncacgccccatttctgtgtggtccccacgtctcaatcctttccttttcccccctttttcccttgcgcccttacaaggtggctgcgccccgaattttgccccctttttttttttttcgcttttgtgtttagtataaggaaaagctacaaacctcaaggttgttttatttaaaccaaataatctgagcaagacatatatacattaaaaacaaatgaacacattaaaatttcactattttacaatctaaattctagcaacatatacaaatactgagtgactacagtacatgccgaggtaagataagtacattctgggagaatatcactgacgctcaaaccatttttatttccaatatgtatttcaatacatgtttgtttccacttttcccagtgccacacacacacacacaaaaacaaaacaaaacaaaaaaaaacagtcacaagttggattacattagaattggtgccacagttgactttaaaagcattttaataaccacccaactcttagattttgcagtttagggacttcaagttcagaaccaaaaagcagagaatcgtttcatgtgacatgatgtttctatagacctcttgctctctaggtgacaatgcagagccagggcaaaggtgtttaagctttgtcaccttccacagctttgtggccacattcatatttagataagctcggactctgctcccctcttctggagatggggagaggcaagtgtgtatgtgttgtcatacttactgcattaattcttcactcgaaccgtttacatcagcgaataaacccattgttcaatgcaaagtgcaaacagtgaaacatgaacttaaataaactggactagacccatcacatccaacaggatctatttagatttatagcatttaataaagtataagtcagaattcacaatatcttaaactgtgctgtttccaccagggccgtaatggcagaattcccggggcatatgtcccggtaccgtcgacaggataacttcgtattatgtctgcgctgacgaagttatgcgggcggctagctcgtcaatgannn

SEQ ID NO: 25000 - DNA, 3855 bp, Homo sapiens; identical to SEQ ID NO: 20695
  misc_feature 1, 2, 3854, 3855: n = A,T,C or G

SEQ ID NO: 25001 - DNA, 3677 bp, Homo sapiens; identical to SEQ ID NO: 24153

SEQ ID NO: 25002 - DNA, 486 bp, Homo sapiens
acatgtaatatgcagaggtgtttgtgagctgcagcagtagtgtatcatttgcatcttttgaacaattgtctttgggatccattgtgatgacatctgtctttattggaggaaagataatttcttgatcaactccgtttttattattctcacgtctgacgatacatctgtgttctttgtccagtgacttttctggcaccgttaaccagctaaatttcatgtatgtgtcgttagtcttcatggtgttcccctcctgggatcccagaatcgtgttgctcttcttttcttgccaatgtatcttaataacatcagggaaaaatttttcaagaagacaaaggtatgttccagccttctggagctttgtttcagcaattgaaggaagaaaaatagtgggcttgggggaaacatctgcatcaagttgtttatctgtaatgataagctttgttccgggaccaaataccttgatttttttgcccaactcccccgcgt

SEQ ID NO: 25003 - DNA, 920 bp, Homo sapiens; identical to SEQ ID NO: 24205
  misc_feature 1, 2, 3, 4, 5, 920: n = A,T,C or G

SEQ ID NO: 25004 - DNA, 1754 bp, Homo sapiens
cttaactccggggtcaaacagtcgtcctgcctgagtctactgagtacctaggactaacaggtgtgtgccaccacatctggctcttaaagttttttgtagtgacagagtctcactatgttgcccaggcttgtcttgaactcctggcctcaaggaatcctcttgccttagcttcccaaagagctgggattataggcatgagccaccatgcccagtcctttttgttttaatttttcttcttttttttttcgtattttttgaaatgaaaggtctcatatatttattactgaatgcagtcaaccaacacgttcataagagattcagagagaaaaaatatattcccaataaaacatgttcaactctccagacagtggtgacattttcagcttgatatggtaacatgattgtgaccttgagacagcataaatatgtgtgccatctcatgtgcaattccttacagactcagcttggttcttttccaatgtctccttttggagttgtacctgattttatttccagttttcatccgaatccactggggaatgggacgattttgcttttgtttcttggccaggaatcgcttaatcctgaaagtcttgtgagaagacatggcgagcagcggagtcaagaacacaccacgatggcggagaaaggaagagcaaaatcgtcccattccccagtggattcggatgaaaactggaaataaaatcaggtacaactccaaaaggagacattggagaagaaccaagctgggtctataaggaattgcacatgagatggcacacatatttatgctgtctgaaggtcacgatcatgttaccatatcaagctgaaaatgtcaccactatctggagatttcggcgtgttttcctctctgaatctgttatgaacacgttggttggctggattcagtaataaatatgtaaggcctttctttttaaaaaaaaaaaggccttacatatttattactgaatccagccaaccaacgtgttcataacagattcagagaggaaaacacgtcgaaatctccagatagtggtgacattttcagcttgatatggtaacatgatcgtgaccttcagacagcataaatatgtgtgccatctcatgtgcaattccttatagacccagcttggttcttctccaatgtctccttttggagttgtacctgattttatttccagttttcatccgaatccactggggaatgggacgattttgcttttgtttcttggccagaaaccgcttaatcctgaaagtcttgtgagaagacatggcgagcagcggagtcaagaacacaccacgatggcggacaaaggagaaggggctagacctttttgtttgtttgttttagacagaggtttgctcttgttgcccaggctggagtgcaacggcaggatcccggctcatcgaaacttccgcctcccgggttcaagcaattcttctgcctcagcctcttgagtagctgggattacaggtgcccaccactgtgcccagctaatctttgtatttttagtagagacggggtttcatcatgttaaccaggctattattgaattcctgactattgtttctcctgtttgctgttctcttcactgcagcacgaacaagattaactttttttctgtaaaactgatgtggatggtctgcctgccgcttcatgcatcactttcaacattgtcttgtcacaactcaaaataagttattaatttacaaactgtttattcttttgggcatcaacttcatagcccggacgc

SEQ ID NO: 25005 - DNA, 1033 bp, Homo sapiens; identical to SEQ ID NO: 22857

SEQ ID NO: 25006 - DNA, 341 bp, Homo sapiens
actttgtagaacacaaagctgatttggaagtgtcaaaccgacatgggcatacgtgcttgatgatttcatgttacaaaggacataaagagattgctcagtatttacttgaaaagggggcagatgttaatagaaaaagtgtcaaaggtgagttcagcttctttgtttttctaaatgtctaccacttattttcaggaagtttgatacatcattataagcactggtgttgagtaaaccagcattgacagacctgttttgattaggtaatactgcattgcatgattgtgcagaatctggaagtttggacatcatgaagatgcttcttatgtattgtgccaagatgg

SEQ ID NO: 25007 - DNA, 502 bp, Homo sapiens; identical to SEQ ID NO: 24981
  misc_feature 502: n = A,T,C or G

SEQ ID NO: 25008 - DNA, 2720 bp, Homo sapiens; identical to SEQ ID NO: 22599
  misc_feature 2719, 2720: n = A,T,C or G

SEQ ID NO: 25009 - DNA, 919 bp, Homo sapiens
acgcgggggggcctgaggcgaacaatggcggagctgggcgaagccgatgaagcggagttgcagcgcctggtggccgccgagcagcagaaggcgcagtttactgcacaggccacgtgcccgtagaaaagatactcatccactgtgggttttggtttcgccgtcaccccactgcctcactggattgtgaggatcatatgcgacaatgtatttgaaaacgactagaacattatcggaggaaggtggactctgaagtagtcgctgtagactatggatgtagaacaagggtttggagcccttcggacatggttctaacgcggcctgacttcttgctggctacatgaccttggactacataatcacgcctcttaaatgggaggtgatgacagctatccttgaggaccttagagagaactgatttcttagtacccagcctcacaaatagtaagctcttggtgcatcacttcatggagttatgttgggataaatgtgtggagaagccagggaatcgcctagactctcgcactgaaaattgtctctccagctgtgtagaccgcttcattgacaccactcttgccatcaccagtcggtttgcccagattgtacagaaaggagggcagtaggccatcccccaggagaatgacagaagcaaaggacttgttactaagcagatttaagggtcagtgggggaaggctatcaacccattgtcagatcagcatcaggctgttatcacgtctggtgggtgctaacacagtacaagcatgacactgttcacacgtagtttgactccaaaaatcatcacacacacacaaacaaaacacacggcggcaatatatatacgcgaggtccatactgctagtaaaccagtgcgccaatgtgacaacgatttcctcgatcaacacttctcttgcaccagagtca

SEQ ID NO: 25010 - DNA, 2821 bp, Homo sapiens
  misc_feature 1, 2819, 2820, 2821: n = A,T,C or G
nccggcgtcggtgtaggttactgctgtctcgttcgtacgacgatccggggtcgtcggtgctgcggggtggctggtcgtttccctcttgtcgtcgctgctcgtgtgtccctggtgtgtccgcgtctctgttgtttgccctctggggggtcttgttcaatgtgggtctctagttggtcctctgtggtttttgccgcggcccgcttttttgtgttggttgtctttctttgcgcccgttatgccttgaaatgtttttaatagaattggtctagtaatcgttcaggatttcggtgatgggccctccctgtctggacactgccaacccacagctggaggggcacttaaggcacgtcattttgtgattagaattacacaaaatttgattaatattatagctgcaaaattaacatacacaattttcactcataatttaaaatattttgatgaaattctttgctttcacaatagaagatcaatggtacacagtatattgaactctgtaacaaaattatttttgagaaaatacagaagtgagaaatagtgatttcctcaatttgtttatagtctatcacaaagtaggccaaagttcagtattaaatagatatcctaataaaagtttttacaagttttcctaaggaaatacattcataagactgtttaccttctgtttgacagcagtgacaggaacgtggggatccccactcatgacgagtccctagcactcagcccctggcacccacagccccggcgcgctccgtcacctggtagggagcagcctgggctgccgtgagtgaggtgttctcactctggttccgtgtttgtgtttagcctgtgcaattctcgtcaacacagaacacctgcctgcccacccccggtgctgaagaccgaccagtcaaggaggtgttggtgggagtgttgtgttcaccatgtggagatcaggcggcgattaccgcatcttctttgctgactttggtaaccgggtgtccagggaggagcgatcgggagtggccaagcagttgcctggactcagcttctgactctgcagctgggagtcagatgcaggcccaagggtccaggggagttgttcagcgcctggaatcgccatgcactgcgcggtggaccgcacgacgctcctgctctgttctcccaggcacagacaggcacttggaaggcagctttgctcctctggccacccggaaacctcccagcagttcagatgggacaaactgggggcctgtcagaacagccacttgtgccgggaaggccaggccccggcctgctccgatgaacgtcaggacggtggctgcagcagggaaccagggctggccttggatctgtccagtagggtcactgactgggcagggcttgctgcatagaggatggctgcattttgtgctcagagttggttgaaatggctacgaagtgtggagaataaccactgaatcccaaaaagtcactgcgcttgatctgatccaagtaacagtgactgcagttagggtcgagagcttctccgaagcagcggtcatgcaggcttttgtgtggctgacgcttccctttttcacaacagtaaaaagctatcaatgggaaattgtggacttttcccaccagggactcaatggggactcaatgtgcaatattcagtcaacataaaactctttaagaactcctcctgactggtgactgtcaacacttgatctgaaacgtgaatagtttaattttcctgagcaaggagctgcgagtctagctttagaaaagcccctaggagtgtccacctccaccacttccaccgtgcaggcaggtttcaggtgggttggaccctgtgggacttgccgtctcagggatggatggactccgagcaccctccccggctcagcacccgcggcctccgcccactcaatggactgtgcctcccagagcttgggctggatggtctccctgcagaggaccaggagctctgtccaaggcctcgccctgggacgctggaaggggtgggaagggtcaggggtccggggtctaggacaggctcaggggtctcagcaggttctccttggagggcctgagcctggtaggggggcggtgccctgggcccctccatgccccctggtttgttaagggggacagagcagctgctgggccccaccatccacttaaggactggccgtgattcttggcaagctccgcccgccaggccacctctcacccagccagggcaccccgggcgacctccgcgccaggtgcgacagctcaggccggagacctcgtctgtggggacgggccgtgtccggggccgccaccctgagaccgggcgcgggcaggacggaacctgggggggaaacggggcaggtactggctttaggagtctaaatccccaaacgctgagcagacggaagacgttcctgccactttacctgcagttcaaagacctggcgagggcctggaaacggcgctcggcccaggccgcttgcgggcgctgggcctgcagccgctgcaggtcgggccctgagtcctggcgctcgggaggtccctgagtcggtccccgagtcagtccccgggcgcggggctcggttgggggggcccggaaccttgggctggtttcacgcaaatccgtttggggcgagcctcggtttcccggcagcggtgggaaagggcgcgagcggccagccatggcgcgcggacccttcccgccggcggcgtcacagcggcgtctcctcctgctccagcgcgtgcggcggtgcgtggcacgagggcggcagcgacgccagcttcagcagcgcggggcggcgcgcgcgaggccgctggaacgagcgccggctgtgcacacnnn

SEQ ID NO: 25011 - DNA, 1715 bp, Homo sapiens; identical to SEQ ID NO: 23747

SEQ ID NO: 25012 - DNA, 1406 bp, Homo sapiens
  misc_feature 1, 2, 3, 4, 5, 6, 7, 8, 9, 10, 1282, 1283, 1284, 1285, 1286,1287, 1288, 1289, 1290, 1291, 1402, 1403, 1404, 1405, 1406: n = A,T,C or G
nnnnnnnnnncaccacaagtctcattttatattgctttacatgaatctgtattggaagtatagatttcctaagatacctttttgtactaaaaaataatttcctgtgcatcacaagggggattaaaaatcaccaaagtactgaaggaacacgtgctttgattattattcccacctgtttcttttttattataaagtggcaatttgtaccatcattagaaatgtacattaatgtataaagttttgcattcaaatctctttatttttgattacctatgactaaagaccacaaatcaaataaaaactcatataatatatccttatttcagaagcatatgtatatatacacatatatatttgtagaacaatccactgttttaaatgtaattttgacttaaaaaatgctatttacaattttatgacagagaaataacctcagccttttatggtattaaaatgagcagggaatttttatgtttgtgtctcatcttgtgcagatgaaattaagcaatatcatggaaaaccttctcaagagcaaggccttgtagactaaggtatgagggtgaaatcgatttgctatttctgggtctatgtttttaaaaaattactggcaacgtagtcatacttacttcttcaccaagaaatcagtgctcccaaattaggaattccaaacttttcaatatgcaacctttaagtctttccttgtccttactcttgtcttaatactctcatctcccactagtggcaccgcaggactaccaatctagatattagattgttgctattttattaaacagaagagtcttagttcttttaaacaagctttctgaattagaatgaggcccataaagcatcacattgcattacattgatatctctttattgcgccaatccataatggctaaaaatgtgctattaaattgtatgtaaatttcaaagccaaaacgattactatgagaataggatggcttgctgccctccaatttgcggaagcacaaaagtctctgaattagcaaatggaacttcagctccatttgtttctatactttattctgcgagcttaaaaatcaagtaaggtgtattgaccagaaagctattttgtgagactctcaaaagttttgttttcattcttaagctcgttgattttgaaacttattccaataagaactcagaataaacatatcttaatttatatctgcgtagccaattgcaaagcattactaaaagccatattttttcctgggaaaaatcccaatgcaactccaaaaaaaaaaaaaaaaagttnnnnnnnnnnattttacttaaaaaggaaaagtgacgaatgaattgaagacccagaaatcagaacaatgaaaatcaaagaattattatacttgaaataagcctgaaaaacaaagtactaaannnnn

SEQ ID NO: 25013 - DNA, 3731 bp, Homo sapiens
  misc_feature 3721, 3722, 3723, 3724, 3725, 3726, 3727, 3728, 3729, 3730,3731: n = A,T,C or G
acgcggggcccgtgggctacggtatccggaagctacagattcagtgtgtggtggggcgcggcaagtcgggggtagcaagatggccgccgctgaggaaggctgtagtgtcggggccgaagcggacagggaattggaggagcttctggaaagtgctcttgatgatttcgataaagccaaaccctccccagcacccccttctaccaccacggcccctgatgcttcggggccccagaagagatcgccaggagacactgccaaagatgccctcttcgcttcccaagagaagtttttccaggaactattcgacagtgaactggcttcccaagccactgcggagttcgagaaggcaatgaaggagttggctgaggaagaaccccacctggtggagcagttccaaaagctctcagaggctgcagggagagtgggcagtgatatgacctcccaacaagaattcacttcttgcctaaaggaaacactaagtggattagccaaaaatgccactgaccttcagaactccagcatgtcggaagaagagctgaccaaggccatggaggggctaggcatggacgaaggggatggggaagggaacatcctccccatcatgcagagtattatgcagaacctactctccaaggatgtgctgtacccatcactgaaggagatcacagaaaagtatccagaatggttgcagagtcatcgggaatctctacctccagagcagtttgaaaaatatcaggagcagcacagcgtcatgtgcaaaatatgtgagcagtttgaggcagagacccccacagacagtgaaaccactcaaaaggctcgttttgagatggtgctggatcttatgcagcagctacaagatttaggccatcctccaaaagagctggctggagagatgcctcctggcctcaactttgacctggatgccctcaatctttcgggcccaccaggtgccagtggtgaacagtgtctgatcatgtgaaacacaacacgttttcctctctgagtcccagctatggggaacatctggagtcagcagaaccattgggacctgaggcaggagtgtcacctgcgggagaagtctgcccgctgccctctgtcatcccattcaagattgtgccataccagctgaggtttttcctctgtctctctaggaatagggtctgtttcacaggccatttctgtgaaccctactccattgtggtttctgccactatcaaagttccagctacctgcaaggtgaaggaaggcatcccttttggggcatgcactttctttcctttctcaaaataatgttatatgtggccacactgatgttcacctttacgtccagggtctttgtgccttgtctctactccctctcttggatctggggaggaggggcagagacctgggactctgtatttctatagttctcctggcagagcctttgagaatggggagaaacagcctgggctggggctacaggtctgtcactatgctctcttgccttcagacagaccattctgaattctctaaagggaaagggcttttgcatctaatcacaatagagttgaaagagaggccttaggattctcctctctctaggtgctgagccctcacctccctgttccaggctgagaactcaaatggttaccctgcttcttcctacaatgctgtgtgatatgggtgaacccagcccctgaccttcctctatcccctgcccatcctcccttttacctcctctcttttttaaacacctgtttatcccaacctttttgagctcaagctgtgataaagaagggcccatcctatttcccctcatctagtccatttacgattctcactgactccccgtcttcctggcagacacaaataaacccagtgtcaggtctaggaaattaatggctattcttccccagatacattctggcttatttgagatacatgattctcttagaatcctgtcccttggttcaggaaagtagcttggaaaaggagtaggggtatagcttgggtcccttttcctgcaaggccccatggggcagaatataataaatattctgagtgaggagtgtggtctttttctgatcttcctcagcttccgtaagttgcagagtgaggtatattaggagactagttctacacaatattgtaatgctgggttccatcaacacccaccttccacaactcagtctgcacctcagttggcaaaggagactggatggccatctttcctcatgttcccttgagtatttcaatgtagaaagcccttcaagtggtattatattttaaccttttacattattgttattaatgttagtaatatattgttatgttttctaaattatttttctttaagctgacgtggctttttttctgtggctcccagtgggtctacggaccttggctgacatatgttggtaggtactctggtcagctcagctggctgtcctggttcactcagaagataagtctctccaaagcaaattcacatgcattatgagtcgctttgagcttctgacatgtcacttgccccgaggttaaaacttttcaccccttgaagaccttacatgttttatggtattggtgaggaaggaaatgttctcaaggtctcaggctatttgggaaattccaactcctataccttaccagagcatggaagagcccagatctgaatgtaaaacgtctctgttctgccagagatggaaaaaatacaggtatacttgtgatatagtcatggggcttcagtgtcactattttctccttaaagctccagccaaaaactggacaaggatagagaggaggagggaagaacaaaagagcccttctctatgaaccttgtgccttctgtcctaccagttttcttttacagattctcacttctgctagcctagccagggcttactccaggaatctaaatagatgccctagtccactttatctttgttcccaaggcactcatttttattttgattttgattgaatgtgagcaggttgacctcaggtcacactttgttccaaaaacttttggaattattccaggacttgtggtggagttatggtactctagggcagtctttctcaaactatgtatggtaaaggaccaggttttttgttttccagtccttcacttatcaatatgcattcctattgcccatgacaggtatggagttcacactgtgtgctgccgacccggcaagtttgacagcacccaaactggccagactgttctgtaggttaagtccattgatcatgtacttggatatcacagcaacattgaaatgctaaaaagtttttaaacactctcaatttctaattcaccatgtcacagactggtgaaaaaaaaaaaaaggtgttcactgaccagcacaagtctgcagatcatctttgagtagcactgttttggggccctcggtctctctgaagaccctagcagaactgatacctacctgtatctcttgttctctcctatttgagtttcacttccagagaacttgttcttcagcaagaatgtgtcactagtaaggacatctctagcatttctctagccttccttttctgctgctcaaaaataatcgttacaaagcttaggtttaagctgtatatgaaatatttatgcgactctcaaactttaaaggagttgctcctttgttccaaaattaaatgtgttagataaatttgtgattgtatgggtggcttcatgaattaagaattgaattaatacagactttttgataataannnnnnnnnnn

SEQ ID NO: 25014 - DNA, 988 bp, Homo sapiens
  misc_feature 763, 988: n = A,T,C or G
gtccggttgtacaggtttttgttgttgtttttattgcccccaaaattacatgttaatttccatttatatcagggattctatttacttgaagactgtgaagttgccattttgtctcattgttttctttgacataactaggatccattatttcccctgaaggcttcttgttagaaaatagtacagttacaaccaataggaacaacaaaaagaaaaagtttgtgacattgtagtagggagtgtgtaccccttactccccatcaaaaaaaaaatggatacatggttaaaggatagaagggcaatattttatcatatgttctaaaagagaaggaagagaaaatactactttctcaaaatggaagcccttaaaggtgctttgatactgaaggacacaaatgtgaccgtccatcctcctttagagttgcatgacttggacacggtaactgttgcagttttagactcagcattgtgacacttcccaagaaggccaaacctctaaccgacattcctgaaatacgtggcattattcttttttggatttctcatttatggaaggctaaccctctgttgactgtaagccttttggtttgggctgtattgaaatcctttctaaattgcatgaataggctctgctaacgtgatgagacaaactgaaaattattgcaagcattgactataattatgcagtacgttctcaggatgcatccaggggcttccttttcatgagcctgtccaggtaagttactcctgaccactaatagcatgnccattcgggcttcctgtgaatgatcaacaaccacaaatattcctggacctggtccttatttgacaaatgactcttaaattcctgagaaggggcgcaatgtgaggccagcacaaaggtacacatcgggtgacggggcctagacctcagaagggcccccgaatcattttataacacacgggctgggaaatgcccgaaacatgcacacgaacattttgtgttaaccan

SEQ ID NO: 25015 - DNA, 910 bp, Homo sapiens; identical to SEQ ID NO: 22341

SEQ ID NO: 25016 - DNA, 399 bp, Homo sapiens
  misc_feature 1, 2: n = A,T,C or G
nnactctgtggttgaccacttcttcattagttacttgcagcaagacaccttcctgccaaaggaaaaaaaagtatctgaagaagtttatcatgtttgtccaaaagaacctaaacaacttcagtggtggtcttgggatcaaagaagactcattggtgtatagagtaagccctgagtatcacattcctgtaaaggcaataaagccgggcaatcaaactgatcatatctaaggaatgaatttcaacagccaacctacaactttctcttcagggtaagacactgaactagaattaccacatttaacccacctatttagtaccacgaagggtgtattctcatgcacaaccgcagctcggaatttcagcccacacacatcccacctcaagctttaaaaggctgagt

SEQ ID NO: 25017 - DNA, 2538 bp, Homo sapiens; identical to SEQ ID NO: 20316
  misc_feature 2538: n = A,T,C or G

SEQ ID NO: 25018 - DNA, 2141 bp, Homo sapiens
  misc_feature 1, 2, 3, 4, 5, 6, 2140, 2141: n = A,T,C or G
nnnnnnaatttatctcctgtgtttcattgctgattattcagcatactgttgattcgtcatttgcaaaacacacataataccgtcagagtgctgtgaaaaaccttaagggtgtgtggatggcacaggatcaataatgcctgaggctgattgacgacatctacatttcagtgctttttccctaagctgtttgaaagttacgcttttctgttgttctagagccacagcagtctaatattgaaatataatatgatttgtcaggtcttataatttcagatgttgttttttaagggaaattgaccatttcactagaggagttgtgctggtttttaaatgtgcatcaagaaagactactgaaaagtattattttgtaactaagattgctggtactattaggaaaaatctgtgtgtattgtatagctctagctgtttgactatctgtaatgaaaatgctgcacttcaactggtatttcattagagaaccgtgtgtgtgcgtgtgtgtggtgcctttgagcaactttatttatggttaccatatttttaaaaagattttttgtcagggtgacttaacatggactcttatagggtattaaaacaatctagattattccttttcatcctaaataagcctaccaaatttcatgctgttggtttgccatgaatgatattacttcctacattatatttgtgttttttcaaatctgctatggaatgaacttattcctagatttggatatgtaagagaaacctgcagtcatcttttgatttataaggcaattcttgtggataaatagtgatttctcagcctctgacccattttataactgaaatttagccctttagagcttgttatatctggttttcctacgtttttctatgtaatattattccattccagtagcattattgatagaaatagtaagtatttatggaatagtaaaatatggacaaattacgtgtgtgacatatctgtcaatataagttagaagcttattcttggtttgtgtaatgaatttatgtattgtagtgaatacctttactggtgtgaagataattatgcacaaaccctcacaatacgcgttaacattgaaacctgtgaaatgtccttagtttgggtcatataaagccaaccatttttgaggaccatgtacctagtgctttgaaaactctaagtcactatatgaatatgacaatatgtgcacatttaaaattcagagctcggcattgtgatactgatgcagaagctagtagattggttaaaagtctggacttctgtggcatttttttcgtgacgtgataatctatcataagcagacctaagcacagttttatgaacacaattttgcccatgacattgcctacaggatttccagatgtgacttgcactcagaagatcagtggtcaacttcagaagctcttccacgcttagatcatgtcttcagaacttagatgtgaaaatctacacactgggagatgctgtgagccccaaggttttgatggagtttgcttggaatcctcttgacttcatgccacattgacgtgaactttgatgtataataagcagcagcaacttcatgtgaaaatatggtcaggtagttatatgtaaggttacgtggtccagtaatgtcttagattgataaattaggtatggaatccatcagtgttacgtgatgagaataggtgaacacaccttgtcagtgatgatgtaaacttctctccttggcaggacatgggcaaacatgctgattggtgcaaatgtggtgccgagctgtccatagctgcagtgaaagatgaagagcaagaccttctctaggttttctagctttcattaaatgtatttttttccccagagctaatttgaaagttgattggaccactgtggatggggtgtcattaagaatgtgggaaataggggccgagtgcggtggctcacacctgtaatcccagcagtttggaaggccagggcaggtggatcgttgggatccaggagggtctcgaccagccgggggaaacatttctggtctacaaaaaatacaaaaattagccaggcagggtggtgcatgcctgtagtcccagctacttgggaggctgaggcaggagaattttttgagcccaggatgcagaggttgaagtgagccaagann

SEQ ID NO: 25019 - DNA, 541 bp, Homo sapiens
  misc_feature 511, 525, 537, 541: n = A,T,C or G
acattgtttttctcctgctgttaattaggtgtatccccaagacaataaatacatgaatggaaaagtatattctgtgttttaagtctctttaataaaaaacaaaacaaaatccaaaaaaactcctaacatggcaactcaggacattttaatccttttttttgttgttgggcttctgataggatccattttattgattccataaatatttagtagactttagacatattaatacattgtagtttgagttaatttgcattaaattctgttttttcccccttaggtatagattgtctgttggaaaaatatattgcttgtggatttcttggggagtgggaaggtgaattatacctgttgtctctacagtccactaccttccacaccctagggcagtggtccccaaccttcttggcaccagggatcagtttcctggaagacaattttctgtggatggtgtggggatggttttgggatggactgtccacctcagatcattagggcattagttagggtnttcataaaggagtncggagttaggantccn

SEQ ID NO: 25020 - DNA, 1327 bp, Homo sapiens
  misc_feature 1322, 1323, 1324, 1325, 1326, 1327: n = A,T,C or G
acactctcaacattccaataagttttgaacttggaggcacttagaacataattacatttctaattttgtttcagtttgatatgtgtcccttccttcctttttttggtagagacagtgtctcactatgttgaccaggctggtcttgaacacaccaggcgtaaagtgatcctcctgcctcagccttccaaaatgcaaggattacaggtgtgagccactgtgcctagcctatacttcctttcttaatcaactttgtttttatttatttatttatttatttatttatttatttatttatttatttattgagacagggtctcgctctcttgccctggctggagtacgagctccgggtggacctgcgggaccatggggagacagcctttgctgtctatgacaagttcagcgtgggagatgccaagactcgctacaagctgaaggtggaggggtacagtgggacagcaggtgactccatggcctaccacaatggcagatccttctccacctttgacaaggacacagattcagccatcaccaactgtgctctgtcctacaaaggggctttctggtacaggaactgtcaccgtgtcaacctgatggggagatatggggacaataaccacagtcagggcgttaactggttccactggaagggccacgaacactcaatccagtttgctgagatgaagctgagaccaagcaacttcagaaatcttgaaggcaggcgcaaacgggcataaattccaggaccactgggtgagagaggaataaggcccagagcgaggaaaggattttaccaaagcatcaatacaaccagcccaaccatcggtccacacctgggcatttggtgagagtcaaagctgaccatggatccctggggccaacggcaacagcatgggcctcacctcctctgtgatttctttctttgcaccaaagacatcagtctccaacatgtttctgtttgttgttttgattcagcaaaaatctcccagtgacaacatcgcaatagtttttttacttctcttaggtggctctgggaatgggagaagggtcagatgtaccggggtagttgtttagaaccaagcgtattttacatgaagctgtataattaatgtccttatttcgtagcaagattactgtgtccttggaaggcatccttttctacttcataacacggaaccgaaagcatgtgttccttaggatgagacctctcacatcaaagggcgcgaggaacaaggtttaaagttctccaaattggggacggggttttcaaaccaccttaaaacaaggggcattacggggagcacctttagaaggataaaacnnnnnn

SEQ ID NO: 25021 - DNA, 1613 bp, Homo sapiens
  misc_feature 1: n = A,T,C or G
naagcagcgcagtcggtagatgagcgccgcgtgtcccgctttttcatcgctgttcctccctgttgattaggggtccaacgccctaccttgacggtttccggcagcgcgtcgtgcttctgacccgatgtggtccgaagtcacttgtctcataaaagtaagttgtgtcgcagctctcccgtagtcctcccgaattgctctcgtccaccctggtggcacaagcttaaacctgggcatagatgttttagccagcactgccttggtttcccaagaggacccagattttaaagttaacatgaatccaatggtgaggataatctcaaccttgtggcggcctgaagttctgtgccactggactgactggtgcaggaggcctcatgtgtgcactttggaccacactgaggtaataagcacttcctgagggacccagagccctaactctaaatgtgctgtagaaaaagggccaagtcattgactgcaccactccttcagccagaggtagaaaggatttactcttcagccatctggtagagccccaagaacaagttacatgtggacaaagggagggagaggtatcatggtgattaataaattcaaacaaagctgaatgataagaccccaggatggaatacagtctgagaaaggcctgggcaaagggaggcagagggactgaaggaagcaggtcaaggaagatacacccatggtagcctaggaaattggcagtagtgttggtgggtggggaaaaggagggtttggctgtatgcctagctttcacaaggtaggggatgaggaagatgatcatgatattgcacagaggacccaacactgaattgtgggagctagaggttgcttgaggcaaagtaaaaaggcttcggacactttcaaaaggaggctggccaaaggcgtgattagggactccagtaatggacatactagaggccctcgggcacctcaagccctgaatgggtcagcagctccccatcccagagagcaaaggcaggcaccactggaccccggaaatctgtctgtagcgtgtgaaccacagagacctggctcacatccaccaggctcagcttctgggcctcatactccagcaacagccccaccttctctggctgcccaataccctcaactggggctttctcgttggccaacatggtgtaccacttgcgctgggcataggtgaacacccaggaacgatcatcaacaccaatgcagctatcccgggacatgtccacatctgccactcctatccggaactgctgggagcgcttcactgtcacttcccagtagtgtctgccactggtgaccgctgtgtctgccagcaccactgcccactcccggaagcgctccacattcaaggccaccttggtgggctccaatcccaccaagccatatttgacacccgtatcatctctgaagagtgccaggctgctgtgggcggttttttcttccagtttgaaactgacgcctctctgggcctctgtggaggcaactcccaatcgtttggctccccagcggcacaagcgcaaagaacgtgcaaaaagcagcgccatcttgcgccttggatgaaccgggcacgcctcccgcttacagacacagccatctccccgcgt

SEQ ID NO: 25022 - DNA, 614 bp, Homo sapiens
  misc_feature 524: n = A,T,C or G
acttcttttttttttttttttttgtggtgggattatgtgcctcccattcactagaaaatgagaaaattgtctgggttccaaaatattgacattgaatggatcaatacacacacacagacatatatatatatgcacacatatataggcagttgcatgctagcatgggtatttttataacaatataactgagttatattggaattataaatattttctgtcacttaaatttgttctttgtttagcctgaaaacctttatggctcaagatcagattcctgactaacccctctcttagagctacagcgagctgcattaccagcttaaaacacttcttagggattaaatatagatgtaatttttcaaaatcgtttttaatttaaactgtgttttagtgtaaaattgttaaccttgtaagatggataatgtgtataagaatgtaggccttaactatttcacatgagtcaaaacaaagcagctgtaaaaaaataattggaagcacaagtgcatggcactgactgaatgctngtaatatttctaaaagtttctacattcagattatatgcctgattcatagtaaaatacctctaataaacactggtttatagaaaacctgac

SEQ ID NO: 25023 - DNA, 1710 bp, Homo sapiens; identical to SEQ ID NO: 22925
  misc_feature 1, 2, 3, 4, 1706, 1707, 1708, 1709, 1710: n = A,T,C or G

SEQ ID NO: 25024 - DNA, 1929 bp, Homo sapiens; identical to SEQ ID NO: 22972
  misc_feature 1, 2, 3, 4, 5, 6, 7, 8, 9, 10, 11, 12, 13: n = A,T,C or G

SEQ ID NO: 25025 - DNA, 1834 bp, Homo sapiens
  misc_feature 1, 2, 3, 1832, 1833, 1834: n = A,T,C or G
nnngagatggggtctccctatgttgcccaggctggtcttgagctcctgggctcaagaaatccttccacctcgggctcccaaagtgctgagattacagggtgtgagctaccgcacccagccatgaaaacttctgtaaatcttaactatcgtgttctgcttaaagtgaggtacacataaagtttcctgtgctttgtttttgtaggaaaaagtacatagtttgtatctttaccttacggagtctatgagatttgagaatttgatttcactttttgtaacttaacccacagaaaaggacattaacttagcagataggaccaaggactgaatgacttctgacaaaaagcgtttggtctatccttcacttgttgagctacaaccatgcattacacttctcagctgagctctcaaagagctctatgccctgtgaaaagcagtggctgagttggatgaacacatagcattattaattttgcactgggaaaacagattatgacaggaccacagaccacaatataaaaacttggcagttctttggtgtgatatattttaattagtatttgcaaataatcagagttacttgtgtacataaacgtgtgtttcacaactatggccagatgcaaccttttggtctgtttcaggaaaagacctattattccactaacaattatgctgccttagaaacataatgggagtgtaattgaagaaagcatgtctcagaaggttttgatatgcagaactggaagctattgtaattcctacatacatttccattagctatgccttatgtaatgtgagtgcagatttttacaacttagagttcccatcagtgtttttttgccacatcaccgggtttcttattttactgttttcttttcaactttgggtgctttatttccattctctaaaactaagtttcttgctcttacgagacttagtgttccttttgaacccaggtgttccacctgacagtgtttgtctttcatagactttccagaatagacatagtcaagatcagacacgtgagcttctctctcattttaatgtgaggaaaatcatctttcagagacaaggcaccgcttagaaatgtatgtccaggtatgaaagaacctttttaaaatggctggttgttccagatccagatttctctgcacactggacttcgtagagtaagtgtggtagacaaagagactacactgcacaaccaccagtgaatatcattgctaagaagactttgggtcgtgtttctcagccactctcacagcttttgtagacttatttgattttgaaacaagcagttagctaaatctattttccttttatgcatatatgttaattggctcaacttaatatggtgttcttacagaatatgagcccatttgaaataaggttttaggcaattttgctgttggctctgatttgtatatagcaaatttaaagttacagagtgtttcctagatagaagattagttcatttggttcattttgtctttgaagcaagccaagctcatgagccagttggttatttgtcataaatgaacacccatcactatatgctatgttgaggggagcacgtctgatctcgaatagttgataacgtttatatcttgtaggcaaataaattggaaacctaatcagatgttgcggatgattgggaccaggctggattgggtctgttggcaccaggttttttcggaggcggggggcgcacttagaaggggggggcccgctgatatgtgggcgcgcgccaattatgaaggtcccgccaatggaaccgttaaaggagattgtcctttagcagggattaccaagggtggagctatttacaatcctgnnn

SEQ ID NO: 25026 - DNA, 1289 bp, Homo sapiens
cgagagaaataggaaggtcagagaaaacttatgtaatgcatattgactagtacaaaagaatcacactaaaaatgtgtatatattataccagaaaaaaaatatataatgagtaggagaggttgaaacagaaaaataagcatgggtgacctaggaaaagctgttgggtgagagagtacaaccctgaaaaagaggaggctggtcacttgtatagacttatgcaaagcttctgctttgagaaaatatgtggaatttggcaactccaagtagagtcaccacatgaatgtttatcttaaaaactgtttacaagcacactggtggtaactgtggcttcccaattcgtaattataaacaaagactcaataaacatttattgaatgggatggctcaaactgtctgctgctgtgcacctcccacaaggcacagtagtaggtagctatgtcctgtttctctacattgtgaatggtgagagtggatgtagacgtttcaggtatcctatccacctcaaatttgcctgacggaatgccggattcctttctgacagtgccgtcatatgaaatggacaccaggaactgtatgacttcaccaggtctctctcgataccaatatacagatgttgcagaaattgttattccagacaccacacattccaggcgggctgtttttgacagcgttttagtactggaaatttgaggttgctctaggtgacctgcaccatatacacacagagccccaaggactgccagcgttgatgtgtggagcagtgacagcatgtctgcaggcactgtgctttctgccagggcagcctgaaatcaccgcagagaagcgttagacctctgtggcttggctgagtccaccaagtcaaacttcccatgggtgagggtgacatggggccccctgcatcgttgtaaagcggtgtcctcaccacctgttagcacttccagtctgtgtgaagacagtcctgcaaggtctgcagcctgagatcagaccacatagtttagacggccacctcagaccacaaggcggccaccccagcaagttgtcaggctggtgttgttggttgctggggctgtgacatgcagcattgtcttctgagagcttgtcttcaaccagctggagagatgttggtccgtcaagccgcttagctctgctcagctacccacacagcctgcagcaccgggtccttctggtcaccttcatgaggctgggccctccatcccagtttgtttgcttctgttgaagattcaggttcctgtcccctccctcagccacctgaataatgtacctcggcc

SEQ ID NO: 25027 - DNA, 1227 bp, Homo sapiens
  misc_feature 1, 2, 3: n = A,T,C or G
nnnatcactactattgataccactgacagacatgtaccgtcttactggcgtattactccttcacgttctcatcacctgtatagtggtctgtcgcaccgcatctcggggagagtctctcttcgaggttcaccctccgttcgctctccagtgtctgtccgggtccccccccttgtggtgcctctcttctagagcggggctgggtgcccccgcgttctcctccgggaaaatctctttttgtgacgcccacaccgtgggaacctggtgttccctctgaggacccgtttttaaacccctataggttcccccgaccattatggaagaaatccaaggcttctgaaagaagtcgactgttcccacagtctgcttttgggtaaccccatccctggggctcgttctggtatttaagagcttgataaccactgtcagttttgcttccaaggagccattcgctgaaagggacagctacaataccggatgctgacttctgctctggcatggagatacagcctctcttctccaggaagggcccaatatttgctgaactagcatgagccatcaagtgctcaggaatttgaatggttttgagagacccaaatgtggtgatggtctggcgcagagtaattgtgtcagcttcaaagagcaggacagttgaatcttcaggcttaagggtcaaactgcccagtctctccaggcacacagagacttgattggctagatctttgttttgggtacactccagttgatgagtaagacaattgaactggcccaataacgagtagagctgctgagcctgctgttgaagtgtctcctctttaagctgataaataaggtccacctgttcatacagccatacctcacggcttctaagacattccaggtgacggcttatgcaactgtgaatctgagctttgacctctcgcaagttatctttaatttgctgttcagcccggagaactccaccaatagcaagctccaagtccctccgtgcatcactacacctcaaaaggggttctctattactggagctgccactctggtcttggaaggtattcattctcctcactgctccaggtccgagtgcctctccaggcgatccgaggagaccttgggtggactgagacacggccccacactaacctacggcccaaaggcagagttctcgcgacaacacatttttcctcccacacctcccgccatacgtccgacagtctcgcgagatccccgcgt

SEQ ID NO: 25028 - DNA, 1621 bp, Homo sapiens; identical to SEQ ID NO: 22561

SEQ ID NO: 25029 - DNA, 286 bp, Homo sapiens
  misc_feature 1, 2, 176, 177, 178, 179, 180, 181, 182, 183, 184, 185, 186,187, 188, 189, 190, 191, 192, 193, 194, 195, 196, 197, 198,199, 200, 201: n = A,T,C or G
nnggcctcaagcgatcctcccacctcgacctccccaaagtgctgggattacaggtgtgagccacctcgcctgggcccccttctccatatgcctccaaaaacatgtccctggagagtagcctgctcccacactgtcactggatgtcatggggccaataaaatctcctgcaattgtgnnnnnnnnnnnnnnnnnnnnnnnnnngtgtgccagttctgatggcaaagatgataaagaattatgccatgtatgctgtatgaagaaaatggacccatcaacttgtgccagt

SEQ ID NO: 25030 - DNA, 4003 bp, Homo sapiens
  misc_feature 1, 2, 3997, 3998, 3999, 4000, 4001, 4002, 4003: n = A,T,C or G
nnatcatttcaggccccggacaggaggcagtgccgcttcggccgaaggcccgagcgcccgaggcgtctgggatggtgtgggaccggcaaaccaagatggagtatgagtggaaacctgacgagcaagggcttcagcaaatcctgcagctgttgaaggagtcccagtccccagacaccaccatccagagaaccgtgcaacaaaaactggaacaacttaatcagtatccagactttaacaactacttgatttttgttcttacaaaattaaaatctgaagatgaacccacaagatcattgagtggtcttatcttgaagaataatgtgaaagcacactttcagaacttcccaaatggtgtaacagactttattaaaagtgaatgtttaaataatattggtgactcctctcctctgattagagccactgttggtattttgatcacaactatagcctccaagggagaattgcagaattggcctgacctcttaccaaaactctgtagcctgttggattctgaagattataatacctgtgagggagcatttggtgcccttcagaagatttgtgaagattctgctgagattttagacagtgatgttttagatcgtcctctcaacatcatgattcccaaatttttacagttcttcaagcatagtagtccaaaaataaggtctcacgctgttgcatgtgtcaatcagtttatcatcagtaggactcaagctctaatgttgcacattgattcttttattgagaatctctttgcattagctggtgatgaagaaccagaggtacggaaaaatgtgtgccgagcacttgtgatgttgctcgaagttcgaatggatcgcctgcttcctcacatgcataatatagttgagtacatgctacagaggactcaagatcaagatgaaaatgtggctttagaagcctgtgaattttggctaactttagctgaacagccaatatgcaaagatgtactcgtaaggcatcttcctaagttgattcctgtgttagtgaatggcatgaagtactcagacatagatattatcctacttaagggtgatgttgaagaagacgaaacgattcctgatagtgaacaggatatacggccacgttttcaccgatcgaggacggtggctcagcagcatgatgaagatggaattgaagaggaagatgatgatgatgatgaaattgatgatgatgatacaatttctgactggaatctaagaaaatgttctgctgctgccctggatgttcttgcaaatgtgtatcgtgatgaactgctgccacatattttgccccttttgaaagaattactttttcatcatgaatgggttgttaaagaatcaggcattttggttttaggagcaattgctgaaggttgcatgcagggcatgattccatacttgcctgagcttattcctcaccttattcagtgcctctctgataaaaaggctcttgtgcgttccataacatgctggactcttagccgctatgcacactgggtggtcagccagccgccagacacgtacctgaagccattaatgacagaattgctaaagcgcatcctggatagcaacaagagagtacaagaagctgcctgcagtgcctttgctaccctagaagaggaggcttgtacagaacttgttccttaccttgcttatatacttgataccctggtctttgcatttagtaaataccagcataagaacctgctcattctttacgatgccataggaacattagcagattcagtaggacatcatttaaacaaaccagaatatattcagatgctaatgcctccactgatccagaaatggaacatgttaaaggatgaagataaagatctcttccctttacttgagtgcctatcttcagttgccacagcactgcagtctggattccttccgtactgtgaacctgtgtatcagcgttgtgtaaacctagtacagaagactcttgcacaagccatgctaaacaatgctcaaccagatcaatatgaagctccagataaagattttatgatagtggctcttgatttactgagtggcctggctgaaggacttggaggcaacattgaacagctggtagcccgaagtaacatcctgacactaatgtatcagtgcatgcaggataaaatgccagaagttcgacagagttcttttgccctgttaggtgacctcacaaaagcttgctttcagcatgttaagccttgtatagctgatttcatgccaatattgggaaccaacctaaatccagaattcatttcagtctgcaacaatgccacatgggcaattggagaaatctccattcaaatgggtatagagatgcagccttatattcctatggtgttgcaccagcttgtagaaatcattaacagacccaacacaccaaagacgttgttagagaatacagcaataacaattggtcgtcttggttacgtttgtcctcaagaggtggcccccatgctacagcagtttataagaccctggtgcacctctctgagaaacataagagacaatgaggaaaaggattcagcattccgtggaatttgtaccatgatcagtgtgaatcccagtggcgtaatccaagattttatatttttttgtgatgccgttgcatcatggattaacccaaaagatgatctcagagacatgttctgtaagatccttcatggatttaaaaatcaagttggcgatgaaaattggaggcgtttctctgaccagtttcctcttcccttaaaagagcgtcttgcagctttttatggtgtttaatctaatacacttaagctgcagtcccaaaattaggggtccttcagtcttggagactataagggagcctctgcacccagggaaaatgttaccctttacaggggggaagggtaaaccagtagggaatacagtacaatcccaaccctactgggaggggcgggagggaggtgttgccgtcactgtattaagtcgatgttgggaaacgttttaacatctggagcctttgtgggtggaaatatgtctccagttacaactccgcagtggatgtgaagaagcaaaaaaaaaaaaatctattcagtctactcacaaaacagtacattgtggaatattatggggaattgtaccaaaacaagaaccatataaatgatgcctagggacaagaaagaggaacaattctatagcgcacaataaaggaaacctaagaatgggagttacaaatagtaaagaagcttttttttttttttaatttaaagtttttttatgtaagttttcccacatgatggggccttgttttgcatgttgatgaagaactacacaaagaaaactaatatagttaaaagtcagcttgccttcccgtagtagaagcaggttcttggaagttacaatttaaggtaccccaaaaaagttggaaataaaacaaaacaaacataaacaatgaagcaccctgtgaaatgccaaatgagtcactccttttaccttttttggggtgggcagggagggaggaataaatggggttgggcatatcaaactaaagatgacatcttaattttgcattgaacattaatgtagcggatataatttgatgattatacttcattagatttaatttctaggccaagatgttactttttaaagtgcagtttaaggttcaggcatgcattctggctcatagtggttgaaagtaatttaaattagtgggaaagtagcatgcttgcatcacatagagtgagattggtattcatttacctatgttgcgccagtttgtgttgcagttaccaattcaatatagcgcgcttgtacaggtcctttcagaatggggcttacttcttaagacccgctctttcagcccgcgtcacggtgggctgaatctctcttgatcggcgcacacatgctcgtcggggctcccgcccaggtggcccgcttccgggccactgcccggcccaggccggccgggcgcacccaggctccagcctcactcgcgtccccgccttgcgcccaccgactccggcggnnnnnnn

SEQ ID NO: 25031 - DNA, 3014 bp, Homo sapiens; identical to SEQ ID NO: 24666
  misc_feature 109, 110, 111, 112, 113, 114, 115, 116, 117, 118, 119, 120,121, 122, 123, 124, 125, 126, 127, 128, 129, 130, 131, 132,133, 134, 135, 136, 137, 138, 139, 140, 141, 142, 143, 144,145, 146, 147, 148, 149, 150, 151, 152, 153, 154, 155: n = A,T,C or G
  misc_feature 156, 3014: n = A,T,C or G

SEQ ID NO: 25032 - DNA, 3020 bp, Homo sapiens
  misc_feature 2842, 3015, 3016, 3017, 3018, 3019, 3020: n = A,T,C or G
tcgacccacgcgtacgggaggtgaggtttgttaccgcgattctgagaggtgggcttttagtccctccagacctcggctttagtgctgtctccgcttttctttcaccttcacagaggttcgtgtcttcctaaaagaaggttttattgggaggtaaaggtcaatgcgtaggggtagagtaagatgtcttatggtgaaattgaaggtaaattcttgggacctagagaagaagtaacgagtgagccacgctgtaaaaaattgaagtcaaccacagagtcgtatgtttttcacaatcatagtaatgctgattttcacagaatccaagagaaaactggaaatgattgggtccctgtgaccatcattgatgtcagaggacatagttatttgcaggagaacaaaatcaaaactacagatttgcatagacctttgcatgatgagatgcctggtaatagaccagatgttattgaatccattgattcacaggttttacaggaagcacgtcctccattagtatccgcagacgatgagatatatagcacaagtaaagcatttataggacccatttacaaaccccctgagaaaaagaaacgtaatgaagggaggaatgaggcacatgttctaaatggtataaatgacagaggaggacaaaaagagaaacagaaatttaactctgaaaaatcagagattgacaatgaattattccagttttacaaagaaattgaagagcttgaaaaggaaaaagatggttttgagaacagttgtaaagaatctgaaccttctcaggaacaatttgttccattttatgagggtcataataatggtctcttaaaacctgatgaagaaaagaaagatcttagtaataaagctatgccatcacattgtgattatcagcagaacttggggaatgagccagacaaatatccctgtaatggacaagtaatacctacattttgtgacacttcatttacttctttcaggcctgaatggcagtcagtatatccttttatagtgccctatggtccccctcttcccagtttgaactatcatttaaacattcagagattcagtggtccaccaaatccaccatcaaatattttccaagcccaagatgactctcagatacaaaatggatattatgtaaataattgtcatgttaactggaattgcatgacttttgatcagaacaatgaatatactgactgtagtgagaataggagtagtgttcatccctctggaaatggctgcagtatgcaagatcgatatgtgagtaatggtttctgtgaagtcagagaaagatgctggaaagatcattgtatggacaagcataatggaacagacaggtttgtgaaccagcagtttcaagaggaaaagttaaataaattgcagaagttacttattcttttaagaggtctgcctggttctgggaaaacaacattgtctcgaattctgcttggtcagaatcgtgatggcattgtgttcagcactgatgactattttcaccatcaagatgggtacaggtataatgttaatcaacttggtgatgcccatgactggaaccagaacagagcaaaacaagctatcgatcagggaagatctccagttataatagataacactaatatacaagcttgggaaatgaagccatatgtggaagtggccataggaaaaggatacagagtagagtttcatgaacctgaaacttggtggaaatttgatcctgaagaattagaaaagaggaataaacatggtgtgtctcgaaagaagattgctcagatgttggatcgttatgaatatcaaatgtccatttctattgtaatgaattcagtggaaccatcacacaaaagcacacaaagacctcctcctccacaggggagacagaggtggggaggctctcttggctcacataatcgtgtctgtgtcacaaataatcattaaattagctattttcagctaacacatttgttgttgcacttgaaaaagagttagtgagcctgtcttggagtttaagtagtttcaaataaaaaaaggctacagtgcctcacaaaggatgttcccagcaagttgtttaaattcccagcaagttgttaaagtgtaaataaaaatatatgaaattgtattttaaatgtttttatattctcttgttgtaatactcttggctgttatggaagcacctgagtaatagagtggtgggtaggagctaggatgtttttctacaatcgaattttaaactaatttatctattttatagacactattgaacagttttttaatagttcatatctaaatctaacttttcataaaactttacggtttttccttcactaccttaaatatgcaagaaatactgacttggtatagggtaccttagttttctctattcattagacaggtaaaattatatttcagctgattgatctgtgtgacaaaattatttcttagctataatcagcacatcacttagttcaaacaaaattccccagcaaatgttagatagtaggtatatcagtcacctggggagttttcttcataatatgcatattcatcttgtaatgcatacatagttatcatcctccttctcaacccatctccctaaccccacatgcttgccagttcttgaagggataaagtgattctaataatgttttacttctctctgttcaatttaatgtgatataattctagtataaaaatattttggacagttgcttaacatggtcataagaggatttgtactatagaatatcttctagtactaatttttctgtagagcaaattatatttctctcactggatagtttttagatgtgtttcttcatataaaattaaaaactgagatggaattcanaaaaaaaaaaaaaaaaaggggggccccttaacttattttaaaaaaaaaccttccaacatttccctttaaccttaaaaattaaaagaatgccaatggggggggaaactttttttttggccttttataggggtcaaaaaaaaccaattccctcccaaatttccaaaaaaaaacannnnnn

SEQ ID NO: 25033 - DNA, 3855 bp, Homo sapiens; identical to SEQ ID NO: 20695
  misc_feature 1, 2, 3854, 3855: n = A,T,C or G

SEQ ID NO: 25034 - DNA, 2953 bp, Homo sapiens
  misc_feature 2880, 2882, 2947, 2948, 2949, 2950, 2951, 2952, 2953: n = A,T,C or G
cgtacgcgggcactgccgctgcggctgttgctgcggagccaggaggggaagcgatggctgggcccgcgtggatctctaaggtctctcggctgctgggggcattccacaacccaaaacaggtgaccagaggttttactggtggtgttcagacagtaactttaattccaggagatggtattggcccagaaatttcagctgcagttatgaagatttttgatgctgccaaagcacctattcagtgggaggagcggaacgtcactgccattcaaggacctggaggaaagtggatgatcccttcagaggctaaagagtccatggataagaacaagatgggcttgaaaggccctttgaagaccccaatagcagccggtcacccatctatgaatttactgctgcgcaaaacatttgacctttacgcgaatgtccgaccatgtgtctctatcgaaggctataaaaccccttacaccgatgtaaatattgtgaccattcgagagaacacagaaggagaatacagtggaattgagcatgtgattgttgatggagtcgtgcagagtatcaagctcatcaccgagggggcgagcaagcgcattgctgagtttgcctttgagtatgcccggaacaaccaccggagcaacgtcacggcggtgcacaaagccaacatcatgcggatgtcagatgggctttttctacaaaaatgcagggaagttgcagaaagctgtaaagatattaaatttaatgagatgtaccttgatacagtatgtttgaatatggtacaagatccttcccaatttgatgttcttgttatgccaaatttgtatggagacatccttagtgacttgtgtgcaggattgatcggaggtctcggtgtgacaccaagtggcaacattggagccaatggggttgcaatttttgagtcggttcatgggacggctccagacattgcaggcaaggacatggcgaatcccacagccctcctgctcagtgccgtgatgatgctgcgccacatgggactttttgaccatgctgcaagaattgaggctgcgtgttttgctacaattaaggacggaaagagcttgacaaaagatttgggaggcaatgcaaaatgctcagacttcacagaggaaatctgtcgccgagtaaaagatttagattaacacttctacaactggcatttacatcagtcactctaaatggacaccacatgaacctctgtttagaatacctacgtatgtatgcattggtttgcttgtttcttgacagtacatttttagatctggccttttcttaacaaaatctgtgcaaaagatgcaggtggatgtccctaggtctgttttcaaagaactttttccaagtgcttgttttatttattaagtgtctacctggtaaatgttttttttgtaaactctgagtggactgtatcatttgctattctaaaccattttacacttaagttaaaatagtttctcttcagctgtaaataacaggatacagaattaacaagagaaaatgtctaactttttaagaaaaaccttattttcttcggtttttgaaaaacataatggaaataaaacaggatattgacataatagcacaaaatgacactcttctaaaactaaatgggcacaagagaattttcctgggaaagttcacatcaaaaagagtgaatgtggtatatttctaaatgatatggaaaatagagacagatttgtcctttacagaaattactgagtgtgaataaaaacttcagatccaagaaatatataatgagagatataatttttgttaataagacaaaggtaatatattggatacaaagacacaaatgtattgtgtgttcaattattttgttgtcttgagatttaatattctttccaagagcttttaatgaagcagagagctagtacttcattttcactggatacattttcagcatcatgagttgtcacagcctctgagcccctgatctgaagccagaagggctgagtgtattgtaaacttattcttgcatgttgctgtctgggaatggaccacactacagcaggtagttctgggggcgatactgccgaaaggcccgaacacatgtattttggctgcaattgaggaacttgggatgctattaattttgtatttcagcaactgccccttctcctatcccaaagcaccaattactgccctctgcctcagcagtaccagtataagatgacattccaaagactggaggcaactcagcctgagttaattcacaaaattatgccatgctggggcttgagcttgagcttgggcttaggcttgggctcagcttttgaccctcaggcatctcctttcccttcctgtcttcctctcccttctcctctgctgcagcatgattttcttaatcttcagacactcactattttcatgaacagttaccctctgtccccacaaccaaagacaactcatggcctcctttggcccttgtgtaacattgcaaacctgtggctttgcaaaatgtacccaggtcacaaggggatttttttttttttagcaatgatatccctgtctgggtcactttttaagcttgtaaccgcccccccagacttataatcttaaatgtattttcctttgtttaagctgctgcttcctctgtttcattggattgtgccagttatcagtggctcttgggttcaaagtaataaagaattccaaaactgaaaaaaaaaaaaaaaaaaaaaaaaaactcgagggggggcccggtacccaattcgccctatagtgagtcgtattacaattcactggccgtcgtcttacaacgtcgtgactgggaaaaccctggcgttacccaacttaatcgccttgcagcacatccccctttcgcagcttgcgtaatagcgaagaagcccngnaccgatcgcccttcccaacagttgcgcagccttgatggcgaatggcacattgtaagccgtaatannnnnnn

SEQ ID NO: 25035 - DNA, 2928 bp, Homo sapiens; identical to SEQ ID NO: 21852
  misc_feature 1, 2, 3, 2923, 2924, 2925, 2926, 2927, 2928: n = A,T,C or G

SEQ ID NO: 25036 - DNA, 4802 bp, Homo sapiens; identical to SEQ ID NO: 24957
  misc_feature 1, 2: n = A,T,C or G

SEQ ID NO: 25037 - DNA, 2745 bp, Homo sapiens; identical to SEQ ID NO: 21375
  misc_feature 1, 2, 3, 2734, 2735, 2736, 2737, 2738, 2739, 2740, 2741,2742, 2743, 2744, 2745: n = A,T,C or G

SEQ ID NO: 25038 - DNA, 2410 bp, Homo sapiens; identical to SEQ ID NO: 24226

SEQ ID NO: 25039 - DNA, 956 bp, Homo sapiens
actttggtttggagtatattattttatcctagaagatttggcttcactattaagacaacaattaggtctgcttttcttaggtatacacaaaaatagaaacagtccttatgatggattatttacagatatatagtattttggtgggtagaggcatggggaactatttagctcagctggcaaaaagtccaagcaaaacaatccaaatgcctagagtggtgacagttgtgcaatgggtactcaccaaaaagccaaatttcccctttggagttggtgacttagtgtagtctgtggctgacctagaaagacacagagttatcaagagtttcccttcctagaagatgaatgttaccttttgtgttaggaggtagagaaaataaaaatagcttttttttccctagaattgctaattactcttaacaacaaattaaattcaaagcctgtccttgagaactggaaatgtaaaatcatggttcaagttttataccttagtgattcctcagtaggtgttactaggagttcactgaatgaacttaggagtgaaccttcgatgtgcttgattttcttttgtgccttagtttctctgaatagcagaggcatcaaattttggtggggaatgagaggagtattaggggaaagtttgaaaatagctctcctggagatggagggcacacagagtggtcctcaggctcaccttgactgagttgattcacagttatcctgcatcagaccattagatttctttagtgctatgattataatagggatttttgaatcaccaaaaacagtttttagatgtttatgttctttgttttactatcaatgttgtgctggttaagggagagaaaagttcaagaagatcttacatatttgaaaggaaattggtactcttgaaggctatgcaacatgagtctttgaacaagaattccttgctactttgattcattcatcaaatactg

SEQ ID NO: 25040 - DNA, 2015 bp, Homo sapiens
  misc_feature 1800, 1802, 1803, 1804, 1805, 1806, 1807, 1808, 1809, 1817,1818, 1819, 1820, 1821, 1822, 1823, 1824, 1825, 1826, 1827,1828, 1829, 1830, 1831, 1832, 1833, 1834, 1835, 1836, 1837,1838, 1839, 2007, 2008, 2009, 2010, 2011, 2012, 2013: n = A,T,C or G
  misc_feature 2014, 2015: n = A,T,C or G
gcgtccaacctttgtaatgttcttaccacagacaccttcttgtgagttttcagtctgactgtgggggtggggggtgtgaatgaaatggatgtcacagagtgtcatgtgtctgatgcagcctcctctgctgtgtattaaatgtcaaaatctgaatatatctggatatgtactaatcaaataataatcaatcaatcagcatatacatttcagccaaagccatagaagaaaaagcaatagttgcttgaattatgatcatctaccaccaactctgctcagccctgtaacagggtagggagagggtataacaggaagagctttgacttgtccctgtctatacattctctgtatcttttgggggtaacttcttggcagtttttcagtgttcagccatgtcagttgaaactagatttttctgtagattttttacttacccatgtgagcctaacactatcctgtaattcattttctcaggctatgtgtaaatgtagaaccctaatttttctataaaaaaacaaactaactaactgtgtaaagaaagaaaaagggaagtaccaatgggtttttccaccttatttttacctttgatctacccttgcagatttaacctgtcttcttccctcccattattctcattttccttttacctttctccaccatccagagccacaaaagcaaaccttctacctcctacctacttttctctgggacaaggataaaggaatatgattttccagagccccagagccagctcatcttccaggtgctgaaaccactttccaaataaactaaagcctggatttgatattacaaattttgggaaatcttagaataaagaacgagaacaaggaagtcattggctagtataattaagaaaggtaggattcagtgcttaccgatgatgcagtacttgatagaagaaaacagtctgggaggatagcgctcatttttcagttaccctttaaggagtccctttgtctttgggaaagtagcagaatggtccgcttctttcccatgagtggaaaatgtggcttgtccaactctcctccaggttgcatttcagtttctttccaaaacttattacctcccctaatcctgagactttggaaaaggtggaaggaagaactgttgctttatctccccctccctgcatgtgtcaacattgtgatgtcagtatttactaatctacattcagtggctgtacaaataacagctgtagtaagaagagattcaggatgctagaggtgaatatttgggtcatttacatgtacactacatagcaagttgatactcatgttgcatgttcttttaaattagtgattttgtgtcttaagtctttaacttccaatacttcatcatgtatgtaaccttccatgtttgcttctgataaatggaaatgtaggttcactgccacttcatgagatatctctgctcacgcttccaagttgttctcaatgacattagccaaagttgggtttgccattcatcccctaggcatggtaaatcttgtgttgttccctgctgtcctccgtattacgtgaccggcaaataaatctcatagcagttaatataaaacatctttggaggatgggagagaacaggagggaagatgggaaacaaaatagagaattcttaagattttgtttaaaccaaatgtttcatgtagaatgcaaaatgttggcacgtcaaaaatatgaatgtgtagacaactgtagttgtgctcagtttgtagtgatgggaagtgtattttactctgatcaaataaataatgctggaatactcaaaaaaaaaaattacgaagancnnnnnnnnggggcccnnnnnnnnnnnnnnnnnnnnnnngggttaattttttccctttttaaaccccccccaaaagggggggggagggggttttttttttttttaaaaaaaccttgaaaaattttttttttttttttggggggttcaccccacaatttttttaagagggaagacttttccccccatttttttttttcccccaggggnnnnnnnnn

SEQ ID NO: 25041 - DNA, 752 bp, Homo sapiens
acatactgttaactagaatagttactactaagcatgatttcattcactgcagcaggcatacttgcctgttcctaaattcattctgggttgcgggcatgaggacaatcacagtggtttgctctgtgatgcctatttctttccaatgtttttagttttgttgcttaaaaattctggctcacacaaataagttgctgtgaatgctattaataacaacagtgaactctgtttagcaatggaaagtcttctttaatcttaatctaaaatggctataaacttataatcattcttcaatgtattaaagtattagagattagctttcttctttgagtatcaactttaatatggattcaggattttggaaaacagatcttttatcaattttttcctcaatatttcaaatttctctttttgaaattattaaagtttataacagagacgtaatataactaatatcatttttctattcaaaatgtcttcattaattttctctttatgtgttacaaaattgtgcacacatagtaaccacagtgattacttaaaatgtattggttagtgttggatatattaaacatcttgaaatatattgttactttttccctgtagatccaaattcagttagtttaaaatgtcaaaaaaattagtcctatatgcagattcttctggtgaaatatcatcttcaaaatgccaaatgagattgcttttctagtaggaaaatatgaatcctgttcctgagttcatataatttaatgagt

SEQ ID NO: 25042 - DNA, 962 bp, Homo sapiens
  misc_feature 1, 2: n = A,T,C or G
nnccggcgcaccttacaggcacccccccgacggtttacggcccccaagaagccgcgcggccaaccctctgatcggagagcccgacagggtagaactgcccctctaccgggttgcccccccgcgccccagaaagtgtcccgcctaatctggttagtggaagccggcagacccactgcggacaacgcgggagctgatgccaccctgaagtacgcatactgaaactggtacgccagttgacccaggtcttctcgaagcacagagggcaactgcgcaaatctgggtgacttgctgtaccgtgaaaaggcacttctccttgagaagcctgacagtgtcgttaatgtcctgctggcgcatggtgaaaatttcagggcaacagtaaagcaccctctttaatttcccttctccaagcccaagcttttgcaggtaactggagcgcttcctcatttgcataataggcagtttcaataactggggacttttcttcaagaccacacacacaggctctggattcagacccaagagaataaattctgaaatgatgtccagcaactgttgaagactggcacctcgccgtacactgagcaattcattaatatgggcattgctgaaacccatgtccaggagggaactcatgaccctctctagctccaaggacccttgtaccacaggagtcccctgcttctcaaggaggcactgaacaagattcctcctgcactctggttcctgcacatagttattggatctaacacaagataactcctcaatgacccctccattggaggctgtagtcagtttgcgcaacaaagaagctgtcgtccttctctgttctccaagatgaggagtctgcctagccatacaggcccaggtgagggggatcaggcggtgccaatcaaggacctgacggccgaacgcagccatagcgcggagaagatggcagcagttacggcgccggaaccccgcgt

SEQ ID NO: 25043 - DNA, 988 bp, Homo sapiens; identical to SEQ ID NO: 25014
  misc_feature 763, 988: n = A,T,C or G

SEQ ID NO: 25044 - DNA, 405 bp, Homo sapiens
  misc_feature 1, 2, 3, 4, 5: n = A,T,C or G
nnnnnacggtaatgtgttggttgtcaattcaacctttccagcggacggccgggcaggtacagccagtatgtagccccctaaatcctccaggagtcatatcaccatgggctacgatggacaccatagttccagacaggaaggatttttattcctccaatgtagttcctgataaaactcatgaagttggatcttatttagctgcccaaatgtctccatcagaccagacgcttagctcatttgcttccattgttgctcaatatggcaaaggcctccctcaggaagtggaagaaattgtgagggaaacaattgttcaacccaaatcagagttcctcgaattcagtgctggcttagaaaaactactgaaggaagaaactgaaaccttcccctcaaaatatgaaagtgata

SEQ ID NO: 25045 - DNA, 552 bp, Homo sapiens; identical to SEQ ID NO: 20576
  misc_feature 1: n = A,T,C or G

SEQ ID NO: 25046 - DNA, 2224 bp, Homo sapiens; identical to SEQ ID NO: 21832
  misc_feature 1, 2, 3, 4, 5, 6, 2220, 2221, 2222, 2223, 2224: n = A,T,C or G

SEQ ID NO: 25047 - DNA, 1701 bp, Homo sapiens
  misc_feature 1, 2, 11, 31, 1682, 1683, 1684, 1685, 1686, 1687, 1688, 1689,1690, 1691, 1692, 1693, 1694, 1695, 1696, 1697, 1698, 1699,1700, 1701: n = A,T,C or G
nncgacccccnattccacttggactcccttncgtagggacgcgcgccattgtgttggtacccgggaatcgacttgtgagcaaatcttggtggtggtggtggtggggcggcctgagaagatattatggctgctgccacggagcataatcgcccgagcagcggtgacaggaacctggagcgaagatgcagccccaacctctcccgagaggtgctctacgaaatctttcgctccctacacaccctggttggacagcttgacctcagagatgatgtggtgaaaattacaatcgattggaacaagctccagagcctctcggcattccagcctgcattgctctttagtgcacttgaacaacacattttatatttacagccttttttagcaaaacttcagtctccgattaaagaggagaatacaactgctgttgaagagataggaagaacagaaatggggaacaaaaatgaagtaaatgacaaattttccattggcgacctacaagaggaagaaaagcacaaagaaagtgatttaagagatgtgaaaaagacacagatccattttgatccagaagtagttcagataaaggctggaaaagcagaaattgacagacgaatatctgcatttattgaaagaaagcaagctgaaatcaatgaaaacaacgtcagggaattttgcaatgttattgattgtaatcaagaaaatagttgtgcaagaactgatgcgatttttaccccttaccccggatttaaaagtcacgtaaaagtttctagagttgtgaatacatacggaccacagactagacctgaaggaattccagggtcaggtcataaacctaacagcatgcttcgagactgtggtaatcaggctgtagaagaacgactacaaaatattgaggcccacttgcggttacagacaggtggtccagtgccaagagacatttatcagagaattaaaaaacttgaggataaaatccttgaattggaaggcatctctcctgaatattttcagtctgtaagcttttctggaaaaagaagaaaagttcaaccacctcaacagaactattcactggctgaacttgatgagaaaattagtgccctcaaacaagccctcctcagaaaatcaagagaagcagaatccatggcaacccaccaccttccatgaaaaactcctctcgtccttgtcattttacttttttgtatacatatgtgtaacttacactgttattaattcaacggatatatatttatcaatgtagacttctctgtgaagtcaaggtttattttcacatgagtccagcttgcagcaagtaatcttcaaatattccagtaagttttgaaataatgaatgcattgaaaatagcattgttggaatttattcccttctgttttaaaggaggtattttggaaattgaaaaacttaatttacaagtgctggtacatcttttttcttttgtggaccacaggaaggaagatttattttgatattgatactttaaaaggactttatatttgtaacattgatgttaaccagtttattagtttaaatcagtactttgcatataataagcattcaacaaaaatttattgactgaaatgaattttaaatgcatgtgtatgaacttgtttttcttaatctttaagatgtcagtattcatgtaaataaacaatagatccagctttatcccnnnnnnnnnnnnnnnnnnnn

SEQ ID NO: 25048 - DNA, 886 bp, Homo sapiens
  misc_feature 1: n = A,T,C or G
ncctggtggcgaattcggcacgaggctctgactggggtgaggccgcagcggactgccctctcccaagatggcgtcgaagataggttcgagacggtggatgttgcagctgatcatgcagttgggttcggtgctgctcacacgctgccccttttggggctgcttcagccagctcatgctgtacgctgagagggctgaggcacgccggaagcccgacatcccagtgccttacctgtatttcgacatgggggcagccgtgctgtgcgctagtttcatgtcctttggcgtgaagcggcgctggttcgcgctgggggccgcactccaattggccattagcacctacgccgcctacatcgggggctacgtccactacggggactggctgaaggtccgtatgtactcgcgcacagttgccatcatcggcggctttcttgtgttggccagcggtgctggggagctgtaccgccggaaacctcgcagccgctccctgcagtccaccggccaggtgttcctgggtatctacctcatctgtgtggcctactcactgcagcacagcaaggaggaccggctggcgtatctgaaccatctcccaggaggggagctgatgatccagctgttcttcgtgctgtatggcatcctggccctggcctttctgtcaggctactacgtgaccctcgctgcccagatcctggctgtactgctgccccctgtcatgctgctcattgatggcatgttgcttactggcacaacacgcggcgtgttgagttctggaaccagatgaagctcttggagagaaggtgggctcttcggaactgctgtcctcctgggcactgatggtgagtttatggcagaggtgggatgggccaggggccctggggtcccgcttctc

SEQ ID NO: 25049 - DNA, 3552 bp, Homo sapiens
  misc_feature 1, 2, 3, 3546, 3547, 3548, 3549, 3550, 3551, 3552: n = A,T,C or G
nnnagtcgacgcccggggtaagatggctgcagtccgtatgctgagaacctggagcaggaatgcggggaagctgatttgtgttcgctattttcaaacatgtggtaatgttcatgttttgaagccaaattatgtgtgtttctttggttatccttcattcaagtatagtcatccacatcacttcctgaaaacaactgctgctctccgtggacaggttgttcagttcaagctctcagacattggagaagggattagagaagtaactgttaaagaatggtatgtaaaagaaggagatacagtgtctcagtttgatagcatctgtgaagttcaaagtgataaagcttctgttaccatcactagtcgttatgatggagtcattaaaaaactctattataatctagacgatattgcctatgtggggaagccattagtagacatagaaacggaagctttaaaagattcagaagaagatgttgttgaaactcctgcagtgtctcatgatgaacatacacaccaagagataaagggccgaaaaacactggcaactcctgcagttcgccgtctggcaatggaaaacaatattaagctgagtgaagttgttggctcaggaaaagatggcagaatacttaaagaagatatcctcaactatttggaaaagcagacaggagctatattgcctccttcacccaaagttgaaattatgccacctccaccaaagccaaaagacatgactgttcctatactagtatcaaaacctccggtattcacaggcaaagacaaaacagaacccataaaaggctttcaaaaagcaatggtcaagactatgtctgcagccctgaagatacctcattttggttattgtgatgagattgaccttactgaactggttaagctccgagaagaattaaaacccattgcatttgctcgtggaattaaactctcctttatgcctttcttcttaaaggctgcttccttgggattactacagtttcctatccttaacgcttctgtggatgaaaactgccagaatataacatataaggcttctcataacattgggatagcaatggatactgagcagggtttgattgtccctaatgtgaaaaatgttcagatctgctctatatttgacatcgccactgaactgaaccgcctccagaaattgggctctgtgggtcagctcagcaccactgatcttacaggaggaacatttactctttccaacattggatcaattggtggtacctttgccaaaccagtgataatgccacctgaagtagccattggggcccttggatcaattaaggccattccccgatttaaccagaaaggagaagtatataaggcacagataatgaatgtgagctggtcagctgatcacagagttattgatggtgctacaatgtcacgcttctccaatttgtggaaatcctatttagaaaacccagcttttatgctactagatctgaaatgaagactgataagacattcttgaactttttgagcttccaaagagtatgtaaaccctagctgtgccagcacatgttcatctttacaatttatattgtaaatgatttgtatcgtatgattaaggatctaaggcacaatatttgtcactgttctattagactttttactgaaaatgaataatggtgtaatggttctcctggggctgtcacattttataggtcagagtgtgacttcttaatatggtgctgatgtttttgtgtcaatggcttgaaactggcaagattaacaaaattaggccgggcatggtggctcacgcctgtaatcccagcactttgggaggcccaggtgggcggatcacctgaggttagaagtttgagaccagcctggccaacatggtgaaacctggcctctactaaaaatacaaaaattagccgggtgtggtggtgggtacctataatcccagctacttgggaggctgaggcaggagaatcgcttgaacctgggaggtggaggttgcagtgagctgagatcgtgctattgcactccagcctgggcgacagagcaagacgccatctcaaaaacaaaaaaacaaaattcatgttactaaaagacaggtagccatatacagacagtatatgccctattttttttaactgactcttaatgaaactttaattttacttaattaagaaatggaatttatatacaaaaatattttccatttccgttattatgctaattgttgtatgaaataagtgcaattatacttctcttttgagatatccaagagtatattcttgctctgtatagagaatatcatctgatagtgtcttatttatattaattaatgtctttgaaaagggaaaagtataaactggccttaaaattgtccaattatagttttataaccagtctattaaaggtgtttgtttaaaatggatatagttttagatttgtggtaatgctttggtattttcttggggaagaccttcacctttgcaaacttccctcatgtaaggaaggtactttaaatgtagcagccactgacatttctttttttaaaaaaaatttgagaagtctacttccttttaacttttttggtcttcagctaaaaaataggataagaaattaaggtctattccattctccatatcctgggtaagaatgtaaataagaggagaaggaagagtctaatagtaattatggatataaaaaataagaaattttgtatagaaatgaaggtttcataatgatcattttgttaaaggtctactttaatcagaaatagcaacgagatgaatgtatccaacatttcaatttgcattcggaaatccatgttgtttctaatattgtccagttgaaaactgtatgccaaaattagttgtttaagtgaagttttgtgacagaaaaaaggttgttttaatatctacttggtttttctcaaaatggaaataattttaaaatcaggaaagaataaatcagccaggtgtgatgacttgtaactgtaatcccagttataggggaggctgaagcaggaggatcacttgaggccaggagtttgagaccagcctgggcaacatagtgagatcccatctcaaaaaacattatttttaaaattagcctggtggctcacgcctgtaatcccagcactttgggaggccgaggtggccagatcacctgaggtcaggagttcgagaccaccctggccaacatggtgaaaccccatctctacagttttgtaaaaatacaaaaattacctgggcctggtgcacaggcctgtagtcccagctacttgggaggctgaggcaggagaattgcttgagcccaagaggtggaggttacagtgagcagagatcacaccactgcactccagcctgggtggcagagcaacacttcgtctcagaaaaaaaaaaaaaaaccaaaaaccaaaaagccaagtgtggtggtgtgcacctatagtcccagctactcaggaagctgagacaagaggatcaattgagcccaggagttcaaagctgtagtgagctgtcattgtgccactatcctccagtatgggtgacagagtgagacctggtctcnnnnnnn

SEQ ID NO: 25050 - DNA, 1834 bp, Homo sapiens; identical to SEQ ID NO: 25025
  misc_feature 1, 2, 3, 1832, 1833, 1834: n = A,T,C or G

SEQ ID NO: 25051 - DNA, 822 bp, Homo sapiens; identical to SEQ ID NO: 24606
  misc_feature 1, 807, 808, 809, 810, 811, 812, 813, 814, 815, 816, 817,818, 819, 820, 821, 822: n = A,T,C or G

SEQ ID NO: 25052 - DNA, 3609 bp, Homo sapiens
  misc_feature 1, 2, 3, 4, 5, 6, 7, 8, 9, 10, 3604, 3605, 3606, 3607, 3608,3609: n = A,T,C or G
nnnnnnnnnnattagcttagtacgagctggttttgaacaggaggcggcggcggcgcagcgagtggcgagtagtggaaacgtgcttctgaggggagcccaagatgaccggttctaacgagttcaagctgaaccagccacccgaggatggcatctcctccgtgaagttcagccccaacacctcccagttcctgcttgtctcctcctgggacacgtccgtgcgtctctacgatgtgccggccaactccatgcggctcaagtaccagcacaccggcgccgtcctggactgcgccttctacgatccaacgcatgcctggagtggaggactagatcatcaattgaaaatgcatgatttgaacactgatcaagaaaatcttgttgggacccatgatgcccctatcagatgtgttgaatactgtccagaagtgaatgtgatggtcactggaagttgggatcagacagttaaactgtgggatcccagaactccttgtaatgctgggaccttctctcagcctgaaaaggtatataccctctcagtgtctggagaccggctgattgtgggaacagcaggccgcagagtgttggtgtgggacttacggaacatgggttacgtgcagcagcgcagggagtccagcctgaaataccagactcgctgcatacgagcgtttccaaacaagcagggttatgtattaagctctattgaaggccgagtggcagttgagtatttggacccaagccctgaggtacagaagaagagttgcgttcaatgtccagactaaaagaaaattatattgagcagatttacccatcaatgccatttcttttcacgatatccacaatactttgcccaggcactgggctctgatcgctctgtccatatgtgaattcgatacaaaaacaattctcccttaccgtggtcccggccgggtaccccacgagcatcgcatcacttgccttcagtaatgatgggactacgcttgcaatagcgtcatcatatatgtatgaaatggatgacacagaacatcctgaagatggtatcttcattcgccaagtgacagatgcagaaacaaaacccaagtgagtatgcttcacctgtatttgagccttttcttgcattcaacccaggatttattaatttttctaaattcatgaatagcattgttgatgcctgctcgatattacagctgactgtagggttggagttgatgttatcatgttctcccaagctttcaatatccgtaggttgatagacgtctgatggataaaattgtgcctagttgttttgtagagaagaatgtcaaactctcattcttcttgaataggctctattatttgaatctctggagttattaccagctcattgcttcaaaattaagttgaggaattcaagaataatttattttagtaaattctatttaagatgtttaagaatttgaactgccaaaaatctttcctctccacagaggttgtttctttaatattaacacaaagtaagtgaccttcaggtcttattggaaactcagagtaatatggccttgcctggaattgcaaatttccttagttttgaaattttcatagatgtctttggttcttggttgtaactgttgactgagaagagccatttacattttttgataccaacagggcaaagctttttacttaattacctctaccaggctttaagggaaatctgatacttcagcatgtgttaaactataaaatacctactccaagtatctgcccagttccttgtcccctctccccaggcccttaaaggaagttctcgatacatatttgtagaataactgaatgttttcaggattcctgtactttgctgagttaaaatggatatggtacccttgctgattggttgagcccctaagagggggcagaatattaaatattccatatcagatatgcttttacaggtttgactttagaaaagtcttagcatgtgaagcctgttggataaagggctgtgtttgcatttaatctgtcacttttgtatctcctgtcctggctggccattttgatctcatgctgttctttttttcttttgaacttgtaggtcaccatgtacttgacaagatttcatttacttaagtgccatgttgatgataataaaacaattcgtactccccaatggtggatttattactattaaagaaaccagggaaaatattaattttaatattataacaacctgaaaataatggaaaagaggtttttgaatttttttttttaaataaacaccttcttaagtgcatgagatggtttgatggtttgctgcattaaaggtatttgggcaaacaaaattggagggcaagtgactgcagttttgagaatcagttttgaccttgatgattttttgtttccactgtggaaataaatgtttgtaaataagtgtaataaaaatccctttgcattctttctggaccttaaatggtagaggaaaaggctcgtgagccatttgtttcttttgctggttatagttgctaattctaaagctgcttcagactgcttcatgaggaggttaatctacaattaaacaatatttcctcttggccgtccattattttctgaagcagatggttcatcatttcctgggctgttaaacaaagcgaggttaaaggttagactcttgggaatcagctagttttcaatcttattagggtgcagaaggaaaactaataagaaaacctcctaatatcatttctgtgactgtaaacaattatttattagcaaacaattgatcccagaagggcaaattgtttgagtcagtaatgagctgagaaacagacagagcatatctgtgtatttggcacccatacttgtaacgtacttgcagtgcctttagacaggcatctattcggacctgtttctatctctaaatgaatttctgggaaacattcaatgaggtttacatattctctctgacatttatatagttcttatgtccatttcagttgaccagccgctggtgattacacgttacaaagacaaaaattatcgtgagaatgagattcatttcactggtcatgcactaaaagcagaacaggaaacttaggcttggccttattctaggtagttcccaatagtatctaggtgtcaaactttcacactttctcttacttggccactgttgtctctgaattagacttgcactttcctgaaaattatttatccggagaatttgccaactcttggattcccagacaggggcctctccactagcagtttccgcggcaacccttctgtgcgatttgtaacccactccttgcaagcgtttccctcaatggggcgcccaaaatacctgtggaaaaaggagtcccatgagaaacgagtggggtaccaacaacagtgtatccctagggaagaggataaaaacagggtacgtaagtctggatactaagcagaagttgcttctactatgctgaggagacgacgctcacgacagacacactcccaaagcagcgaaacagcagtacgtctttctgtcgctgactccattctctgctcgtactctttgtgctgtcgttagctcgcaccagctacagcagcaggactcacacagacgtactacaacatctaggagagaactatcgcnnnnnn

SEQ ID NO: 25053 - DNA, 1836 bp, Homo sapiens
  misc_feature 1, 1829, 1830, 1831, 1832, 1833, 1834, 1835, 1836: n = A,T,C or G
ncaccctttgtccttctctttgcgtccctttctcttccgggttttcttatttttgattcttctgtgtgttgcgggaactcccccatctgatcctgagatttccttagttctacggttttctcgggacgccctttctcttatggtgggccgggattttaaggttccctaagactgaatctgcctctatgcaatctggccagctgcgtgttcctggagtgaaatttctgccagtgtacgacagtgcagctcacacagtcacccattgaaaaagtatctcgagtactctgtctgcttgttttccgagaagataatattgattgtgattctcaaatgcattctgttattgttgactgatataaaacaacatcacactggttatcataatcatttatcctcagcccctgatgcccttttacttttccgagctgtcttgatggaggttgatatcatcttggttcttgagtgtccatttccgctttgtgtacagctggcatagggccggggcctaaccaaccatctttggaatgatcaaactggcccttatcactgggatgtaaatggtaacccaccttatttcttcccagagagtgaagatggttctcttgctttggccttgcatcttgttcatttgcctctaaatcctggcgcaaaggtgtttttggacactgtaaagtattctctttgtcagcagttctagatgagttccccataaaccctgagttccaagcctcttctgataaagctttgaacaatttctttgaggaataatacaggtattgccttcctcactattctcagctgccatttttactgtaattagactttctactaaagctgaactctgcatatggtctttaccatcctcacatatgttcacatttgtgtcttgctcttgtccagtggtctgcccctccaagattttagggatgtggtggaagttcactgaggaacaattagatgcagtgaggtatcccggagtgaaactatccactgaactgctattaatagaattcgatttagtggttggaagttcagaggaatctttctggacaacagtcaaggcattctctcttccatctacagggtttatctcaggaggaggcttcttcggggtctgttccgtcaagtgtagagggctgtgagagtctgacgagtctacgaacaaatctacagaagcagaagacttcatatcgagacacagagcatctttttccttatgtttggtgctgagctgggcacagccagcattgcaagtggatacatccattgctcccgaatcagaaggctgcaggtcctcagtgcctggttgagattcagtgtacaggtcgttcagaacacgaatgaattgcttttgatgatgagtacacagtttgaccataaattcctccagtggggacttcgactggttgttagaatctactgcttttgcctctgttgagttctcaccctgcccttgagtactggagcagcctggagagtggctcagggaagtgctgccagcacatggacttttcttagtggacagatcaagtacaccgtcttgttcgctaggttctgactgagactttctgacagtaaggtccagaggtgagtcttggtcagccatgagaagtttgctgagcacagggttctgagtagttgcagccgtgggagaggtggtgactggagatgctttcggcaggctttggttctttgtgctattgggctggctggggtcctgagtagagctattttttgaggtctattcaacagcacattgttggatcattcgctgcatgatctcacgggccactaggggaatattgatgtcggagacccagggactgtcnnnnnnnn

SEQ ID NO: 25054 - DNA, 1455 bp, Homo sapiens
  misc_feature 1453, 1454, 1455: n = A,T,C or G
ccgaaaaaaaaaaaaaaaaaggcactgtgcttggggacagtgaaaggattctctcctccccgccccacccctttgaggagggtttcctctttactggccctgggtgctgagccatgattagcactcagcttggacaaaagaatgaggcccactctcgaaaaacaagaatggggaaaaagctaattggttacaatgaaggttgctagaggtggaatacattatattaaaactgataagagcaagaatatttatcccgccttttctatataaatgcagcactaggtaaccaaatagtagaaggggaaatttttctttatagaagcagtacagctgaaaaataagtgagggagaaaaaaccagagtatcaacaatttgcaaccactgatgaaataatgcatccaggcatgaaacattaatgtcagccaagcctacaaaattaaagacaaccagacattatgtgcttcttgataaaagaagtgaacatcaccttataatgtagtcttacccttactcacctaaaaaagaacctgaagctgaaactctagagccaacttgcaatttataggggacagatgaacatgttaaattataccatgggatacaaaagcaaaattcaaactatgggaaaacgtgaaagacaaataaccttgtttcttaaacaataaattatgaagaataaaataacagatagagtgggaacttataggaccaaaagaaacataaaagatatatcaatcaaccacaatgtgcagtaccttatttggatcccgagttttaaaaaaaattgtaacatttgcaattagtagaaatttgaacacatatttaataatttgtgataatggttttgtggctaagtttaaaaaatgaaaggccccaatcttcagaaatctactctgaaatatttacaattacatatttaacaagtatataaaagtataaccatatctgggatttgctttcacttagtaagagatggtagctggagagatgtatggatgagataagattggccacaagctgatggttactagaactaggtgtctgaagtttaaaattctacacgataaaatatctaaaaaatttgtgtcacagaatttcaatagcaattaaattcaggaaaagatattcaaatgtcttaatagcaattaccagataataaaaagttattgtaaaagaaaacctttgtgttacagattttcactgaattcagacttataaagaattatgcaaatgtatgtaagagtaattattgattaatagattaacagtatttaggaaaaccctatgatgtcataaaagttaatggaaactgtatacgattacagtaagtaataaaattatgtcataaatctttccatactaaaattgttgttttcaaagaagtgaacttcattgttaacattgcgggcacaaagagtttcatcttctgaccaggatggacacctatgtcaannn

SEQ ID NO: 25055 - DNA, 3470 bp, Homo sapiens
  misc_feature 1, 2, 3376, 3377, 3378, 3379, 3380, 3381, 3382, 3383, 3384,3385, 3386, 3387, 3388, 3389, 3390, 3391, 3392, 3393, 3394,3395, 3396, 3397, 3398, 3399, 3400, 3401, 3402, 3403, 3404,3405, 3406, 3407, 3408, 3409, 3410, 3411, 3412, 3413: n = A,T,C or G
  misc_feature 3414, 3415, 3416, 3417, 3455, 3456, 3457, 3458, 3459, 3460,3461, 3462, 3463, 3464, 3465, 3466, 3467, 3468, 3469, 3470: n = A,T,C or G
nncacccgtccgcggcggagcgctcgggacttgccgatagtggtgacggcggcaacatgtctgtggctttcgcggccccgaggcagcgaggcaagggggagatcactcccgctgcgattcagaagatgttggatgacaataaccatcttattcagtgtataatggactctcagaataaaggaaagacctcagagtgttctcagtatcagcagatgttgcacacaaacttggtataccttgctacaatagcagattctaatcaaaatatgcagtctcttttaccagcaccacccacacagaatatgcctatgggtcctggagggatgaatcagagcggccctcccccacctccacgctctcacaacatgccttcagatggaatggtaggtgggggtcctcctgcaccgcacatgcagaaccagatgaacggccagatgcctgggcctaaccatatgcctatgcagggacctggacccaatcaactcaatatgacaaacagttccatgaatatgccttcaagtagccatggatccatgggaggttacaaccattctgtgccatcatcacagagcatgccagtacagaatcagatgacaatgagtcagggacaaccaatgggaaactatggtcccagaccaaatatgagtatgcagccaaaccaaggtccaatgatgcatcagcagcctccttctcagcaatacaatatgccacagggaggcggacagcattaccaaggacagcagccacctatgggaatgatgggtcaagttaaccaaggcaatcatatgatgggtcagagacagattcctccctatagacctcctcaacagggcccaccacagcagtactcaggccaggaagactattacggggaccaatacagtcatggtggacaaggtcctccagaaggcatgaaccagcaatattaccctgatggaaattcacagtatggccaacagcaagatgcataccagggaccacctccacaacagggatatccaccccagcagcagcagtacccagggcagcaaggttacccaggacagcagcagggctacggtccttcacagggtggtccaggtcctcagtatcctaactacccacagggacaaggtcagcagtatggaggatatagaccaacacagcctggaccaccacagccaccccagcagaggccttatggatatgaccagggacagtatggaaattaccagcagtgaaaaagtacttacattccagtagccagtatctattagcagccatattgtcacctcagcactgtggacacctccctgtgaagagatccttccattccatctagtttttggaaaaaccttgtggataagtggctgtttcatcagtaagcagcctttgtggtttagttataaaaggctttagtagctcaaaaatactcttgatttcacatttctactctagatggcaacattggacagaaaatgcaatgacataaccaatttgtaatgattttggaactgtgtttcaaatggactgttacagactgaaaggtgtgaacagctttgtatgtttatgaagggtaagggaatttaatacttttccacagatttttttgtaaggggaagagggaaatgtacactttttacagcagcaatattttgtatattatgtttatttcatgtggtgaatatgcaaggcggtacactacgcactggacagcatcagaaatcctctgttaatgtggactggagcatggtagatgcttgattgttttggtctcaaaatggtgtgctataaagataaaggtgaggggaagacaaagcacaccatatgtccactgttctgttctcatagaggaaattcaaatcccttttatctattagataatcaagggcactgtgatacagttttgagtaaaaagacattttttaaaagccttccagttttgtggattaaacctttttataaagatcatttataatactgttttaaaatgtgaggcaataagaattactttgtgttggatctgaggaggctttggtaaaacagtttcatctaaatgaaagtggtaatcctcttctaaaatagcaataactgaaaatgaaagtgttaattttaccttgtttgagttatcagggaacttagtaagtaatatcaaagcattttataaatgatatcaaagaagagtcaacattgatccagtcattttattttgtaatattgagggataattggttattaaactgaatagttcaggagactttacaaacctttgtttcaactttcttatctggaaataatatcatttataaagggacacttttatgtttttcccttttttatgttggttgatataacacaaagagatatttaggaaaatgcttattgatgaggtttattctatctgtttttaaagcaccgaggttgcattctagataaccttgtttattagcatggcatattttaatcattatttgagactgtcctgtgcctgattattttagctaaattcagggagattgcgtggggcaggaaagcatgcattgaaaaatttctaaccacggttatttaagcataatctgaaaacatctagcccaaaggtaagttgctattttcatcacagttgcctatgcccagggaataagatgtattctttataattgaattggtttttcccacgtctaactggaaacaaaacagaaggggcgtcataaatttgaataagcagaacatactgttctcaacatactgtaatcaaaaggaggaatttcagtgggtctctgtgtgtgtatgagagagagagtgtgtgtttgtgtgtttcaaggtcagaacaggtttttttgtttttgttttttgttctttgtttttttttttgagatggagtcttgctcttgtcgcccaggctggagtgcagtggcgcaatctcagctcactgcaacctccgcctcccaggttcaagcagttctcctgcctcagcctcctgagtagctgggatgacaggcacccgccaccacacccagctaatttttgtacttttagtagagacgaggtttcgccatgttggccaggctggtctcgaactcctgacctcaggtgatccacccgcctcggccttccaaagtgctgggattacaggcgtgagccaccgtgcctggccagaataggttttttctttcaacttgatcagtagaaaatggacatcaagtttgaacagataaatcatggacagccttattgtgattgaaatgcttgtaggttctgtgccaattttccaccactgtgtactttgttgctatttaaaactgtatcaactctaacggaagaataaattatttgtgattttaaaaaaaaaaaaaaaaaaaaaaaaaaaaaaaaaaaaaaaaaaaaaaaaagggggggnnnnnnnnnnnnnnnnnnnnnnnnnnnnnnnnnnnnnnnnnnccccgggggggcgcgcgccatattatataaaaaaaaannnnnnnnnnnnnnnn

SEQ ID NO: 25056 - DNA, 1061 bp, Homo sapiens
  misc_feature 1, 2, 3, 1059, 1060, 1061: n = A,T,C or G
nnnccgaataactttggctgcatgtggtgggcatgtggaacttgcggctttacttattcgaggaggcgccagccgggaagaggtcaatgatgaaggttatacaccattgatggaagcagctcgagaaggacatgaagaaatggtggcattacttcttggtcaaggagcaaatatcaatgcacagacagaagaaactcaagaaactgccttgactctggcttgctgtggaggctttctggaagtggcagactattctaattaaggcagcgatgccgatatatgaactagggtgttctacccctattaatggaagctgctcaagagggtcatttggagttagttaaatacttattagctgcaggagctaacgttcatgcaacaacagcaacaggggatacagcgactaacatatgcctgtgaaaatggtcatactagtatgtagcagatgtcttacttcaggcagtgcgcagatctggaacatgaactctgagaggtggaagcaactcctttatatgaaagctgcaaggagctggtcatgttggtactgttcaggttcttaattagtaaaggagcgaactgtgaatagaaccaaggtaataatgacgcatactgtactgtaccctggcttgtgcagggggtcatctggcagtggtggaactacttttggctcatggggcagatcctactcagccgtttgaaagatggctcagctatagttggatagaagcagcaaaaggtggccatacaagtgtgatagctatctcttggattatcctaataacttgctttcaggcccctccgaccagatgtcgactccaggtttaagttccccccatccccaggcagtttacaataggggctccgcgatggttagccagctttcaaagcgattggcccaattgggtatgtatccaaccttcccagggagcccttgaagaaaagcatccttggcccaaattgttaggcgacccacttctttccccatgcaggagattaaaggacgccagctggaatgaagccatctctggcaagtgccaaagctcctaacccaacaggacnnn

SEQ ID NO: 25057 - DNA, 1797 bp, Homo sapiens; identical to SEQ ID NO: 24777
  misc_feature 1, 2, 3, 4, 5, 6, 7, 8, 9, 10, 11, 12, 13, 1796, 1797: n = A,T,C or G

SEQ ID NO: 25058 - DNA, 3228 bp, Homo sapiens; identical to SEQ ID NO: 22886
  misc_feature 1, 2, 3216, 3217, 3218, 3219, 3220, 3221, 3222, 3223, 3224,3225, 3226, 3227, 3228: n = A,T,C or G

SEQ ID NO: 25059 - DNA, 400 bp, Homo sapiens
  misc_feature 1, 2, 3, 399, 400: n = A,T,C or G
nnnctcctgtaaagtaaaatatgcataggaagtaactcaagggattaaaacaaaaatgctagacagaaaagcaacatcggttagtacatccacgtctaaaagcattctataaataggccttgtttagctacacgagtctgcttagcagcccatggggagtgaggtttcttttaaagaaaatacagtatcgctcaaggtcataaacttcctgagtcctcctattagtgttctcatccccgtagtataacaaatgttttattacaactaaacagtgtaaggcctaataattaatgggtaatcaaaaacctttcacaatatcaccttttatctccaactatcggtctgtgccacaatggtgagtgcgtgctctaaaaacattcatattgtttagatgtaccnn

SEQ ID NO: 25060 - DNA, 355 bp, Homo sapiens
ccattcaaagccaatgctcttgatgccaaggagttgatactggccatagatgcccaccagcacctgcccctcttggctggggtaggcagaggagatctggccatcaagcttcccaaaatagaaatagcggtccttgctggtgtacacacagaggcacatgtgcacgcacacacaacttgtgaacacacatttctgttaaagaagttagaaaatgagagatgggttggggcttgaagtgcatcagaggtatgaatgttgtaaaactgtcaggagatgtaaaattcctttctgaagtgtctcttctgtgaaagggttcagagcagattttgcttactatgtagtgttgcccttaagt

SEQ ID NO: 25061 - DNA, 2071 bp, Homo sapiens; identical to SEQ ID NO: 21824

SEQ ID NO: 25062 - DNA, 541 bp, Homo sapiens
  misc_feature 1, 2: n = A,T,C or G
nngtaggcaccccgataactgcttcgtagtataacaggcggctcagattaattccctcccttccccatccccaggtgtgcctagattgatcggtataaggctcactctcccgccccccaaagtggttgatcgttggaacgagaaaagggccatgttcggagtgtatgacaacatcgggatcctgggaaactttgaaaagcaccccaaagaactgatcagggggcccatatggcttcgaggttggaaagggaatgaattgcaacgttgtatccgaaagaggaaaatggttggaagtagaatgttcgctgatgacctgcacaaccttaataaacgcatccgctatctctacaaacactttaaccgacatgggaagtttcgatagaagagaaagctgagaacttcggaaaaggctcatctgtcaccctggagaagggaaactgtacaccgactacggcggactaatcttcaactcctacatacttcccccattattcctagaaccagtcgacctgcgactccttgacgttgacaatcgagtagt

SEQ ID NO: 25063 - DNA, 3618 bp, Homo sapiens
  misc_feature 1, 2, 3618: n = A,T,C or G
nngcaggacagacaaacaagggggtagcttgcttgggtgaatggtggcaggaactaccgactagacatgtttaagatgagggctccatcttcgcttctctgccagccacgtgtacagtaagaaggggttacaataggcatatgggtgattttgtgcttttcgttcatcttttctgtgtttaaaatgttcagaataagaaattggaacaaaggagacatgaatagacaattcctaatcatctttaagagtccgctttgtgttttcattacacaccaccactttgaaggctttcttgcctataccaggacaaactcagctctttatcccttttccgaattttcctggtactttcactttgaatatagcgcttaattaacattctgccttgtacctaggactaacacactataaattcccagaagacaaagtaggggaatacaataacaggatatagaattttaacagctaaattagatgaatttatgggtgacctttattgggcaaaagaaaatgttaagttagtataagatttagtataagctaccactcaaaactcagggtctcactggaagagaaagtgactccaggtagaattcctcagggagacattcacttccatcattcgctgaaccaggagctttggacagcctcggattgcacccgcatatccaaggacaccacatcagcggacaagtcataaacagccttgggaatacgcggaaaggtcaaatttacctaaacaattaaattctcttttaaattttaaggaaacacaagtatgctttcgctttaggtagggcatttgagagcaaaatgtactaatactttgaatccgccaagcagacacgatctgggtttgacctttctctccgggtaaaggtgaaggctgaccacggggccgctctccctccagccccagccacgccctctaacccaggttcccgtcctgcaccgcgccgcaagtccccccaccgttcagcgcaaccggccctcccagccccgccgccgtccccctccccgccctggctctctttccgcgctgcgtcagcctcggcgtcccacagagagggccagaggtggaaacgcagaaaaccaaaccaggactatcagagattgcccggagaggggatgcgacccctccccaggtcgcagcgacggcgctcccgggggtcgccgcgcatgcgttggctacccggcgccggggaccgctgccaccccgcctagcgcagcgccccgtccttccgcagcccaaccgcctcttcccgccccgccccatcccgccccacgggctccagtgggcgggaccagaggagtcccgcgttcggggagtatgtcaaggccgtgacccgtgtattattgtccgagtggccggaacgggagccaacatggcagcggggttcgggcgatgctgcagggtcctgagaagtatttctcgttttcattggagatcacagcatacaaaagccaatcgacaacgtgaaccaggattaggatttagttttgagttcaccgaacagcagaaagaatttcaagctactgctcgtaaatttgccagagaggaaatcatcccagtggctgcagaatatgataaaactggtgaatatccagtccccctaattagaagagcctgggaacttggtttaatgaacacacacattccagagaactgtggaggtcttggacttggaacttttgatgcttgtttaattagtgaagaattggcttatggatgtacaggggttcagactgctattgaaggaaattctttggggcaaatgcctattattattgctggaaatgatcaacaaaagaagaagtatttggggagaatgactgaggagccattgatgtgtgcttattgtgtaacagaacctggagcaggctctgatgtagctggtataaagaccaaagcagaaaagaaaggagatgagtatattattaatggtcagaagatgtggataaccaacggaggaaaagctaattggtattttttattggcacgttctgatccagatcctaaagctcctgctaataaagcctttactggattcattgtggaagcagataccccaggaattcagattgggagaaaggaattaaacatgggccagcgatgttcagatactagaggaattgtcttcgaagatgtgaaagtgcctaaagaaaatgttttaattggtgacggagctggtttcaaagttgcaatgggagcttttgataaaaccagacctgtagtagctgctggtgctgttggattagcacaaagagctttggatgaagctaccaagtatgccctggaaaggaaaactttcggaaagctacttgtagagcaccaagcaatatcatttatgctggctgaaatggcaatgaaagttgaactagctagaatgagttaccagagagcagcttgggaggttgattctggtcgtcgaaatacctattatgcttctattgcaaaggcatttgctggagatattgcaaatcagttagctactgatgctgtgcagatacttggaggcaatggatttaatacagaatatcctgtagaaaaactaatgagggatgccaaaatctatcagatttatgaaggtacttcacaaattcaaagacttattgtagcccgtgaacacattgacaagtacaaaaattaaaaaaattactgtagaaatattgaataactagaacacaagccactgtttcagctccagaaaaaagaaagggctttaacgttttttccagtgaaaacaaatcctcttatattaaatctaagcaactgcttattatagtagtttatacttttgcttaactctgttatgtctcttaagcaggtttggtttttattaaaatgatgtgttttctttagtaccactttacttgaattacattaacctagaaaactacataggttattttgatctcttaagattaatgtagcagaaatttcttggaattttatttttgtaatgacagaaaagtgggcttagaaagtattcaagatgttacaaaatttacatttagaaaatattgtagtatttgaatactgtcaacttgacagtaactttgtagacttaatggtattattaaagttctttttattgcagtttggaaagcatttgtgaaactttctgtttggcacagaaacagtcaaaattttgacattcatattctcctattttacagctacaagaactttcttgaaaatcttatttaattctgagcccatatttcacttaccttatttaaaataaatcaataaagcttgccttaaattatttttatatgactgttggtctctaggtagcctttggtctattgtacacaatctcatttcatatgtttgcattttggcaaagaacttaataaaattgttcagtgcttattatcaaaaaaaaaaaaaaaaaaaaaaaaaaatttcattacttcgtgtaatagtgtatatttcttgtatttactatgatgaaaaaaggtcgttttaatttttgaattgaataaagttacctgttcattttttattagatattttaaagaccttcaaaaaattttaaattgaaataattaaggaaaaaaaaaaacaataaaattggggggggggcccggtaccccaattcgcccttatan

SEQ ID NO: 25064 - DNA, 4526 bp, Homo sapiens
ctcgctgatgtctagagcgcgtcccatgatggtggacggacgtgtgttattctcccagcccagtaagtttctgatctatgtgtgaaccggttttccaatatgtttgcccagcggtcgtttccaagtttcggcgacctgggatccactgttcccttcaccttgccccaatgtctggggaattaccaggcggggagcccgctgtgagcctggccatggtgaactgttgaaggttccctttgaagcgtcgttttcctagttatgaggatggccagctttctggattctctttgtttcatctttacacccaaagcgtttttcacaaaagcctgaaacccacctttaccaaaaattgagtttaccctgaagacacaaaaaatgaattgtatacacaaggagtcacaactgacttgatatgaatacttatggctatttcgcaggggaatttttaaaactaaggtttaaaacgtgtaggacatggtaccaaggtagttttcagttgaagaatttttccaatgtgcctactagagagggacaaagttgtgaaatatgtaatgtagacttgcagggaaacaaatggtgtcatcaggttttactgtcaactacaaaccttacccagccagaaaccttcgtattttagatggtaggaaagacattcctcatttaggcaagtagggttctcattcaacctgcaaatcaaaaagattactcttaccttgctttacaaaaaattactctttaattagtgaaaaaattcaaattcaagccttacctaatgcttattgcccttccttgcaggtctaaatgctagacctagtgactgtggcaactatctctcattgatgttccaaaaggcgaagagctccttcctgctagactttcttcgatatttcagttgtaataagcagatttaactagcttttggaaagttgctcactatcatcatagtatcttatgccttcacttctctgtagttgaagctcttgctgctgccttgtcattctttatttatgctgacttgtccaaacacaaaaggctgctgaagtcctgtcttagtgagtttctgtgatccacactgtgcttaaaaagcacatcttaggtcctttaaaggtggttaaatcgctctcctcatggcttacttttccacactgttcacaagagctaagctaatacaacttataaacaggtcacatacacagatttcacctgcttataggttgtaaacatcaacttactgtaaatgttttcactataatactagttccagaacatagaaagttggttaacagtacaattaacctcatgccattaaaggatactgtcaaggttgtgtcaaacaatttcacaaacataaaacaggaaatgttaatctcccccattcctttaaactttatttatatgaataaaagaacttgagacaatttagctcaattttaatgtttcccaagcattattttgaccaggtacccaggtttaagttatgaacattgacagtgtccattatataaccacacttgaagttatttaggacttaaccattttctaatattagcctattttctacactgcttttcacatatatgcccattaacaaatggaatgtctgttacatttattggtttgtgaatgtttctggaaaactgcagtatatgtgaagaccaatttccatgctggcattgcatgcatccaaatattaatgcacagaggcacagaattagagcaacaagagagcatattcaaacactagcacaccccattcccctttttattgcttgtttgcttagtacttcttaaaacaaaagacttgaattcaacgttcaactaccaaagagagtaacagcagggcacatactcagggctcgaatgaaactgtaagcactagctggagcaaaacagtagacattggtttatattaatatatgtatatatgaccttattaactaaaactcttctcaaccagggccttccaaacaaattggtaacaacatgatttatgttgaaatatacacaagaaataacagtgtgttctttgggaatttaagaactcagactatccaaatttgaattcaggtctgtaggaagtgagaagcctgtactaagcaactgtgctacatttctgctgcagttaggttattttggacaattatacctgaactatccttggtttcatccagcaaaatgtatagaatacaaacaggaaagcatgccagccagttaggggtttaataacacatgatttttattctcttgctctgaaaacttgtatcaaaaaaaaagaatttaaagtaactcaagatttatgggcctcttgtgctttaaataagaaaaaaaaggtacccattaatttgctcagatatagcaggcttaatggttctatattttcaaaagtttttaagaatggtttctaacgtaggagagggaaaacatccaccatcccttttcagaatttaaatggagggcagtaaacattctttacacccaaaacctatggcagcagttcaaatttgaccaaggtaaatgtagaatagagatgttctgttctaaacacagctaggactcagcaagtctaacacactaaaatcatatgattacattttaaaagaaaatgcacaaaaaccaaatagaaattttgagattttttttcatttgaaggtaatcttaatgctattaaattcacaaatgctaatttaaatacccaatcctatttatctaaaacacacattgcaaacacacaaattatctattctctccacatgtcagcgcccattcatatcatggtttggaaatggggagaatagattccccttaaactgcaagtcagcaggtgtttctttacagttaactttagcaaaattcatacaaaatagtaattaacaatgatcttctttacttgttaactcacaaggaaacaccttcgaaactgcattttgttaaagtttctgtactaaaatgtagaaaaactgaactacacaaatattgaaaagttaaaaattccttaattttttattcctggtaccactaccacaatttacagggcaatatacctgatgtaatgaaaagaaaaagaaaaagacaaagctacaacagataaaagacctcaggaatgtacatctaattgacactacattgcattaatcaatagctgcactttttgcaaactgtggctatgacggtcctgaacaagaagggtttcctgtttaagctgcagtaacttttctgactatggatcatcgttccttctgtggcagatttttacagttcctctaatgcatttgggacgactgtctcaaagtaacctgcagctttcctgacaactcctcgctctctctcctgctaagaactgtagcccttttctgctgtttttagaaccttctgctaccatatccaccacttccaccaccagatccataaccaccaccatagggactgcccgagcttcttccaccaaaactgccccctttcatgggtccataatttgattgctgttgtccactataatttccaaaatcattatagttcccaccaccaccatagttaccaccgccaaaatttcctccttcattgtaaccatcatatcctccacctccaccatatccaccaccttggtttccatatcctggtccaccaccaccatagccccctctactactataaccaggaccaccgccatagttgccaccatcacctccaaatccattatatccaccatcacctcctccataactacctctgctgccaccacctccaccaccatagcctcctcttccaccaaagtttccaccacggccaaaattacctccaccacctccaaagttccctccgcgacccataaaattgccagatccacctccacgacctctctgtgatccagcagactgcatctcttgtttagaaagggcctttttcacttcacaattatgcccattaatagtgtggtatttctgaacaacaattttatcaactgtatcatgatcatcaaaagttacaaaagcaaatcctctctttttttcccctctgcctgtcttccataacttctatggtttcaatcttgccatacttttcaaagtagtctctcaaattatattcttctgtatcttctttaatactgccaacaaaaattttcttcactgttagatgggcaccaggcttcacagaatcctctctagaaacagctctctttggttccactacacgcccatcaaccttgaatggtcgagcaccgattgctgcatccacctctgtaacacaagaataagtcacaaaaccaaagcccctggaacgttttgtttgggggtctctcattaccagacaatctgtgagtgtgccccatttctcaaaatgttctcttaaactatcatctgtagtttcaaagctcagaccaccaataaacagttttctcagctgctctggttcctttggatcatggccctcctccccccagcggcgacggcgactgccggagtcgggctgggggcaaccaggcggcggttttacctccattttgagacaggactcacctcttccaactc

SEQ ID NO: 25065 - DNA, 2951 bp, Homo sapiens
  misc_feature 1, 2, 3, 4, 5, 6, 2932, 2949, 2950, 2951: n = A,T,C or G
nnnnnnagcactcgtgggccttttttttttttttttttggtctgggcttccgaatatgttttatgacggttgattttacaccaggaggtttgtctccgaggaagacccagggaactggatatctagcgagaacttcctccggattccccggcgcctcgggaaaatgggagctgctgcaaagttggcgtttgccgtctttcttatctcctgttcttcaggtgctatacttggtagatcagaaactcaggagtgtcttttctttaatgctaattgggaaaaagacagaaccaatcaaactggtgttgaaccgtgttatggtgacaaagataaacggcggcattgttttgctacctggaagaatatttctggttccattgaaatagtgaaacaaggttgttggctggatgatatcaactgctatgacaggactgattgtgtagaaaaaaaagacagccctgaagtatatttttgttgctgtgagggcaatatgtgtaatgaaaagttttcttattttccagagatggaagtcacacagcccacttcaaatccagttacacctaagccaccctattacaacatcctgctctattccttggtgccacttatgttaattgcggggattgtcatttgtgcattttgggtgtacaggcatcacaagatggcctaccctcctgtacttgttccaactcaagacccaggaccacccccaccttctccattactaggtttgaaaccactgcagttattagaagtgaaagcaaggggaagatttggttgtgtctggaaagcccagttgcttaacgaatatgtggctgtcaaaatatttccaatacaggacaaacagtcatggcaaaatgaatacgaagtctacagtttgcctggaatgaagcatgagaacatattacagttcattggtgcagaaaaacgaggcaccagtgttgatgtggatctttggctgatcacagcatttcatgaaaagggttcactatcagactttcttaaggctaatgtggtctcttggaatgaactgtgtcatattgcagaaaccatggctagaggattggcatatttacatgaggatatacctggcctaaaagatggccacaaacctgccatatctcacagggacatcaaaagtaaaaatgtgctgttgaaaaacaacctgacagcttgcattgctgactttgggttggccttaaaatttgaggctggcaagtctgcaggcgatacccatggacaggttggtacccggaggtacatggctccagaggtattagagggtgctataaacttccaaagggatgcatttttgaggatagatatgtatgccatgggattagtcctatgggaactggcttctcgctgtactgctgcagatggacctgtagatgaatacatgttgccatttgaggaggaaattggccagcatccatctcttgaagacatgcaggaagttgttgtgcataaaaaaaagaggcctgttttaagagattattggcagaaacatgctggaatggcaatgctctgtgaaaccattgaagaatgttgggatcacgacgcagaagccaggttatcagctggatgtgtaggtgaaagaattacccagatgcagagactaacaaatattattaccacagaggacattgtaacagtggtcacaatggtgacaaatgttgactttcctcccaaagaatctagtctatgatggttgcgccatctgtgcacactaagaaatgggactctgaactggagctgctaagctaaagaaactgcttacagtttattttctgtgtaaaatgagtaggatgtctcttggaaatgttaagaaagaagaccctttgttgaaaaatgttgctctgggagacttactgcattgccgacagcacagatgtgaaggacatgagactaagagaaaccttgcaaactctataaagaaacttttgaaaaagtgtacatgaagaatgtagccctctccaaatcaaggatcttttggacctggctaatggagtgtttgaaaactgacatcagatttcttaatgtctgtcagaagacactaattccttaaatgaactactgctattttttttaaatcaaaaacttttcatttcagattttaaaaagggtaacttgtttttattgcatttgctgttgtttctataaatgactattgtaatgccaatatgacacagcttgtgaatgtttagtgtgctgctgttctgtgtacataaagtcatcaaagtggggtacagtaaagaggcttccaagcattactttaacctccctcaacaaggtatacctcagttccacggttgctaaattataaaattgaaaacactaacaaaatttgaataataaatcgatccatgttttgtaacaaattcactgtgttatttaaggaaaaaaaggtaagctatgcttagtgccaacaataagtggccattcgtaaagcagtgttttagcatttcttgtgctggcttgtaatgtagggaaaaaaagtgctgttttttgaaaagatggtgtcatttcccccttcttcccatgttttaaagccccatcttatatccagttcccaaaatttgcatacttacctaagtattttttttaggtgtgctgtgtttggggaatatttgaaaatttaaagcatgatttaaaattttttaaagtgagctgtgacactggaaagctcttcattttatcttttaaaatagagttttttctatttatatatgtaaaattgtagtgtatttcttttcaccaaacagtgtgtgggacattctttatcactggtttaggatcacctcaggaagtgtcgttacccagaattccccactggctgctatgagacttgtaactttatcactatacttttggcttggtgccatcttggcagagtaatatttgatgtctgcgatttgtaaaggaatattctagngataaagatattaaacnnn

SEQ ID NO: 25066 - DNA, 2420 bp, Homo sapiens
  misc_feature 1, 2, 3, 4, 5, 2416, 2417, 2418, 2419, 2420: n = A,T,C or G
nnnnncctgatgtggtgtttctgccacatatgtatgttgacatagttcatagtactgcgccggtactgccagttagactccacagacctaatttggatggggagaaaaactctcatgcctgacccttccccccccgccaatgttagaccagagctgttgatcccacacagtcattgttctgaaaattcatgaactattctctcatatccctgaaatatcaaagtaagtggcccctattcctacagattatttagtttataaagctttgcttttaatcataccatagcttacctggctaaaactttgcgtataaaggggaaacttgctttaatctgtgggattgcggacccgatgcgacttgcagaaggtaaaccggcgtgggttttgtgtgcgttaggttaaggtgttagtggacttttaatgtatcttgtgaagtatggttactagggtaggttcaagagctacatgcctctggcttttgaacccatctattaaatcttttttaatgctgtactaagataaatgtgaagtctgagtaaggttgctctcagaaaaaaaaaaaaaaagcatatatatatataaaataaaatttaggccatgggaactggcattttacttggtataggaatttaatgagaaccaaatcacaaaaataccagatctccttttgagatcgtggacaatcaggcctttggacaatcaccgcttccagtgcccgctgtgcgttgaggttagagacctaccgtttacacgctagagccgagaggacgttcaagtttcttaaagatgctgttggtcttttttcttatgttattgttttagttttgtgattttgatgaataattgaagttcagagtcacccgtggctcctaaggaaaaaacagcatcatgaaaggcaaaaagtatttgaaacgtaattgtttcaattttccacgcccgttctcacatgccccctttagctttatttctgggaacatgtcactagacctcagctagcctgacaccgcaataacccgttaggctttgaggcttttcagtgaattcttgacatttaaatcttcttatagaattctttatgaagccttaactaattcttgtttttgcttcctcagaaactttttattgcatctgccatccttcattggatttttgttttggtttgttgttgccattctagcaatgagcttagtccttgtacatctgcattaaggtgccgatgcagaaggcaaattggaaacacgcgccagcggcagtggggctcaaagccgacctccatgcatcattctctagagttgaaaggattgacatttctcagtaactacccggcaaaatatatattttcataatgttgaatttgccttttaggaaaacaatgtttcatgaaacacttgtaagatacttattttgaaattaattataaggcattcatatttttaggactgaattcaaagggaaatgcttctttgactttttttcattgttcggttgactttcagctttctggagtgacaaagcagcagtgatgggtgctattcctggttctgtggtggtttactttgtctactaagtgatttactttcaaacctcattacagataatcttactaaaagacttaacatgcacactgctaaaaggtgttttactgttttccattaacgctgttgtatgaacaatatttggtgacatgttgtctttttgtcctgtagattgtcatatctgttatgtagttatccttttggcaagtcctttgatttttttttcctctagaaaatcctcagactgtcaatcttccatattttgaatattataatgctgtggccatttctatagaaagattacttgcaagtgtgtgtcttgaaaataacctcttgtatttgtgtgtttatgtgagttctgtctaagagatcagataagctctggaagcttcatcatctgtacctacatgtaactgtatctgggttacatgggcaggcggtaccaagtcctgctcttcgatggggtggctgagagataaaggttcctgaactctccttgctgtgtatgcaccacatctgtacttcagagaggtggaaaatcatctacaacactgcgtttcttgtggttgtgctgttactggtataaagtcaagtgccttcaatgctaaaggctcagaaatttttcttaaactgatttcatgtcctatgcgagcttgtgttctacaacctgcataaccagtacttgtgtaacacttgtttacgcttcaattgtacatggtgcttcttaacgcaatttatagcatttttatttaaggtacctccaaacttgaattcgtctgtgtgaagcattgtaaaacgatacatttctcttttgagtaccattacagttgtacagaggttttcactgcttctatttttctactgatactgactaagcatgnnnnn

SEQ ID NO: 25067 - DNA, 841 bp, Homo sapiens
cgcccgggcaggtacgcgggggccccaagcttaccacctgcacccggagagctgtgtcaccatgtgggtcccggttgtcttcctcaccctgtccgtgacgtggattggcgctgcgcccctcatcctgtctcggattgtgggaggctgggagtgcgagaagcattcccaaccctggcaggtgcttgtggcctctcgtggcagggcagtctgcggcggtgttctggtgcacccccagtgggtcctcacagctgcccactgcatcaggaacaaaagcgtgatcttgctgggtcggcacagcctgtttcatcctgaagacacaggccaggtatttcaggtcagccacagcttcccacacccgctctacgatatgagcctcctgaagaatcgattcctcaggccaggtgatgactccagccacgacctcatgctgctccgcctgtcagagcctgccgagctcacggatgctgtgaaggtcatggacctgcccacccaggagccagcactggggaccacctgctacgcctcaggctggggcagcattggaaccagaggagttcttgaccccaaagaaacttcagtgtgtggacctccatgttatttccaatgacgtgtgtgcgcaagttcaccctcagaaggtgaccaaggttcatgcctgtgtgctggacgctggcgggggccaaaggcccctgctcggggtgttctgggggcccctgtctggatggtgggctccaggctcccgtcatgcggccggacatgtgccggccgaaggttccgtacaggggcttacggggggtcagccccggggcgccgggcctttatcctgtgatggctctaacacgca

SEQ ID NO: 25068 - DNA, 2670 bp, Homo sapiens; identical to SEQ ID NO: 24256
  misc_feature 1, 2, 3, 4, 5, 6, 7, 8, 9, 10, 11, 12, 13, 14, 15, 16, 17,18, 19, 20, 21, 22, 23, 24, 2643, 2659, 2660, 2661, 2662,2663, 2664, 2665, 2666, 2667, 2668, 2669, 2670: n = A,T,C or G

SEQ ID NO: 25069 - DNA, 3918 bp, Homo sapiens; identical to SEQ ID NO: 22949
  misc_feature 3915, 3916, 3917, 3918: n = A,T,C or G

SEQ ID NO: 25070 - DNA, 1537 bp, Homo sapiens
  misc_feature 1, 2, 3, 4, 5, 6, 7, 8, 9, 10, 11, 12, 13, 14, 15, 1534,1535, 1536, 1537: n = A,T,C or G
nnnnnnnnnnnnnnncagaacacttacatccatttatttgggaaattgcttcacctgtaaactcacaactgataaggcacattattgcaaaactgtcggggtggagggagggaggcaactctaaggatcctgaaaaggggcaaagggcacacacttgcgatgatgtggaaaacatgtttctccttccctccccctactccagaacaccaaaggccacagtcttcaaagtctgctgcctccttcccccactctcgttatcaaggcttcttttaaagaaacacgttttaaacaatgaaatcctcggtgtgaaaggatcataccataaccaaaaaccatcacctggggatgcactcttcctatggaacgtgagtaattcccaagaattcatgtagaacaagaggcatagattaaagtcttggcaagactcttggccaaaccaaatcatcaacccagcagatgatgcccaaaagcagcagtctggtaagtcctgatgagttactcctgtggggtgcaggatcacagggctggtcagtttaggtgccaaggtccttctgtctttggaagcattaatccaggtctgtaacaattctgtactgcagctacaggaagtaatgacagctataggccattaagatacaacacaacaaagttatcagaagccaaggtttcctctttgaattaaaagataaattaaaagatacaattgtttagttactctaagcaaatacaacaatgaaaaacattcagagggtatactgcctgatggccccatatactgaacccattctcctagcatgacacagaacggattcctgcagaaaggacagataaaatgtttgcctggtcatgattcaggtgagtcaagggccctgccccatccagatgggtaagaatttctccagaacatatccatgacatacagcgtttgctccattcatatttaatagtctgtttgcaatcagcttaactgtcaggacatgcgatcataaggaggtctgacatacatggtaatgtcagtgtgtctgaacacaagagcgtgacagaaatcatcatgtatgtgagcaacacgtggaagtcctaggcagttcgtcaacttgtttcacttggcttatgaagaggtaggtcatcagcaaagaagtacaaaaaaatgctcttcaagagactaacagaagatgaagagcggtgtcagtgatgtgagttcccgtgtcatcattggtactaaacatccacaaagatgcaacaggaggacatctgtcccagcagcctgtcactctgcaaaagcagtactctggacaaggacaatcagcatcttctcccaaggcagctcaggggctggcatgaggcaaatacaacaggctatcccgaactccttattagaccacaaaatacaaacagcattttctttttttcccctttttttttttttttttttgtcaagacagtgtctcactctatcacccaggctggagtgcagtggtgtgatcttggcttactgcaacctctgccgccttggttcaagcaattccggaggcgnnnn

SEQ ID NO: 25071 - DNA, 1173 bp, Homo sapiens
  misc_feature 1, 2, 3, 4, 1163, 1164, 1165, 1166, 1167, 1168, 1169, 1170,1171, 1172, 1173: n = A,T,C or G
nnnncctccacaattaatcagtgttagtcctctgtttatctcgcatgttttatcttccaaacacagaccttggtgataacctgtgcttcaaactgtcttaaacaatgtttgtcacctttcccctagttgatgtaaagtatataaattgttgctatttgtttgaactattattgatgctagccaagcagtatacttgatgtgaagatgtcatgctatcacaatatgctaagagctcacaaaaataagatagaatttccaggacaaacatctttggaattgtgagtgaaggatatagtggcaggcttgtccctctttaattaatactcttggtatttgtggtgatgggaggatgctgttactaggagagttttgagatactgcagtggatgtgggatgtatatgaacttcttcataatgtactcctgggaactgggtaggacatatccatattgtagttcccaaggtgtctggttgagagttagagaacttttaaatttctttagccagacaggtctctatttttttaagttatccaggactccaagaaccatagttactgaaaagggagtcctgatacatctaatattggtagcatgtaacagtgtttgacaaagagtaagtaagcagtattcttgggagtcagtgttatgtgtttcagcagagtattattttgtatatgtatgccattttctccctgcaaagcagctcaacaagagaaaaagctctagttatagggcttaaattgatttctatttcaaataatttcctaagagattctagagtagaactgaagagtattctattggaaaagtgaaaggaaagaaatgtaattttctttgaacatgaaaaagaaaacaactttgagagtagtcatttagcagtagatgtgcattattatgagaaaacagttctataagtccagggttaattatattaattggaatgtcagtctttaatgtcgagcttattgtagggtagaaaagagctttctactcagctaacgattactcattgatccaaaacttaaatacatctataatttcctggggctattgtgagtactgtgtatgtatttagcaaatatttaagacctagtaagtgctcaataaattgtagctgttattgctggggttgtttgtaccctaaaaaaaaaaaaaaaatgnnnnnnnnnnn

SEQ ID NO: 25072 - DNA, 995 bp, Homo sapiens
  misc_feature 1, 2, 993, 994, 995: n = A,T,C or G
nnctaatcctctcagaatgtaaataataataagttgtaaaaaaaaataggttaatacccaatgccgggtttagccctcacagaccatatccccaattgaatcctgcaggttgtttgaccacaaagttataagctgcaaatctatagcaagactttgaaagtaaccaaatgtttagaaattaagcatcacatttctaagttattcatgcatcaaaaaagtaattacaatgaatattaaaatatattttgaatttaataaaaatgaaagtaaaaatactgcttgttaaaagatgggaggcttaggcaaacctcagcttggagataaatgcatatgcttgtttaaaaaattaaagcttgaaaattaataatctaattgtcaatctcaaaaatttaaaatgtgatgtcaaattaaatccaaagaattagaaaagagaagatacataagaagcatgagaaaaggaaacaatcataaaataaatgaaatcagcaaaagccaaagttactttgaaaagactgataaaaatataccatgattatgcgtgaaattaaaaaaaaaaagagtatccacaaattctaaatatcatcaataataacaaggaaatcattatagattctatagtcatgggatagaaaaagagaatgtaataagtaactttaagtcaaaattttgacataatttgatgaaatagatacatttctagaaaatcattaacgtgacacaagaataaatagcaatccgaatagctctatatctatttaaaaataaaattacattaaagctttccaatatagtgagtctaaatcaaataaatattaaaaatctgaaatgtttccaggaagaaacttgaaaattcgctaatataaaatataacatagcatatgcaatccctttactgaaaattgtgagattttactgagagaaattaaagatattcaacagaaataaaggtggtaccatgttcctatgtcattcgtgcggacgcgtgggtcgacnnn

SEQ ID NO: 25073 - DNA, 1866 bp, Homo sapiens; identical to SEQ ID NO: 21250
  misc_feature 1, 2, 168, 1861, 1862, 1863, 1864, 1865, 1866: n = A,T,C or G

SEQ ID NO: 25074 - DNA, 1000 bp, Homo sapiens
attcaagtagggcagccagcagaagacgaaaagcccaaggaaggagtcaagactgagaacaacgatcatattaatttgaaggtggcggggcaggatggttctgtggtgcagtttaagattaagaggcatacaccacttagtaaactaatgaaagcctattgtgaacgacagggattgtcaatgaggcagatcagattccgatttgacgggcaaccaatcaatgaaacagacacacctgcacagttggaaatggaggatgaagatacaattgatgtgttccaacagcagacgggaggtgtctactgaaaagggaacctgcttctttactccagaactctgttctttaaagaccaagattacattctcaattagaaaactgcaatttggttccaccacatcctgactactaccgtatagttttctctattctttcatttcccccttccccattcctttattgtacataaagtaactggtatatgtgcacaagcatattgcatttttttttttttaactaaacagccaatggtatgttttgattgacatcaagtggagacggggatggggaaaaatactgattctgtgaaaatacccccctttctccattagtggcatgctcattcagctcttatctttatattccagtaagttattttgctctcacgtgttttaccaagagagaaacagcaacaattaaaatcctgtggtctaccttgtccagtggagagaattcacgggtgccgatttcattgtaaccagggcagtttataccttttgggccgatgctgtcatggggggactggttaagggggatatttttcaacaaaagaatctgatatgttccttagtacggtggtggtatattacttgtttagcacaaaaaacaaaaaaaatatgtggggctgcgctaaatttaaactgtggcggccaagaggagagagtacgtctgactgagttatggttacaaacggggcaggaacatgtggtgtaacattagaca

SEQ ID NO: 25075 - DNA, 2016 bp, Homo sapiens
  misc_feature 1, 2, 3, 4, 5, 6, 10, 16, 20, 24, 26, 30, 32, 33, 34, 40,45, 46, 47, 48, 54, 57, 58, 61, 64, 65, 70, 71, 74, 76,1190, 2012, 2013, 2014, 2015, 2016: n = A,T,C or G
nnnnnngganacccangggntttntnaagnannncttttntaaannnngtcaangannttnaannttacnnacnanaagggccaattgggctttcggctaatcgcctcttgtttttttttttttttttttttttttctttaaaagcaatttatttctgattacaaaatacaggtgaggagcatgggcgatgcctgtaaccccttggttgtgcatcttcccagtctatttctgcttctagaaataccctgtgtacaacagcaagctcatgctgtccccaagtgcttgcacattctaacagctgcagagtatatgaccaggtggaaagtccaacagatgccccactcacaagatagggccctccaatcagtcttctggctccctttcactcatagtaactggttgctcttcctattggtcatagataaatgacacctgcacaattctccgagtgctttcaagcaacttcgggaggcagtgactaagaccctttccttgctcccagcttcctatgtcccagggctgcctgtggcacctggactgctgctgcccctgggtcccgtacattccagggcaacaatggaggaagggcaggcaacgcatgaggaattaacagtctttattgggctcagaccaggagtccgtgggtccaattcagttcttctcgtggcctcccctttctcactctcatatagtatacaccgtggttgtgcatctttccatattgggcctcattagattaaattgaccacctgtgcacaaatcttcttccgaggtgtggcgtttacaaacgcaacttttcgggggaagcgcagtggtgccctataagagaccccttattttcctttgtgtcctcccacagggttctcctatatgttgttccaccaggtggggcttgcctttggtgtggccccccttgtggacgtcgctgtggtgtgccccccgtgtgggtgtccccccggataccaatttctcccaggggcgccaaccaaatgtgcgagcgagaagcggggcgcaggtcgcacaccggcactttgaggagaaattttaaccagggctctttataatatgggggggccctcaaagaccacaggagaagtctcccggggggggagtctcttgtggagggagaccccctccttgggtggtttctttcctgtggccccacatctttattctttttcgtcacccnagtgtttctttccttacggggccttggtttccccctggaacgcccctcctaatgagacgctgtggttccctattctcccccggggggaacgtggggcactccttgggggttttacccttcttttccccttccttttcctcctctccccagagggggtggggaccttgggtgcaccacttggcgccgtgggaaaaaactttcccccaggggccaaaactcttctcgtttggaaagcaccaaggtggcggccccaccaaaatatatttaagtggcacaacacttttttctcttttgtggtgaaagggggtttttcaaagaaatacgcctacggaatccactttgaagtgggaggcgcacgcgaagggaaacccaccacaatccccgggtttttacctctagggcaggaagaggacgagggagggagtatgccggtcgaaaaaacaccatcttgcgaaaaaggggcccccaacaagagggctcgggcgcccccaaaggggatatacggggggggggggaacaaaaacccgtcgaggggaggccacgaaaaaaatagtggtgtggtggcccgccaacatatatataggtcctcccccaacgaggagtgtgtcgacccaccatgctgtgagagtgaagaaacaggacgtccaacaatattttttctcttttatcaggagcagcaccacgattgtatttctccactagctacgacaccctctgcccatctcgtgtataataaagtccagtggcggcgtagggttcacacacattcactatcatcagtgtcgctgtctaggaggggcggaatgatgcctcttgaggtannnnn

SEQ ID NO: 25076 - DNA, 3907 bp, Homo sapiens
  misc_feature 1, 3906, 3907: n = A,T,C or G
natagggagtcgacccacgcgtccgatggtgggcatgttgagaagggagaaagagggagtcaaattctacttgatactccccgagagaaaaattcatcgtacagcctgggaccagtagctgagactcctgacctcttcaaactacctcagctaagtacatcaagtggtcatggaccagctcatactaaaccattaaacagacgctctgtactagaaaagaatcttataaaagtaactgttgcaccatttaatccaacagtttgtgatgctctgcttgataaggacgagactgattcgtccaaagatactgaaaaactctcttcccttggagaagagatgagagaagatggtcttagcccaaatgaaagcaaactttgtactgaatctgaagggatcagccccaataactctgcctggaatgggccccagctctcttcttcaaacaataactttcaacagactgtctctgataaaaatatgcctgacagtgagaaccctacgtctgtattctctcggatctcagaccattcagagactcctaatatggagttatcctgcagaaatggtggttcacacaagtcaagttgtgaaatgagatctctggttgtttccacctcatcaaacaaacaggatgttcttaacaaggattctgggaagatgaaaggccatgagagaagactaggcaaagtcattcctgttctacaaactaagaccaggactaatgttccgacgttttcacagtcaaatctagaacagcagaagcagctttatctcaggagtgtcattgctcatatagaagacccagaggacactaaccaaggtatctcgggggagctttgtgccttgatggatcaagttcatcatatgcagcactcaaaatggcagcatccttcggacctcaccacgcgaaactacgcccgccgacagaaacatctgcaaagatacagtctgactcagtgggttgacaggaacatgcgaagccaccatcggttccagcgtctcccagacttctcgtacagttaatttgtgtcatcccatcagcaatgaaggtccctatccagggtcctgcttggagcagcatttcatgttcttttgctgttttgtgctttgccgattttggattttatttttcacaaaatttttatttaaaaaactcgtcaccttttggaaatgcccattgccgacttgaatttttttgtatgaagtccctcctgattttgtgtgtgtgtgtctgtgtttaagcaagcgttcggttggtatagtttttttttgtttttttaatttaaattgaaggtagctgcctcctgaaagccagcattaagccagaacacccaggttcaagcaaaagacccacctctctgcagaggcaaagtctactttctggtacctcaaagaaatcattgttcaatcttccataaggaagagattctttaccaggctgtgagccagtgttagataacttgtgaatggatataagttacttttaacaacccctcttacttttttatttgaatcctctgaatacctgtcagtattttaaagttggcaatccaggacattataagtaggatggagcaggagaagaatcctattgaaaggacaaattaaaatagtaaatcctctcctctcccttctgtaggtactagctgccttgatttttttttgtgggtgggggggattttttcattccttattgaacttattttgcacaatagtgtttacaaatcttatacatcttactttgacagaagacttataataccttgtggtcttgagactggttgtctcctttgcctttcttcaaggattttcctttttctttttaccccccagtgaccactctgctctttaggattctagtggcagtattcttgtaacctgttagacgtggatatacctcttcaggatggcctccttgctgtctttattgaagagctgcccacccagagtcttgactctagggcaggctagtgctattgtggtgtcagttgatatttagtttcatttgctgaaccccaaatttgagtgttagttagggagcctccattctgtgggagagtgtggaaaggcactcttttttctccatattagttaacaagaggtgtctttaggccctggatgttaccatctcatttggtcaagcccctgatacctagtttcacatggatgctaacgtggatgtaatatagttgtgacagcctatgcacaaaagcattacctgatcttaaggtttggtattctaaccaaagttgacagactgtgcgtctgtcttaatggatgtcttaggagttggttattctctctttttttttgagacggagtttcgctgttgttgcccaggctggagtgcaatggcgtatctccactcaccacaacctccgcctcctgggttcaagggattctcctgtcttagcctcctgagtagctgtgattacaggcatgcgccaccatgcctggctaatttcatattttttagtagagacaggatttctccatgttggtcaggctggtcttgaactcctgacctcaggtgatctgcccacctcggcctcctaaagtgctgggattacaggcatgagccactgcacctggccggttattctctctttacagatagctatagacatcattttaggaagtgttgcagtctggcatttgtgctattgttcattctctgtgaaggctgttcatagttgctatagcctgtgtttagttttgtgatttcatcaatcccatctttctgtgtgagtaatgcattctaaacatcctaccccactttagaaacggacgtggggaacgcttggtcatttaagccaacaataaatttaggtgaatgtccctaagtgtttactgtttttatccagtcaaggatttgcttttccttgaacatttgttttaaattctggggccaaaatgcaaaggagaagttctattcaaaggcagtagttgaaatctattattttagttagcctacttggcatttactacatcggtcacttctccaggctgccctaaattaggttgatggagtgagacatgccaaacatccacctttgggaccatagcatagttaaaattaaatgtagttggaatagctagcattgcagctacagtagggaactgtagtctagttccctacagaaaacccaaggagtgaagggacaggattttgcctaggcaaaaatctaagactcgtgccctcctggtacatggggttttaagactgaatgtgtaataggagcactgcctttgccaaatcaaatgagtgacaggttaactagaaaatgtgacaatcacatttcctcttagctcaaataattctgtttttccaaagctttagcagcttaattaaatctgttggactgggggaggagagagctgttctctagtggttaacatggtattctttaagaagaaaaaacaaagccaaagaaaactcattatctggcatgttcgccttaaagatggtactgggtagaatctggagttttcatctcttttcaaagctgcatatctctcatatttggtattggcctctaagtctaatattgcagttggaattcttgctgtattattttttaagcaagtgttaggtgcatttaactgctttcttcatccatgacgacattcccaccatgggggtcttgacaaagcagagtaaaaatatgctgtttacattgtttacttacaagtaaggagcctgaaataacctgtagtttcgaatgcaggccctgatttactggcgttgtcagtttcaattatgaaactgaagtttggtgcctcctctttatcatgttttttcccttgtagcagttgtgtttaatgtcattaaaaagaaataaaagttctttgtcagtgaaaaaaaaaaaaaaaaaaaaaaagggcggccgctcgcgatctagaacnn

SEQ ID NO: 25077 - DNA, 3060 bp, Homo sapiens
aaaggccccgctgggaccccgggaaaccggcccaggacaaacaaggggggaccaacgcaggctttaagctccaacgtccggaaggcccgaagggcagccccccattgtgcagggacccaacccgtggggacaacgcccatggggcacaaacctgccgcccgacattctgagaggaaacggcagcacgcttcccaagaaaagagaagtgatcggtctccaaaagttcgcaccaggggggggcaagtgagggacctaacggaaataccttaactttggggaataagaataatctatttccacacaagcaacctgggactccgccaaaaaaaaaaagaagaaagaaagccaaagaaaaaagagtttgggagggcccttaactaaaatgtgcttaagacagcttcatgagagagctgccttctttcaaatttgaattttgaacaaggcaaaataacaattaggtgatatatttccctgcagcatgggagtagttaacttcccccaggcaaaatgatctcaataatcattatttattaatgaaaggaggaggcaaattggtgaattaagttgatctaggagatggtggctgacatacactaacggaaatattaggattgctttataagtgaaataaacagtctggtctgtggaacatctccacttcagagagaggaaaaatgcacaaagctcctcaagtgaatctccagctctttcttactctcatgggacagatggcatttttaaaatgacagtctccctttcagttaagaaaaacacaacaataaaaggaaaaggaagataaataaatagtgtgtggatgtctttagatgagactttaaatgttctttaaataacttttgataatgtattttaaatcattacatacaactgccactgcagtgacaatattccagtaggggcagcattttgctaaatgtaaaagattgccatttaaaactcatacatatacatgtgtatatacagttatatcaacactatttatatacatatatatctggagagcaatatttcattgcctttgaatatctatatatctactcccacaatatatactagagacatactgtgtgagtacatacgaaagcatatgtacacatgctctgacatgtatatatacacttttgtctgtgtgtgcataagagctttaaaggcacaatatatagggatgcaagttttctagagagctgcagcaaagttaatacagaatgtcacaaactgagaaaagtcaaaaggaaatatagcagaattcatcacacaggaattcatcaaagcagtttcatcatgagaaaaatgagttagttacagaattcaagaggctaacatgtgaccttgtatgctttccattaaaatgtaaatggtgaagttatgattaaactacaaagcaaataaaaatatgtaaatgacaaattaatgacagtaagtgtggaaataaacctaacactaatatcgatcataaaatcataattatgttcttttgtaatttaagtaaaatgtccccaaattattgagctaaaactttcaaatttgttttatttgaaggttggctttctgtttgtttttgagacaaagatgaatgcccaagtctcaaaattcctattgataatattaccaaaacttgtatcttctgggaaaatttcagagataaagatctttaaaagaaataacagagaagttgatgaaatatgcttaagccagatgcttctggctagaagagacagaattaagggggaaaaaaaccacaatgatgtgtgattttttttttttttttaagtgatgaaagactgaccagtagaaggtggtgaagatgaagaatagtggaactggcaagtaagaactgttcagacaagcattcattgtgtaatatccataaacaaaactataatccaaaggacttccattttagtatgttctgatgatgtactctagactgtcacctcctctggcttacagaataatccagaactttccatagacattaatcttgcttaacaaaggctgtttacctattatacacacacatttttaagggaaatatatgtatatagctttatctatacacacacatatacatacgtgtatatatagatttatacaaatgtataaataaacataatacttttcaatctttccattgacaaggcaagttcacattcagcaaagtgccaccacatcccatatacacatctctgtacagatatacacataagggtctgttttcacccttcaaccgggagaattttttctagcaaatcccattaaccagcaactgaagggagaaatggcaccagtacaaactcccttctttcatttgcatgcatatgtacaagaaatatgcagatctaaaaacaaaatcccaaaacaagagtgaatgaaaccaggagatgctgcaaaaatacaactgtagaaaagaacagcatatagagctttcctagatcttcactatatctaagatgaagtaaatgatgctcaagagacaactacaaattcaggtatattatcagaagttgctttgacatatttcaaagtacatgattttttaagtattaaaaataaatgtcattggaacatttaataccaactctacttttgactatttcagaccaccagatactccagtaataaatgtatagcaaaataacaacttaaaactcaaaataaagggatgtatttttttttaattccatatgaatcaggggtagcacaattttcctatagctgaaatatggggatgggagcactcttaagttaataaataacagcagaactgagtaaaagttttttgaaaaattttggaaataaatgaaatcaccccagctttgaaatatgcacggtgaaatgatcccaccaactccttaaacaaagcagccccttccaaaaattgtttatgaaaggcctatactttttcttaacttcaccaagaaaagatgatcaacaatattttcttactcgaatataaagaaatctataattaacataaaaaagattcaatagatctgtggtcccatcaccacaatagataaacacagctcatgtcggggctgt

SEQ ID NO: 25078 - DNA, 349 bp, Homo sapiens
acaggtccttctgagcagggccgaggagctgccactcctcccaagtgaactccacagccacatcctccagggtcagtgattcctgggacttgatcattttcttttgttactgggaaatagccagtaagtaggatgctgtgtctgtagtctctccttgagctgccctcaatttctggctagaaatcttggtctctggtgaattacatccctgcaaaggatggtatccaggtcctggaacctcctcctcacctcacttgaagtgtcttgctcctgaagtcaggacctgtgggtttgaaatgcaccaaaaaacaaagcaatatttacaagatggataaatgtggctgggtga

SEQ ID NO: 25079 - DNA, 638 bp, Homo sapiens
  misc_feature 631, 632, 633, 634, 635, 636, 637, 638: n = A,T,C or G
gcagctgaggagttgagcaggtgcttctcacctggtgttattgaggcgcgggaagtccaaggtaaaaaggtgcccagagttgccaacccccggctggataccttcagcagagaaatcttccggaatgagaagctaaagaaggttgcgaggcttgcccgggtccgagatcattatatctgtgagtatgaaggtggtgagatgagtgggcagtgctctttggtgctgcagcttccttccagtctagatgtgaagtttatgagtaagttttacaggcaagccctgcctagactaaagtgtctctttggtccccagtctctgttgagtcaacgggggtgttgccaccagatgtgctggtgagtgaagccatcaaagtactgatggggaagtgccggcgcttcttggatgaactagatgcggttcagatggactgagcttggatgcttctgaggcaagctgaagctttgggttctgactgacccaccctacaggactgctgaacagagagcccagtgtgactagggatcctgagttttctgggacaattccagctttaatcaatacattttgttaaatgtgccataaaatgagactttttacgcctttataaggccttagatgtaaataaactcannnnnnnn

SEQ ID NO: 25080 - DNA, 2874 bp, Homo sapiens
  misc_feature 2851, 2852, 2853, 2854, 2855, 2856, 2857, 2858, 2859, 2860,2861, 2862, 2863, 2864, 2865, 2866, 2867, 2868, 2869, 2870,2871, 2872, 2873, 2874: n = A,T,C or G
tacgccaagcttggcacgaggacaaggtgcaccggtttcatagacgcaaccttaacttactatttagatgagatctttctaaagaaaaaaaaaagagatgatatattttttgtaaacaatatttctatcacaggcatccataaactgaaatgactacagttgtgcaaacaggtgtcacagtgaagttgagcatttggagaaaaaaataaaaagcaaaatttgcaggaagaactgctaaattaatactttatcccaaaatgccacgtatgcctcaccctctctgttctatccaaaaccaaggaccagagtgctccaatggtaggccccagttgtctcgatgtaggtagaggcaccaccctccccgaggatgcgtgtggtgtggactatccccatgagctgaccactacttgatttttctttggtggccgtaacaacctttaatttgtgggcatctgcaacagttcaaaacccaccatcagataaaacataatccacaaaatctcacgctagaggcaattacctacttttagacccttttccctctttcattcctatctttttcctcctaatcgctgctctctggttttattttcatctggagactagccagggatttctttggctttggcttttctctgaccattttttccatgggtaacaatgggggatcctaaaagttaaacagattgggaaaaaccttgttaagtggccttatcattattatcatgttaaagaaaaaaaatacatttgcaaagaccttatccctttcaatacttcaggtatctttttctgtatccagtaattaaaggtgtgaggtccacatgcagaagagggaccccaaaatgtaaatggatgtggacaaaaacagtcaatggtctatttaagtgtataatttatactattcagaactgtgacattaattctttctgggagaaaagtgatttaaaacttttttgatgcatagttgaggtacccaaatatcaaaggcagagaccccatggggctccaaagagctgcagtctccttcccaaggttttctggatataaatttgcatggtatagtcataatagcttttgagctttttatatgcatttggcaccaagactgggatccacaactttgtagacactgcgatgaagttaacatattagctatactataaatagtgtttgtaactacacacacacacacacacacacacacaaatacatacatatattctgtaaaaacaaaaaaaaactttttaagatccttgggtatgtgtttgctttactccatttcagaagaaaattacttttcttctaacaaaattattttatagcttctccatttttaaaacttgtgagagcattgagaagagaactctgactgtgttaacagaagagagttgaattggagtctctgttgtgttaaaatgacctctcgttactccacagtagttatttgagccagtgactgagtcgcgttgaggaattctgaacccggacctctgacgttgttgggaggtggctgttacccacacccagacctcttgagtaaggacagaaacgttatcattggggatataatgagatttctttcttaacaattgaaagtaataaagagttaattttctcagtagtcctgtctttccaaaatgcgccacaggggctcaagatctacagaagaatcttgttatgacagtttgttattacccatattcagatatccttgagataatggaagagccctgctacataactccctacagagaaagactgatagacttgagtagtccttaaaacaagtgttattcctgttcaccaaccccgggactgtggaggggtttcactgtctataccatgcgacatccatttcccctgaatctcaaacgaactagaaagtatgtcatgataatatttccattagatttggaagctacctgtacatctgcaatattgtgtttttaacgccagcacccagaactttgacatgttcagtcactccctgaaaggcacttctctcttgtccaaacacagcgttgacatttttactgaggagatcatctcaaaggtgatgccaaacgagtctggggctggttttaaggggacaggcacattgcagttgtaggtgttcattttcagcatctagtagataatccattggtgtttgtcccaccattggtgtattctaacaagaatgtgtccaactttgaatctcctggcttgaaagtataaaccatcacttaattcttattttaactctccacctgaaaaccagttcatatttctggccattttatgtaagcaaaactgaacaattggtgaaacattttgttactcttggaattgactctggctgtcagtgtgagccattagagtaacatcgaatcttggggcaaagagctgcccaggtgaattaaatttttccaggacactagctagtgtgccttggattgattacctcttctactgcattgaaaggcgccatgttttcctgaaatactaaattcccaacacctgggtaaacaatgaccttccagagagtggctcccgtatgcctctccctaggaccaaccccatgaacatgttttgtcacgtttgtctcatgtttctacttcacaagtcagtgagtgtgtttaaggtaagtacaggattattctagtaggaataggcgattgctgtcataatcaattctcatgttgatttcattttattgtaaagataaatttaaacccagttttgcttaagcacattgatgtaattttttggtattatttgacatgaaaaaacagcaaaattgagtgatagatacaatatgaaacttgttgatgaatgaattcaaatttattaaaaaaggagtaactgaccnnnnnnnnnnnnnnnnnnnnnnnn

SEQ ID NO: 25081 - DNA, 924 bp, Homo sapiens
acgcgtcacagtagatagtgtcctatagccactggaatgtcctaaaccgaatgaatctgactctggtgacctttcaaacagaagtcacatgagctccttcatttggttgtagttcttcttagaaggtgtgataaccacgatctcagggaaagaattagaaatggggtgttggaccattcttacaaccaatacagaattccacagcccaattgccatgctgtttcttaccttggatgttcaatttgatgtcatccaattaaaataccatggacaaaagccaacttttcatttttttaaatttattttgcttattacggaaaaacacaccacataattcaactagcaaagaagactgcttcagggcgtgtaaaatgaaaggcttccaggcagttatctgattaaagaacactaagagagggacaaggctagaagccgcaggatgtctacactatagcaggcgctatttgggttggctggaggagctgtggaaaacatggagagattggtgctggagatcgccatggctattcctcattgttattacagagtgaggttctctgtgtgcccactggtttgaaaaccattatacaataatgatagaatagtacacacatgagaactgaaatggcccaaacccagaaagaaagcccaactagatcctcagaagacgcttctagggacaataaccgatgaggaaaagatggcctccttgtgccaccgtctgttatgatttctctccactgcagcagaaagccgttcttccaagcagacagcaggtgatgatggcaaaatagaccacactcttgaggagcaggaggaggtacatgtaatatgcagaggtgtttgtgagctgcagcagtagtgtatcatttgcatcttttgaccaattgtctttgggatccattggatcggacgcgtgggtga

SEQ ID NO: 25082 - DNA, 1316 bp, Homo sapiens
acacacatgagaactgaaatggcccaaacccagaaagaaagcccaactagatcctcagaagacgcttctagggacaataaccgatgaggaaaagatggcctccttgtgccaccgtctgttatgatttctctccattgcagcagaaagccgttcttctaagcagacagcaggtgatgatggcaaaatagaccacactcatttgcatcttttgaacaattgtctttgggatccattgtgatgacatctgtctttattggaggaaagataatttcttgatcaactccgtttttattattctcatgtctgacgatacatctgtgttctttgtccagtgacttttctggcaccgttaaccagctaaatttcatgtatgtgtcgttagtcttcatggtgttcccctcctgggatcccagaatcgtgttgctcttcttttcttgccaatgtatcttaataacatcagggaaaaatttctcaagaagacaaaggtatgttccagccttctggagctttgtttcagcaattgaaggaagaaaaatagtgggcttgggggaaacatctgcatcaagttgtttatcaggtgccaggcattcagctaccctgaaaaattgctgttcgtatactgaggccaggaatgtgacatattcaggtaaggttgatcatttttttctaaaaaacatctatcagtttttcattactggaataaaaacagaaaaaaaattacttatcaggcgaagttactatgagcctagtcccttttgcaaacgtcttgatccaatcactactatatacccaggtggcacagtaatagaccccagagtcattttcaattagattttgcagtataaatttaaggctcttccctgtgcttgcataagtatgatacttttctcgactgattcctgattccaacacatccctggagtagtaggagtcatagtatggaagacgctgtggggccttccccgcctggtgcaggtaccagtggatgtagaaggtatttgttacagtaagatcgcaagtgatttcagcagatgacccagtctgcctggtgactgactttgttctcccttccaagttggaagatttctgactggcaagaggcaggaaagctagaagcagggctggggcccaccgcatgccttcctctcgggggccttggaaggaaacggaccagatgaagaggagcagaagaccctcttaaaactcaggccccactcaacaaggaagtgatccctagcacagaagacagtaggaggagctggtttcctgagacacaggcagagagaagtgactgaagatggtcttagggcggacgc

SEQ ID NO: 25083 - DNA, 2027 bp, Homo sapiens
  misc_feature 1, 2, 1867, 1912, 1952, 2003, 2021, 2026, 2027: n = A,T,C or G
nncataatcaggcaactcaggtagaactagaccagttaggggagtataacccagctgtctataagaagccaccgaagagcaggggcctcagtgcttgggccaggctgcgggcatctttaacaccgtggttccagtagatacaggcgagtgagctagaagcatgtctctgactcacccagcgcgatatacgcagcagaggcatattagcctcgtactcggagtggttcttttagctcattagctgttacctactcctgtttcccaaagcttatgtaagagcttttccttctaaacttaaactgtgtgtggttcacttaggaagccacgtgccactatcctggctgctgtcttaactcgtcgtcttgggcacaggatacatattgtccccgtcccactgaggacctcagtttgggagtgcccttgagtccccttttccttagcctgcaggtgcttcaagtggatcatggggcaaagcaggacgatgatcgtgtggggctcttcctgctgtcacctcccatcatcccactctctacaccaggactcaaggggtacgttaacaacgaatgagcatacaggagcaatggcctgtcagaatgccaggcatgtagtgttgacacaaggagagcccttcattggatctttccccttgcctgtcttagtcgacagacgacgaccatcaagaaggacgggtgtatgcatcccacaaaggcctccgtgactaagtttgggtcgagacctcacaatttccctgggcacagggtggccctggtgtgggactttagtcactcaacgcgcggtcttacccttcgaaatcagggaaggtagaccacatggagcaacactttcattacaagtcagatttttcttaaactagcaggcaaaaacagtacttccaaattttaaggtatggaatgaatgcagtacatctggaattgtagtcgatgaattgcttttttgacttagaagctgaagaaaatagacatagccggcatatctcatggtcaggagctggacgattctggtaacttaggctttttttctctcttcttttgaaacagtgtaacctgttttatgtctaaaaatcttaaggatagtttcagtggttcctgggatgtagtataagttaactctgctgccatcttgttttttttttttttcctttattttgataagtgattattatgcttgataaactttgaattaaatacagttgtcttgagggtatgataagtccacaaaaaattggaaagcatcttacccattttcttcacatcccaaatttttatttgttccatgtcatagtgatgggaagcagttacagagcagcgtcttctgtgtttccttcatgtgttagatattggcaacaaagccagaggtgtaatgttggttatatgaagttcatctcaaaatggagaccatgaccagagtttccagatgatacacgttcttttcagcttcattaaataggcaactatgtttctaaatagtaaagtttcaaaatattctctcaatttaaaatttcatcctcttgaaaatctttgttctttacaaaattatcttaataagttctatatggtcagcttcatcttccttttttttttttgagatggagtttcgctcttgttgcccaggcggagtacaatggtgggatctcggctcactgcaacctccgcctcctgggttcaagtgattctcctgccacagcctcccaagtagctgggattacaggtgcctgccaccatgcccagctaatttttgtatttttagtagaaatggggttttaccgtgttgggccagggtggtctcgaactcctgacctcagttgatccgcctgcctcagcctcccaaagtgctggggtttacaggnctgaggcaccacggttcagctcaggtttcaacccgtttggcaagnaaagttttaccaaggaccggagtttaaatatgacatttcnagggagttgtaactttaacaaggtttaaaaggttgtgggttcagattgccnatactttgttcacaacgngtggnn

SEQ ID NO: 25084 - DNA, 808 bp, Homo sapiens
  misc_feature 1, 4, 792, 793, 794, 795, 796, 797, 798, 799, 800, 801, 802,803, 804, 805, 806, 807, 808: n = A,T,C or G
nggncactttgctgaggtatgaagtgtactactttgaactaggctgaagcatctgagtcttctaataagtgggaagggattcaacaaagaagccatgaccagttaaagatatttgcagagttacaccttggtcataagtcctttgtgaccttgattattttggcttactctttggatgagaccagacaagaaaaggattaaacgggtggctcctttaatattattattattgtttttgagacaaggtccctttctgtcacccaggttagagtagatttcagtggcacaatcttggctcactgcaacctctgtgtcctgggctcaagtgatcctcctgcctcagcctcccaagtagctaggaccacaggtgcgtgtcaccatgcttggctaatttttttgcagaaacgaggcctcactatattgtccaggctgagtggctcttttattaaccagtcattacactgcggaacagccaacatagagtacttgctctcgccctgtgaattttctttcatgagggagtcaatatgtagtggaaagaagcatgtagcaaaaaagacaaccttgatctttaactacaaccagacgttggtttatttccaaaataaatcccctgacaaaaaacctgggtgatgtttaagcaattgactgtcttagagtcccgcaagaagagcttagacacaaaaaggcggaacccaccggggttgacaacgggacgctgttgcatatatccagcagcggaaatttcatttcctggccgggggcactctgcccacgggccccacacccacnnnnnnnnnnnnnnnnn

SEQ ID NO: 25085 - DNA, 1372 bp, Homo sapiens
  misc_feature 1, 2, 3, 1370, 1371, 1372: n = A,T,C or G
nnnacgccgtccgctcagcacatcccgcctgagtattggatcataggagagcacttgctctcctgcctctgccaggagagggcttgttcctccaactctaggaggccaggcaagcatggacaggagccaagggagcagggtcattaactttttcttctttgcaaagtgggcacttggcatcagggtcccaatcaccagaaagcaccaaagcccctggcaccccacccactccatcctacccagggaccccaagtaggcaactgttatggcagtgggtccagcccaggccagcactgccagcctcctctccctgcagtaggcaccagctctacctcccccggcaggcaatgtcctggcttctcagcccagcaccatctgttcccctagacttctcaggggccagcccagtctgggccaccctttgtttccctcatcctcggctcccacacaggtgacagacccagcagatagcttctctctgggaaaggttggatgctgccttacatccccttctagccctcctcccatccacacacacaggcacccacccacaccaggtcggcttgtttctcacatgtagggagagaggggagaccaacccctttgtgtcttttgaaatacgaagaaaaatgtgtgttcaggagcatgactccagtgctgcgctcttgggcctagttcagtctgtcttgtctcaaatctaggcatttttgcttcaattttattttttttaagaatacaaaaacagaaatctgcactaatttacctggtttcgtaggaaaacttttttttattttttacattttttggtgtccgtttgtattgaataatttgctacatttgtaaaatgtaagaggtatataatatatgtatatttctaacgtaaaaaacataatttttttcttttcaagattttttcttaaaaagatgagagaaacatattttttcaggaaaaacaaactttaaaaaaaaaagaggagaaataaaaccttttctcccctttccccatcctctatctatccctctttcccaggaacaaatcaaaaggtggattatcttctgaagaatggaaactgttagtccagaatgatgtctttttctcaatgcagtgagttatagattctctagttttctccctagggatgggaagggggcattgaggcaagcctggagaggagcccggggagcagggtcatgaacttttctttaggaggagcatcaacccaggtgtcgaaggtggcatttgcatggctggggttgtcgcctgttaaacaccagaggccactgcgtatgcagattgcggttacgcactcaaaaaaaaatgggcgaaaaaggggggaagatcaccttgcaccccacgccacacgataccnnn

SEQ ID NO: 25086 - DNA, 1741 bp, Homo sapiens
tagaattaattaaggcggggggcagacactgaccttcagcgcctcggctccagcgccatggcgccctccaggaagttcttcgttgggggaaactggaagatgaacgggcggaagcagagtctgggggagctcatcggcactctgaacgcggccaaggtgccggccgacaccgaggtggtttgtgctccccctactgcctatatcgacttcgcccggcagaagctagatcccaagattgctgtggctgcgcagaactgctacaaagtgactaatggggcttttactggggagatcagccctggcatgatcaaagactgcggagccacgtgggtggtcctggggcactcagagagaaggcatgtctttggggagtcagatgagctgattgggcagaaagtggcccatgctctggcagagggactcggagtaatcgcctgcattggggagaagctagatgaaagggaagctggcatcactgagaaggttgttttcgagcagacaaaggtcatcgcagataacgtgaaggactggagcaaggtcgtcctggcctatgagcctgtgtgggccattggtactggcaagactgcaacaccccaacagcttcttgttctaggcccaggaagtacacgagaagctccgaggatggctgaagtccaacgtctctgatgcggtggctcagagcacccgtatcatttatggaggctctgtgactggggcaacctgcaaggagctggccagccagcctgatgtggatggcttccttgtgggtggtgcttccctcaagcccgaattcgtggacatcatcaatgccaaacaatgagccccatccatcttccctacccttcctgccaagccagggactaagcagcccagaagcccagtaactgccctttccctgcatatgcttctgatggtgtcatctgctccttcctgtggcctcatccaaactgtatcttcctttactgtttatatcttcaccctgtaatggttgggaccaggccaatcccttctccacttactataatggttggaactaaacgtcaccaaggtggcttctccttggctgagagatggaaggcgtggtgggatttgctcctgggttccctaggccctagtgagggcagaagagaaaccatcctctcccttcttacaccgtgaggccaagatcccctcagaaggcaggagtgctgccctctcccatggtgcccgtgcctctgtgctgtgtatgtgaaccacccatgtgagggaataaacctggcactaggtcttgtggtttgtctgccttcactggacttgcccagataatcttcctttttgaggcagctatataaatgatcatttgtgcaagaaaaaaaaaaaaacaagaacgggtttctataaaaaaacaacaacaaaaaaaaatttgtggggggcggccaaaaaattttaaggcacactcggttgcgcgccgggcccaggtaggtcatggcacatgtggcaaacgctgtccaaagagacctggcatacaatcgtctcgggtctccccaaaataaaaaccgcggggccacgcggcttggaacacccaaaggccgtcgggccacacgggctacaccgggccagagcttaccccgcgcgggcgttcgctgtaccacactaccatcgacaccgaccaccagccaaccacgccaccacaacaacccacacaccacgcaaacaccgaacacacagagcgcaccccaacacacacccaagacacccgcca

SEQ ID NO: 25087 - DNA, 378 bp, Homo sapiens
acttttttttttcctttggactttgaagctagtgcattggaaaaatgcaccctttccctcctttggaatgctgtattaatgtagtataataattactggggtttgtaacttgttcctggtaatgtccttcccggactctttttaaatgtcttccccctaagttttatacttgattgtattattagtctgtttttaaaatgttttgcccggtttttctcttcaatatttgtgtatataaaccgatcttcgtgatactggacttactttttaagaattagagacagtaactccaaaaataattgtccttttttctttctttctttttttacaataaggctcttgaaaattgtcattacttgtgttttcctatacattcat

SEQ ID NO: 25088 - DNA, 1748 bp, Homo sapiens; identical to SEQ ID NO: 24283
  misc_feature 1720, 1721, 1722, 1723, 1724, 1725, 1726, 1727, 1728, 1729,1730, 1731, 1732, 1733, 1734, 1735, 1736, 1737, 1738, 1739,1740, 1741, 1742, 1743, 1744, 1745, 1746, 1747, 1748: n = A,T,C or G

SEQ ID NO: 25089 - DNA, 1582 bp, Homo sapiens
acacataaaccaccagccattcctagagagaggtgatgggcctatttgcttggtgctggcaccaactcgagaactggcacagcaggtgcagcaagtggctgctgaatattgtcgagcttgtcgcttgaagtctacttgcatctatggtggtgctcccaaaggaccacagattcgtgatttggaaagaggtgtggaaatctgtattgcaacacctggaagactgattgacttttagagtgtgggaaaaccaatctgagaagaacaacttaccttgtccttgatgaagctgatagaatgcttgatatgggctttgaaccccaaataaggaagattgtggatcaaataagacctgataggcaaactctaatgtggagtgcgacttggccaaaagaagtaagacagcttgctgaagatttcctgaaagactatattcatataaacattggtgcacttgaactgagtgcaaaccacaacattcttcagattgtggatgtgtgtcatgacgtagaaaaggatgaaaaacttattcgtctaatggaagagatcatgagtgagaaggagaataaaaccattgtttttgtggaaaccaaaagaagatgtgatgagcttaccagaaaaatgaggagagatgggtggcctgccatgggtatccatggtgacaagagtcaacaagagcgtgactgggttctaaatgaattcaaacatggaaaagctcctattctgattgctacagatgtggcctccagagggctagatgtggaagatgtgaaatttgtcatcaattatgactaccctaactcctcagaggattatattcatcgaattggaagaactgctcgcagtaccaaaacaggcacagcatacactttctttacacctaataacataaagcaagtgagcgaccttatctctgtgcttcgtgaagctaatcaagcaattaatcccaagttgcttcagttggtcgaagacagaggttcaggtcgttccaggggtagaggaggcatgaaggatgaccgtcgggacagatactctgcgggcaaaaggggtggatttaatacctttagagacagggaaaattatgacagaggttactctagcctgcttaaaagagattttggggcaaaaactcagaatggtgtttacagtgctgcaaattacaccaatgggagctttggaagtaattttgtatctgctggcatacagaccagttttaggactggtaacccaacagggacttaccagaacggttatgatagcactcagcaatatggaagtaatgttgcaaatatgcacaatgggatgaaccaacaggcatatgcatatcctgctaccgcagctgctgcgcctatgattggctatccaatgccaacagggtattctcaataagactttagaagtatatgtaaatgtctgtttttcataattgctctttatattgtgtgttatcagacaagatagttatttaagaaacatgggaaatgcagaaatgactgcagtgcagcagtaattatggtgcacttttttcgctatttaagttggatatttctctacattcctgaaacaatttttaggttttttttgt

SEQ ID NO: 25090 - DNA, 510 bp, Homo sapiens; identical to SEQ ID NO: 22307
  misc_feature 1, 2, 503, 504, 505, 506, 507, 508, 509, 510: n = A,T,C or G

SEQ ID NO: 25091 - DNA, 1596 bp, Homo sapiens
  misc_feature 1, 2, 1555, 1574, 1582, 1583, 1584, 1585, 1586, 1587, 1588,1589, 1590, 1591, 1592, 1593, 1594, 1595, 1596: n = A,T,C or G
nnacatatattgtatttttaattctcttttgatgtcttctgttttagaagcaattctcaatttaaaaacgacaaaaccaaataggaacaaaaatgataaaacttgaaaacaacaacaacaaaaaaagctgctgaaccagaggttcagtatgagaggaattgcaaagaacagttttgaaatctctaggccttagtcagatagaaattacaaatcaaaaatataatcagactccctgagacactaacactaggaaaatgaataaagttaacttggagcagcccaagaacaaacttataagtgcatgatggtattttatgtgcaaaactgctttataagtactataagactattacaggtattaccagtgccctcagtgtaaactccttggcccacccatgtaaagtgtacatcgagccctcagggtccctgactggttctccagccgccccataggctatgagcatccccgttccctacacaaaggaccactgggatttattaaaggttatgccttgcactgcagtacaaagttttatatgatagtgtcttgctgcctgtttctacaaaagccaagggtgtaacattaaatgcaattttgcaaggggctgaggtgatgtggtccaagtatgtaatcacttcagggagccatatgtgaccttcatacactgttgataatggccatgcctcccagtcaggcctgtgacacctgctggacagcaggcattccaaggcccctaagcactgagttagctggtaaaggttaaggaaaaagctgtattcttactactttactccaaggtagtaaagtgtatggaagatgtacctgacagaaataacttaagcatcccctgagaatgaccctgtatggcagatgcatctgacagcaataacttaagaagtgagggttgccacgtggaggctgctgaggggagggtgctgagtgaaagtgctatgtaaactgcatgctttttataagtggttgcagttctgtccagcccgcggccactggaccaccctgtaagattccccaaataaaccctatgtttccttcactagctccaggtctcttctttggcctcttgaacctggtgccatccctactgaagttaacagaggtctggcccaacctaagggcatcattttttaaagtcccatggaaaaaactcccagcagagttcagcatctgggaacggttggcaggccccacaggaaccacagcttctgcctttatgatgctgagaaacacttcactgttgacttcccccatctaagggggccagagctaaattttgggcagctgtgtttatcctgggggtccacatatttgcatcattctttcttctcatcgtgatgttctaccttgttggtactgttctcttccttctttgtgtgagttcctgttgtgagcttccccttgttcactgaggtaatgtagccaaacaaggttaaaaagcccccagtaagccgggtgcggtggctcatgcccgtaatctcagcactttgggaggccgaggcgggcagatcacctgaggtcgagagtttaagaccagcctgnccaacatggagaaaccccntctctacnnnnnnnnnnnnnnn

SEQ ID NO: 25092 - DNA, 1795 bp, Homo sapiens
cgcgtccggcgccccaggagtcttcagtgtgtgagcctccatctcctgtccaatgacatgtgtgctagagcttactctgagaaggtgacagagttcatgttgtgtgctgggctctggacaggtggtaaagacacttgtggggtgagtcatccctactcccaacatctggaggggaaaggtgagtgaagaccctaattctgggctgcaatctgaaagctaaccagacatctgcctcccctgctccccagctatagccacgccccctccccatgcctcatctgccgccctccttcccccttccctgactccctcaacacaagaggtgattctcacagcataattcacccattcctgtgttgagcacatgcttactgggcacctgctacgtgaccagcattgccgtagaccctgggaagcagcagtgaacaggtagagagcagcctctccctcctgcagcccccatgctggtgaggggcactggcaggaacagtggacccaacatggaaatgctggagggtgtcaggaagtgatcgggctctggggcagggaggaggggtggggagtgtcactgggaggggacatcctgcagaaggtaggagtgagcaaacacccgctgcaggggaggggagagccctgcggcacctgggggagcagagggagcagcacctgcccaggcctgggaggaggggccgggagggcgtgaggaggagcgagggggctgcatggctggagtgagggatcaggggcagggcgcgagatggcctcacacagggaagagagggcccctcctgcagggcctcacctgagccacaggaggacactgcttttcctctgaggagtcaggagctgtggatggtgctggacagaagaaggacagggcctggctcagggtgattctgggggtccacttgtctgtaatggtgtgcttcaaggtatcacatcatggggccctgagccatgtgccctgcctgaaaagcctgctgtgtacaccaaggtggtgcattaccggaagtggatcaaggacaccatcgtggccaacccctgagcacccctatcaactccctattgtagtaaacttggaaccttggaaatgaccaggccaagactcaggcctccccagttctactgacctttgtccttaggtgtgaggtccagggttgctaggaaaagaaatcagcagacacaggtgtagaccagagtgtttcttaaatggtgtaattttgtcctctctgtgtcctggggaatactggccatgcctggagacatatcactcaatttctctgaggacacagataggatggggtgtctgtgttatttgtggggtacattttttaaagccgctagcaaagcaaatgtgcatgcatccaaaatgtttccatcgtagtcgaggcaaatgagatcacagtatagaacccagacaagctttcctggagaaatgcataagtcctctttctgaattatctgtgaattttcaatgacatctgcaatgaactggctagccacttgggcctcttctccaggaggtccagaccggaatcaacgtatcctttatcaggggcatctgttgatggtgctgcaaattctgctttaactccacagattactgtagtatttcccaacttcactaaagcagaaccatctgcggtactaattgaaccgatgttgacagttgtggttctgaattcaccaagttctcttccatcaggacggcagttctctttcagaaatctcctgtaatactccagaggttccacggttttgaacccagccgcccggacgcgtgggtcgactccct

SEQ ID NO: 25093 - DNA, 564 bp, Homo sapiens
  misc_feature 1, 2, 3: n = A,T,C or G
nnnacctggtgtatttgaatatagactagagagctttcattttccagagagcatggggataaattagtgatctgcaaatttttcttttgttaagaaaacaaaactgaggtaattatgaaccccaggaaaaataaaaattcaaaaactacactgcatatctgaactgtgaacaatactagccatataaagttagtcataattatgtaattactgaatattgattttataagaaataattctataacattgggaggatgggagagaagagagattgtgtaatggcggcaagccaatcaaggtctgttgtagaaaagtccagaaaaagcagtatacacatgtcttttcagaacaaaacaaaacaaaacaaaacaaaaactacaataagaaactgctaagggttaaaagtgattgtctctggaaaaatgaaatcggggtgggtagagaaaaggcagaggtttgctggttttcactaccaatccagcagcattatctgatttctttttaactatgtatatgtttttctttgattaaaaactaatataaataaacatcatttttaaaagt

SEQ ID NO: 25094 - DNA, 2102 bp, Homo sapiens
atcatcttggcagagaagtctcacagtctgattcggttacccaggcgctatcacgactcactgcagactcaaccccctgggcctaagcaattctcccacgtcagcttccccagtagctgggactacaagcatgcgccaccacatgcagccaattttattttttgtagagacatggtcccactgttttgcccaggctgatctcgaacttctgggctcaagtgttcctcctgccctgtcctctcaaagcgctgggattacaggtgttagctaccacatctgctaccttgtttttttatgcatctgtggaactggtcactcttgattgcattcaagtctagggtctgcaaatgattccttccattcctattaagttgggaccttgagttggggataataatacataaacaaacttgtctgtcctgtctttctagctaggtatatgaggcaagagtcccatcataaaaagtgagtcatttgggcagttaggtggaaaacacactcctttgcaagtgcttgctgtctgcccaccaagtgtggtttcttctcatcttttgacttaattacagtgagggccccaaggctgttgcagctcctcgacctgatcggttggtcaatcgcttgaagaatatcactctggatgatgccaggtgctcctcgcctaatggttcttcgtcagccaaggggaccagataactcaatggggtttggtgcagaaagaaagatccgtcaagctggtgtcattgactaaccacatccacaaagcacaccattaatccactatgatcaagttggggggaatctggtgaagggttctgaatatctccctcttcatccctcccgaaatctggaatacttattctattgagctattacaccagttttaacaccttcctcatgttatgtttaaaaaaataaataaatttaagaaaaccattttaaataatgcacagttgcagcctggaaaaacttaaggtggcgccttatagtatcaattttaggagctttatttggtgcatttaacgcaactggtaattgcagaatccactttgcctgtgtaagtgaaaaatatagactgttatcttgttggccctatgaaattctgcacttttcattatatactctaccttcattaattacttctggcaagatgttctgccttagcactcagttgcattcttttcctttttcttcctgttcattatgctttaattctgaggaccatatgagggtagaatatattatcttttaaaaattacaaaaatttgtataggcaaaccatttcttaaagttgatggccaaattttaaaatgttatttttcatatcatttataatcttgtcacaatccacttaaagaagtttggttatatttcagtgaaaattttcttccagagtaggtttttttttcgtgggttggggggtaactttactacaattagtaagtatggtgcagaatttcatgcaaatgaggagtgccagcagtgtgataatttaaacatatttaaacaaaaacaaaaaaaatgaatgcacaaacttgctgctgcttagatcactgcagcttctaggacccggtttcttttactgatttaaaaacaaaacaaaaaaaaataaaaaagttgtgcctgaaatgaatcttgtttttttttataagtagccgcctggttactgtgtcctgtaaaatacagacacttgacccttggtgtagcttctgttcaactttatatcacgggaatggatgggtctgatttcttggccctcttcttgaattggccatatacagggtccctggccagtggactgaaggctttgtctaagatgacaagggtcagctcaggggatgtgggggagggcggttttatcttcccccttgtcgtttgaggttttgatctctgggtaaagaggccgtttatctttgtaaacacgaaacatttttgctttctccagttttctgttaatggcgaaagaatggaagcgaataaagttttactgatttttgagacactaaaaaaagggaaaaaagattgatgtataggcgagagaaaaaagttttgcccaataggagtcggattaacattgtcgacgcggccgcaaatttagtatgtag

SEQ ID NO: 25095 - DNA, 2378 bp, Homo sapiens
ccacgcgtccgcccacgcgtccggctgagcggagccgcgggcgggagggcggacggaccgactgacggtagggacgggaggcgagcaagatggcgcagacgcagggcacccggaggaaagtctgttactactacgacggggatgttggaaattactattatggacaaggccacccaatgaagcctcaccgaatccgcatgactcataatttgctgctcaactatggtctctaccgaaaaatggaaatctatcgccctcacaaagccaatgctgaggagatgaccaagtaccacagcgatgactacattaaattcttgcgctccatccgtccagataacatgtcggagtacagcaagcagatgcagagattcaacgttggtgaggactgtccagtattcgatggcctgtttgagttctgtcagttgtctactggtggttctgtggcaagtgctgtgaaacttaataagcagcagacggacatcgctgtgaattgggctgggggcctgcaccatgcaaagaagtccgaggcatctggcttctgttacgtcaatgatatcgtcttggccatcctggaactgctaaagtatcaccagagggtgctgtacattgacattgatattcaccatggtgacggcgtggaagaggccttctacaccacggaccgggtcatgactgtgtcctttcataagtatggagagtacttcccaggaactggggacctacgggatatcggggctggcaaaggcaagtattatgctgttaactacccgctccgagacgggattgatgacgagtcctatgaggccattttcaagccggtcatgtccaaagtaatggagatgttccagcctagtgcggtggtcttacagtgtggctcagactccctatctggggatcggttaggttgcttcaatctaactatcaaaggacacgccaagtgtgtggaatttgtcaagagctttaacctgcctatgctgatgctgggaggcggtggttacaccattcgtaacgttgcccggtgctggacatatgagacagctgtggccctggatacggagatccctaatgagcttccatacaatgactactttgaatactttggaccagatttcaagctccacatcagtccttccaatatgactaaccagaacacgaatgagtacctggagaagatcaaacagcgactgtttgagaaccttagaatgctgccgcacgcacctggggtccaaatgcaggcgattcctgaggacgccatccctgaggagagtggcgatgaggacgaagacgaccctgacaagcgcatctcgatctgctcctctgacaaacgaattgcctgtgaggaagagttctccgattctgaagaggagggagaggggggccgcaagaactcttccaacttcaaaaaagccaagagagtcaaaacagaggatgaaaaagagaaagacccagaggagaagaaagaagtcaccgaagaggagaaaaccaaggaggagaagccagaagccaaaggggtcaaggaggaggtcaagttggcctgaatggacctctccagctctggcttcctgctgagtccctcacgtttcttccccaacccctcagattttatattttctatttctctgtgtatttatataaaaatttattaaatataaatatccccagggacagaaaccaaggccccgagctcagggcagctgtgctgggtgagctcttccaggagccaccttgccacccattcttcccgttcttaactttgaaccataaagggtgccaggtctgggtgaaagggatacttttatgcaaccataagacaaactcctgaaatgccaagtgcctgcttagtagctttggaaaggtgcccttattgaacattctagaaggggtggctgggtcttcaaggatctcctgtttttttcaggctcctaaagtaacatcagccatttttagattggttctgttttcgtaccttcccactggcctcaagtgagccaagaaacactgcctgccctctgtctgtcttctcctaattctgcaggtggaggttgctagtctagtttcctttttgagatactattttcatttttgtgagcctctttgtataaaatggtacatttcttttacaaaaaaaaacccgggtctttagcggggggcgcaaaacgtgtagaagggttaggtcatagtggtccgcaccggtgttggtcacaggggggaacggcggggcccaaggggggggaaaacgaaacgagcgcgctgctcgcacctgcatcacacagggaaaaaaacaaacaaaaaaagaccacaacacaagacacgacaaaaaatatcacaaatcacaagaacacaaacaacacacacagacaaaaaagagaatgacagca

SEQ ID NO: 25096 - DNA, 2410 bp, Homo sapiens; identical to SEQ ID NO: 24226

SEQ ID NO: 25097 - DNA, 1161 bp, Homo sapiens
acgcgtccgtcttgaatgcaaaaaatatatatagatacaagtctatcatttactaccacaaaacacacaaatcaattaaaagttaaattttatgaaaacatacagactgtacgtgtaagcaaatttaaaatgcagtattaaatcataactctatagccgccactgtccggccacagcctaacgctcttcgctgtcgtttgcggtctcgcgcagggcggccccggttctggtgtttggcgtcggaattaaacaaccaccatgtcgagcaaaaaggcaaagaccaagaccaccaagaaatgccctcagcgtgcaacatccaatgtgtttgccatgtttgaccagtcacagattcaggagttcaaagaggccttcaacatgattgatcagaacagagatggcttcatcgacaaggaagatttgcatgatatgcttgcttctctagggaagaatcccactgatgcataccttgatgccatgatgaatgaggccccagggcccatcaatttcaccatgttcctgaccatgtttggtgagaagttaaatggcacagatcctgaagatgtcatcagaaacgcctttgcttgctttgatgaagaagcaacaggcaccattcaggaagattacctaagagagctgctgacaaccatgggggatcggtttacagatgaggaagtggatgagctgtacagagaagcacctattgacaaaaaggggaatttcaattacatcgagttcacacgcatcctgaaacatggagccaaagacaaagatgactgaaagaactttagctaaaatcttccagttacattgtcttactctcttttacttctcagacacttcccccaccctcatagaacctgttgcatgcaacttagtttcacagctttgcctcttctttttgatgtatttattccagacctttctgccacttagcacttgtataatcagactggaaatggggatgagggtgtaaattgtattgaaaaagatcgcgaataaaaatcaacaaatgtgaaagcccagaaaaatatattcgtatttctggttttgctggatttttacatttttatataataaaaatgttattttgaaataaagattatgctgactcaaatgcaaaaaaaaaaaaaaaaaaacggacgcgtgggtcgactccctata

SEQ ID NO: 25098 - DNA, 1136 bp, Homo sapiens
  misc_feature 1119, 1120, 1121, 1122, 1123, 1124, 1125, 1126, 1127, 1128,1129, 1130, 1131, 1132, 1133, 1134, 1135, 1136: n = A,T,C or G
gcgtccgctcattcccaggagagtctctggcagactggaggttactaaaatcagccatagatatactacattcccaggtagagtctctggctgaagtagttcttcaaaactgccgatgcttagatctgctattcctctctcaaggaggtttatgtgcagctctaggagaaagttgttgcttctatgccaatcaatctggagtcataaaaggtacagtaaaaaaagttcgagaaaatctagataggcaccaacaagaacgagaaaataacatcccctggtatcaaagcatgtttaactggaacccatggctaactactttaatcactgggttagctggacctctcctcatcctactattaagtttaatttttgggccttgtatattaaattcgtttcttaattttataaaacaacgcatagcttctgtcaaacttacgtatcttaagactcaatatgacacccttgttaataactgaggaatcaacaatttgattccccgaaaacatgggtggtgaatgtaatgcccaacattgtttttactaaccctgtttttagactctcccttttgctctcttaatcacctagccttgtttccacatgactaaaactctcgcttagctgagaaagccggacgaactccatctggcccccttgatttgtaagacattaaggactccttacccacccccttcttcaaggagttaacttgtgtaaacagattctcaacatatcaaaagagtccaattaactgataaggtactgaaacaaacaatgtacgaagttcccaggattttgctcaaaagataacaccacaaagccttgagtctgtgtccggcatagcacccatatctaacatcttatgaaggatttagagcccccgcacctgctaccgttgcttttctgtaaacatttgtcttttaaattgtctgtttctctgtaatcatttgtccttttaatttttgcatgtttttacttctgtagaattgttgcgtttgagctcccctccccttcctaaaccaaagtataaaagaaaatcaagccccctcctcatggccgagagaattttgagcgttagcggtctctttggccaccggctaaataaaggactcttaattcagnnnnnnnnnnnnnnnnnn

SEQ ID NO: 25099 - DNA, 240 bp, Homo sapiens
agtaggcaacagatgaagataagttggttgaatgtctccagcactatgcatccctattttctatttattgtgtacagatttcggttccctgctatgaaaagtgatgtggtagcaattttataaatgttgctttctgatttttatcagagtgagaaaattaaaattattgatttgcaagtagtaaacagtccatattttgatttcccctcattttagtttaatataatttgcaataaatgt

SEQ ID NO: 25100 - DNA, 948 bp, Homo sapiens; identical to SEQ ID NO: 24570
  misc_feature 1, 2, 604, 654, 936, 937, 938, 939, 940, 941, 942, 943, 944,945, 946, 947, 948: n = A,T,C or G

SEQ ID NO: 25101 - DNA, 1573 bp, Homo sapiens
  misc_feature 1573: n = A,T,C or G
acgcgtccgcggaagtgaaggcacttccggcctggggggcttgtttggactggagaagggaggcggcgggcgaagcgcacgtcgagcgggggagcggcgctgcctgtggagatccgcggaggccgacaggattcgttggctgccgtccccgctgctgtgcattgggttaaaaacgacaaccaacatcagccatgaaagatccaagtcgcagcagtactagcccaagcatcatcaatgaagatgtgattattaacggtcattctcatgaagatgacaatccatttgcagagtacatgtggatggaaaatgaagaagaattcaacagacaaatagaagaggagttatgggaagaagaatttattgaacgctgtttccaagaaatgctggaagaggaagaagagcatgaatggtttattccagctcgagatctcccacaaactatggaccaaatccaagaccagtttaatgaccttgttatcagtgatggctcttctctggaagatcttgtggtcaagagcaatctgaatccaaatgcaaaggagtttgttcctggggtgaagtacggaaatatttgagtagacggggccctcttttggtggatgtagcacaatttccacactgtgaaggcagtattagaagacttaattgtaaaagctctcttgtcactgtgttacacttatgcattgccaaagtttttgttagtcttgcatgcttaataaaagtgctgagactgttactaagtaaaaagctgtcaaacatttactgaaaatagaattggccccatggcttgatgtgaagacagcaaggaaagaagcaccagtcaagttgtgaacaagcaccaaattaaaagacctaaaccttaccaaattgtctttttttgaggctaatctatcacttgttaatgtctaaactttaaaatcagtacatttaatttgagttccaactgttaagcatatttctcagacttaaatttgattatgtccccatcaaaaagaatctccattttctgaaggtctgttagttaatttgagataatttgttaaaggcaagtatgtcatattactgaggctacaagttagtcagcagatgagtgccagtccagccttttctggtatgttattgttagaaatattgagttctaatgttacatctgaggaagtatgtaatttgagaattgtaacttctaagggattcactgcatcatagctatgcctgtatggagtctaacatatgaccaataccaacccataatccagctgaacaaagatactgtaacattatgatttgagtggtgcttttccttgctttgttaaccatcacgagagtctgcagcacaacttttaacaaagctagaacagttttggcttcttaaacttcatatttgggtaggttaagctgccatacgtgttcagtgtgaatagtgtttaagttgaaaatattgtaaaaaaattatattttttcaaaaatatttaaaaaaataaataatagtagaactgactccgggcggcgtaccccccttaaggcaaaggtaaaggcccacgaaacgctgcccggtccccacccaatttcccan

SEQ ID NO: 25102 - DNA, 2055 bp, Homo sapiens; identical to SEQ ID NO: 24301
  misc_feature 1, 2: n = A,T,C or G

SEQ ID NO: 25103 - DNA, 1828 bp, Homo sapiens; identical to SEQ ID NO: 23042
  misc_feature 1, 159, 160, 161, 162, 163, 164, 165, 166, 167, 168, 169,170, 171, 172, 173, 174, 175, 176, 177, 178, 179, 180, 181,1814, 1815, 1816, 1817, 1818, 1819, 1820, 1821, 1822, 1823,1824, 1825, 1826, 1827, 1828: n = A,T,C or G

SEQ ID NO: 25104 - DNA, 1027 bp, Homo sapiens
ggaccctgggttttgatttatcaacaagtaaatgcatcactggtgggtgggattgaggtgtgccctggtgcataaatagagactcagctgtgctggcacactcagaagcttggaccgcatcctagccgccgactcacacaaggcaggtgggtgaggaaatccagagttgccatggagaaaattccagtgtcagcattcttgctccttgtggccctctcctacactctggccagagataccacagtcaaacctggagccaaaaaggacacaaaggactctcgacccaaactgccccagaccctctccagaggttggggtgaccaactcatctggactcagacatatgaagaagctctatataaatccaagacaagcaacaaacccttgatgattattcatcacttggatgagtgcccacacagtcaagctttaaagaaagtgtttgctgaaaataaagaaatccagaaattggcagagcagtttgtcctcctcaatctggtttatgaaacaactgacaaacacctttctcctgatggccagtatgtccccaggattatgtttgttgacccatctctgacagttagagccgatatcactggaagatattcaaaccgtctctatgcttacgaacctgcagatacagctctgttgcttgacaacatgaagaaagctctcaagttgctgaagactgaatggtaaagaaaaaaaatctccaagcccttctgtctgtcaggccttgagacttgaaaccagaagaagtgtgagaagactggtagtggtggaagcatagtgaacccactgattacgtattggttcatggtccacactatttttacgacaaacagtttccgaaattggtccgtgttcctgtgtgcaaaccttctggttcttacctaggggcctggttccaacaaatacggtgtgggggtctgtctttccaaaacaaaaaccggcgcttctgggggcaaggatgaggccgggccctgcgcccctgtcaagggatcgccctgggtacggtcccaccgcc

SEQ ID NO: 25105 - DNA, 835 bp, Homo sapiens
cagtatttacagagataacagaatggctaagccatgcaaaccaaataactttggtttttccccttttcctttggtttaaatgttgaccaagattcaattttttttttgccaaataaaacttcaataaaagtttagaggcaaaataacgtattttcttttttttcccataatattttatacagcatcgagtctaagaatattttatgcatttaatccataccaatgcactacggaagcttttattaaacggagtcactattgcccagacagtaaatggtttacaaatgtacaataacgtatgtttctaaataatgcagaagtggcaaagtattattcctattctcatctgactttaattttcaatttatttttcattgccttaaaattatacctatttcatgtttaaaaagatatcaatcagaattggagtttttaacagtggtcattatcaaagctgtgttattttccacagaatatagaatatatatttttttcgtgtgtgtttttgttaactaccctacagatattgaatgcaccttgagataatttagtgtttttaactgatacataatttatcaagcagtacatgaaagtgtaataataaaatgtctatgtatctttagttacattcaaatttgtaactttataaacatgttttatgcttgaggaaatttttaaggtgggtagtataaatgggaaactttttgaagtaggaccaggatatggggctacttgtggactaggacttttaaactttgctctttcaagcagaagccggggggttctgggggaggaacactgcacagcgatttctttcccgggggttttccccacc

SEQ ID NO: 25106 - DNA, 1872 bp, Homo sapiens
  misc_feature 1, 2, 1859, 1860, 1861, 1862, 1863, 1864, 1865, 1866, 1867,1868, 1869, 1870, 1871, 1872: n = A,T,C or G
nnacagagagtggtacatgaatgactagttttctaagatgtcctttttattgtgaataaaatataaaagttaaaggccctctgctaagtcacataaagtacagcatataagttcatataggtacaaataaatgagtttgcagtgaattgggccttcaaattacctcaagtgacagatagtaagaaaagcttcttgagcaggtggaggtcactgaatcccctactatgcacttatcaagattttacttactttaatttactggaaattgattttttaaaaaatgactacactgtaacaagggaagggatctgggtttttttgttgttttattcttgttttttttaagtagttcaaattctgaaactgtgatttaaaaattttttacagtcaagcattctgattttgaacataactcccttccctttctgtgtaacaaaggtctctctgttatctcttaaattttgttacatctccctcagcctctttctttgtccgtctcccttctgtcattgtctatggatgtttacctctctgttctcctaaaagtttgaagattaggtcaactcttatttctagttcattggtaatttaatcttaatttttttttcgtgatttttgttggttgtataatctgctgacgtatttttatactcaagtgtagttttctattaaaaagaaaagtggttggattaaaaatagtaagctatgtaaccctcatgttactttcactttcaaatattgggtacctaaaacattacttcagagattatgtaatcctattatagtatgtttgctttcctttattgttggattttacattctgatttggctttcctccaaaaaatgtatatcatgaaagactagacagttatttgcaagtgtttagaaaggtgttaaaaatgtaaagcaaagagtcttaactttctcctaattgggagaaaaatgctttaacattactataataatattccaggtttggagggggtctccaggccccatatttgctgttaatagttggaccttttagaccatgtgttatttgcaatcccagaatgattgcttctgctattagttaaaaagatactattcttttctttctgtacaagtgcaatactccccttgaagtcttaaaaactatggtgatttttttttcttttctgacctattcttcctttagctaatgacaaaaagaaactcataaaagtcatagtatgttaaaggacacaacaagcaaagagaaaaacactccacaatcaaaagattacagaatgtggaaaccactagtctgatctcatggtatctttatttaagctaaatttccatggaaattagtaatcttttgcttgaaaaatgtgtcctaaagttgaactttttacagattgaatcttcttagaccctcgcccaatgctctaaattaagaacctaatacttaatatttttattttacttctccccttttagaaataaacttttaaataaaagcaaagcacttagctgagttttaaacacttacatatcacctattggagaaattttttttaaaaatatttggagcagtcctgttttcatacaaatttaagtaagaggtatttttcttatacatatttatatgtagtgtgctaattttctttttttatacctgtgtccctgtagtaaaactgctgtaatataaatacatgttttgttaaaagataacatttctttggcatttcttttaaaggcagttactgcatttctgcatttgtacagtatgtgtcttggccattttagatattctttctttaacaataccaaaggtaattagactattttaaagactaattgcttgacagtttctagggtattttgtgttttagaannnnnnnnnnnnnn

SEQ ID NO: 25107 - DNA, 874 bp, Homo sapiens
  misc_feature 1: n = A,T,C or G
naattgtcataaatcctaagtaatacacatttctattaccatgtaatcagctacaaggtcctattactaccattctgagtagtagtcaaagcaaggtaaaaacacgttttaaaaaaaatatgtatctattactttctagggtttctcacattctaacattttccttttttgtttttcttttaaagaaagggtggattttttgtggatctctttgtaagagtatctaaccaagttgcagttaacatgtacaagcagttgggctacagtgtatataggacggtcatagagtactattcggccagcaacggggagcctgatgaggacgcttatggtaagctcccttccatggcagtatccccaagaagtcgaaacagttacattctttctacagattgtagtatttgattattttaataaatgtagaatatttgactttaaaatttaaatttccctcaacctacctttatcaacctattagtagtagtaattaacttacctattaactaaccaatgggttaatttctgtaccttactgtttcactctgttacatacatattatttttgctgtccattgtaacaaaattcaatcaaaaaggcagctaggtcagaaggaaacataccactctcatggttcatagtattcactgtatgtatgctagggaaaagacttgctccagtctcctcctcagttctgtgcctgagaaccactgctgcatatatttgtttttaaattttgtattgaactgttaattgaagctttaaaagcatatatgaaatgtataaatctaagatgtataatacattattgactctatgaatgttttctgaagtttgttagtcatttgtaaaactaaatcagattgtaatcccagt

SEQ ID NO: 25108 - DNA, 4531 bp, Homo sapiens
  misc_feature 4513, 4514, 4515, 4516, 4517, 4518, 4519, 4520, 4521, 4522,4523, 4524, 4525, 4526, 4527, 4528, 4529, 4530, 4531: n = A,T,C or G
cctccgtgacaggcattcacttctgccctaagtgtgtcagaaagatcccattttgtttcctaactcaggccaaccctcctttgcctccaaaattcagtgttaactaaccaattacttaagagacggatccctcttccttctgtggatagttcatctgttaaggatccattatcacctgtctcactcctcctaaggagtcctagtataaaagggccagggtaggagtagggaagctggttggcatggagggtcacaagatccagaatggctagggatggaaaaagaataccctggttctttgggggattctgccaaaggagctttattgaccatttttttaaaggaaaaacactgaatgatcttgaggatggtaaactgtctcctcttctgggttccagaagcccttatgctacgttcagtattaagaaaagccctgaaccaagtggaggatgctgctttcatattctttcatagcagtaatacactggtgcttggtacttatgttagtgctaactccagctttgaccatagtatctgtaccagttggagggttaaatttaatagtagtcccagtaggagcagctgtaaaactacttggcccaaagagggagccagatgtgctgccaaaaggattagaggtggtatttgtggttccaaggagtcctccactgctagtactggttccaaaattgccaaagccagttggtttattttgtccaaatgttgaagttgtgccaaagccacctgtgccacccccaaagggtgttccaaatgatttgttaaacatcttcaaaatgagtcttagcggcggcggcgacggtttcgtgggggccgcgcgctgctctgtgagcggcgggtggcagcaggggactcctgacacttccccttccccaccgaaccgcgctttctgaaacaaagactcattttgaagatgtttaacaaatcatttggaacaccctttgggggtggcacaggtggctttggcacaacttcaacatttggacagaatactggctttggcactactagtggaggggcatttggaacatctgcatttggttctagcaacaatactggaggcctctttggaaattcacagactaaaccaggaggattgtttggaaccagttcatttagccagccagctacctccacaagcactggctttgggtttggtacgtcaacaggaacagcaaataccttgtttggaactgcaagcacagggaccagtctcttctcatcccaaaacaatgcctttgcacaaaataaaccaactggctttggcaattttggaaccagtactagcagtggaggactctttggaaccacaaataccacctctaatccttttggcagcacatctggctccctctttgggccaagtagttttacagctgctcctactgggactactattaaatttaaccctccaactggtacagatactatggtcaaagctggagttagcactaacataagtaccaagcaccagtgtattactgctatgaaagaatatgaaagcaagtcactagaggaacttcgtttagaggattatcaggctaacaggaagggcccacagaaccaggtgggagcaggtaccacaactggcttgtttgggtcttctccagccacttccagcgcaacaggactcttcagctcctccaccactaattcaggctttgcatatggtcagaacaaaactgcctttggaactagtacaactggatttggaacaaatccaggtggtctctttggccaacagaatcagcagactaccagcctcttcagcaaaccatttggccaggctacaaccacccagaacactggcttttcctttggtaataccagcaccataggacagccaagcaccaacaccatgggattatttggagtaacccaagcctcacagcctggaggtctttttgggacagctacaaacaccagcactgggacagcatttggaacaggaacaggtctctttgggcagaccaatactggatttggtgctgttggttcgaccctgtttggcaataacaagcttactacatttggaagcagcacaaccagtgcaccttcatttggtacaaccagtggcgggctctttggttttggcacaaataccagtgggaatagtatttttggaagtaaaccagcacctgggactcttggaactgggcttggtgcaggatttggaacagctcttggtgctggacaggcatctttgtttgggaacaaccaacctaagattggagggcctcttggtacaggagcctttggggcccctggatttaatactacgacagccactttgggctttggagccccccaggccccagtagctttgacagatccaaatgcttctgctgcccagcaggctgttctccagcagcacatcaatagtctaacatactcaccttttggagactctcctctcttccggaatccgatgtcagaccctaagaagaaggaagagagattgaaaccaacaaatccagcagcccagaaggctcttactacacctactcattataaactgacaccccgccctgccactagagtccggccaaaggctttacaaacaacaggcacagccaagtcacatctctttgatgggctggatgacgatgaaccatccctagccaatggagcattcatgcccaagaagagcattaagaagttggttttgaagaaccttaataatagcaatctcttttctcctgttaatcgtgattcagaaaatctagcttcaccatctgaatatccagaaaatggagagagatttagtttcctaagcaaacctgttgatgagaatcaccagcaggatggagatgaagattcccttgtttcacatttttatactaaccctattgccaaacctattcctcaaaccccagaaagtgctggaaataaacacagcaacagcaacagtgtggatgataccattgttgcattaaacatgcgtgctgctttgcgaaatgggctggaaggaagcagtgaagaaacgtcttttcatgatgagtcacttcaggatgaccgagaagaaatagaaaataattcttaccatatgcacccagcaggtattattctcactaaggttggttactatactattccatctatggatgaccttgctaaaattaccaatgaaaaaggagagtgcattgtctctgatttcactattggtcggaaaggttatggttcaatctattttgaaggagatgtgaatttgacaaatctaaatttggatgatattgtgcatatccggaggaaagaagtagttgtctacttagatgataaccaaaaaccacctgtgggtgaagggctaaataggaaggctgaagttacattggatggagtttggccaacagataaaacatctcgttgtttaataaagagcccagatcgccttgctgatatcaactatgaaggaagattggaagcagtttcaaggaaacagggagctcaattcaaagaataccggcctgaaactggttcttgggtgtttaaggtctcccatttttctaagtatggccttcaggattctgatgaagaggaggaggagcatccgtctaaaactagtacaaagaagttgaagactgctcctttgcctcctgcaagccagactacgcccttgcagatggctcttaatggcaaacctgcacctccacctcaggtagagaaaaaaggacagtgaatttgaatggaatccgtgataccgaagttgaaagcaagtcattcagctaatacaaagctgttttatgacccttggaactttgaagagtacaaacattggcaatcacgttgaaacaagtgcaagggagggcgtgaggtcttgcaggcatctgtctttttactggagagatttaaagaattctcttgctgtttggattattcctctacagattgtcatttttaaaccctttgttctctctcatttggacttgctgaattctctgctcagtgattaacttaagatttgctcatgtgggttcatgcacagtaaattctgcctttattgactacctgatgtgcagtttaatctttttctttacctccatggttttttaaaagttaaattagctttctgaaagggtttttaatctccatttttttaaagttgtttgcttatacttcgggtaaccttgatatttgtattttaatagtacataatctttatgaaaaatagtttgggaatgtaaatgaattattatttggcttggggagattagggcctacattgtttatcgcaattacttgtatcattgatacgggatttctttgtaaagcatcctctacctctcagctgctgaaagctagacctttggtattttccatgctataattcttatggctgctgaaatgtgtggtttttatgatttattaaataatctcttaggaggcaaaaaaaaaaaaaaaaaaaaaaaaaaaaaaaaaaaaaaaaaaaaaaaaaaaaaaaaaaaaaaaaaaaaaaaaaaaaaaaaaaaaaaaaaaaaaaaaaaaaaaaatcagagannnnnnnnnnnnnnnnnnn

SEQ ID NO: 25109 - DNA, 4298 bp, Homo sapiens
  misc_feature 4298: n = A,T,C or G
acgcggggggagaatccggttggggtaggagctaaatctcaggaccacttgctctatatatgagtgccaagataatctagagcagggagaggcagagaggcaggcagcctgctgggctcttcctgctgttgaaaacttacccggcccttacagaggaaatcttcctcctctcttctgccctgaatgttttcccaaacatgaaggtgataagcttattcattttggtgggatttataggagagttccaaagtttttcaagtgcctcctctccagtcaactgccagtgggacttctatgccccttggtcagaatgcaatggctgtaccaagactcagactcgcaggcggtcagttgctgtgtatgggcagtatggaggccagccttgtgttggaaatgcttttgaaacacagtcctgtgaacctacaagaggatgtccaacagaggagggatgtggagagcgtttcaggtgcttttcaggtcagtgcatcagcaaatcattggtttgcaatggggattctgactgtgatgaagacagtgctgatgaagacagatgtgaggactcagaaaggagaccttcctgtgatatcgataaacctcctcctaacatagaacttactggaaatggttacaatgaactcactggccagtttaggaacagagtcatcaataccaaaagttttggtggtcaatgtagaaaggtgtttagtggggatggaaaagatttctacaggctgagtggaaatgtcctgtcctatacattccaggtgaaaataaataatgattttaattatgaattttacaatagtacttggtcttatgtaaaacatacgtcgacagaacacacatcatctagtcggaagcgctccttttttagatcttcatcatcttcttcacgcagttatacttcacataccaatgaaatccataaaggaaagagttaccaactgctggttgttgagaacactgttgaagtggctcagttcattaataacaatccagaatttttacaacttgctgagccattctggaaggagctttcccacctcccctctctgtatgactacagtgcctaccgaagattaatcgaccagtacgggacacattatctgcaatctgggtcgttaggaggagaatacagagttctattttatgtggactcagaaaaattaaaacaaaatgattttaattcagtcgaagaaaagaaatgtaaatcctcaggttggcattttgtcgttaaattttcaagtcatggatgcaaggaactggaaaacgctttaaaagctgcttcaggaacccagaacaatgtattgcgaggagaaccgttcatcagagggggaggtgcaggcttcatatctggccttacttacctagagctggacaatcctgctggaaacaaaaggcgatattctgcctgggcagaatctgtgactaatcttcctcaagtcataaaacaaaagctgacacctttatatgagctggtaaaggaagtaccttgtgcctctgtgaaaaaactatacctgaaatgggctcttgaagagtatctggatgaatttgacccctgtcattgccggccttgtcaaaatggtggtttggctactgttgaggggacccattgtctgtgccattgcaaaccgtacacatttggtgcggcgtgtgagcaaggagtcctcgtagggaatcaagcaggaggggttgatggaggttggagttgctggtcctcttggagcccctgtgtccaagggaagaaaacaagaagccgtgaatgcaataacccacctcccagtgggggtgggagatcctgcgttggagaaacgacagaaagcacacaatgcgaagatgaggagctggagcacttgaggttgcttgaaccacattgctttcctttgtctttggttccaacagaattctgtccatcacctcctgccttgaaagatggatttgttcaagatgaaggtacaatgtttcctgtggggaaaaatgtagtgtacacttgcaatgaaggatactctcttattggaaacccagtggccagatgtggagaagatttacggtggcttgttggggaaatgcattgtcagaaaattgcctgtgttctacctgtactgatggatggcatacagagtcacccccaaaaacctttctacacagttggtgagaaggtgactgtttcctgttcaggtggcatgtccttagaaggtccttcagcatttctctgtggctccagccttaagtggagtcctgagatgaagaatgcccgctgtgtacaaaaagaaaatccgttaacacaggcagtgcctaaatgtcagcgctgggagaaactgcagaattcaagatgtgtttgtaaaatgccctacgaatgtggaccttccttggatgtatgtgctcaagatgagagaagcaaaaggatactgcctctgacagtttgcaagatgcatgttctccactgtcagggtagaaattacacccttactggtagggacagctgtactctgcctgcctcagctgagaaagcttgtggtgcctgcccactgtggggaaaatgtgatgctgagagcagcaaatgtgtctgccgagaagcatcggagtgcgaggaagaagggtttagcatttgtgtggaagtgaacggcaaggagcagacgatgtctgagtgtgaggcgggcgctctgagatgcagagggcagagcatctctgtcaccagcataaggccttgtgctgcggaaacccagtaggctcctggaggccctggtcagcttgcttggaatccagcaggcagctggggctgagtgaaaacatctgcacaactgggcactggacagcttttccttcttctccagtgtctaccttcctcctcaactcccagccatctgtataaacacaatcctttgttctcccaaatctgaatcgaattactcttttgcctcctttttaatgtcagtaaggatatgagcctttgcacaggctggctgcgtgttcttgaaataggtgttaccttctctgggccttggttttttaaaatctgtaaaattagaggattgcactagagaaacttgaatgctccattcaggcctatcattttattaagtatgattgacacagcccatgggccagaacacactctacaaaatgactaggataacagaaagaacgtgatctcctgattagagagggtggttttcctcaatggaaccaaatataaagaggacttgaacaaaaatgacagatacaaactatttctatcctgagtagtaatctcacacttcatcctatagagtcaaccaccacagataggaattccttattctttttttaatttttttaagacagagtctcactttgttgcccaggctggagcgcagtggggtgatctcatctccctgcaacctccgcctcctgggttcaagcgattcttgtgcctcagcttcccaagcagctgggattacaggtgcccgccaccacgcccagctaatttttgcatttttagtagagatggggtttcaccatgttggccacgctcgtctccaactcctgacctcaggtaatccgcctgccttggcctcccaaagtgctgggattacagacatgaaccaccacgcctggctggaatacttactcttgtcgggagattgaaccactaaaatgttagagcagaattcattatgctgtggtcacaggggtgtcttgtctgagaacaaatacaattcagtcttctctttggggttttagtatgtgtcaaacataggactggaagtttgcccctgttcttttttcttttgaaagaacatcagttcatgcctgaggcatgagtgactgtgcatttgagaatagttttccctattctgtggatacagtcccagagttttcagggagtacacaggtagattagtttgaagcattgaccttttatttattccttatttctctttcatcaaaacaaaacagcagctgtgggaggagaaatgagagggcttaaatgaaatttaaaataagctatattatacaaatactatctctgtattgttctgaccctggtaaatatatttcaaaacttcagatgacaaggattagaacactcattaaagatgctattcttcagaaaaaaaaaaaaaaaaaaaacaaaaaaaaaacgtggggggggcaggggccggaaaaagtttaaacccccggtggggccccggcccaggagagagaacgggccaagggggcccaggagagccgggcggaaacggggggggtccccaaaaaagccgggaacggggcggaacaccccaagggccgggccgggccacaggccccggcan

SEQ ID NO: 25110 - DNA, 1370 bp, Homo sapiens; identical to SEQ ID NO: 24949
  misc_feature 1, 2, 3, 4, 1370: n = A,T,C or G

SEQ ID NO: 25111 - DNA, 4870 bp, Homo sapiens
  misc_feature 4868, 4869, 4870: n = A,T,C or G
cgtggggtcggaccagcccaggagccgcgggccggagcggggtggcggggccccaggccgcggggcggcgcgggacggcgggcgccggcgccgcagatcagccagtagacatgatgagcatcaaagcctttacgcttgtctctgctgtggagcgggagctgctgatgggcgacaaggagcgcgtcaacatagagtgcgtggagtgctgcggcagggacctctacgtgggcaccaacgactgcttcgtctaccacttcctgttggaggagaggccagtgcctgctgggccagccacgttcactgccaccaaacagctgcagagacacttgggcttcaagaagcccgtgaacgagctgcgcgcggcctcagcactcaacaggctgctggtgctgtgtgacaactccatcagcctggtcaacatgctgaacctcgagccagtgccttcgggggcccgcatcaagggggcagccacgtttgcactgaacgagaaccctgtgagtggggaccccttctgtgtagaagtttgcatcatctctgtcaaacgcagaaccatccagatgtttctggtgtacgaggaccgggtgcagatcgtcaaggaggtgtcgactgccgagcagcccctcgctgtggctgtggacggccacttcctgtgtctggctctgaccactcagtacatcatccacaattacagcacaggcgtctcccaggacctgtttccctactgcagtgaggagaggccgccgatcgtcaagaggatagggagacaggagttcctgctggcgggccccggagggctgggcatgtttgccacagtcgcagggatatcccagcgcgcccccgtgcactggtcggagaatgtgattggggcggctgtgtcctttccatacgtcatagcgctcgatgacgaattcatcacagtccacagcatgttggatcagcaacagaagcagacgctgccctttaaggagggccatatcctacaggactttgaaggaagagtgatcgttgccacaagtaaaggagtttacatcttggttccattacctttggaaaaacaaatacaggatcttctagcaagccgcagagtagaagaggctttggttttagcaaaaggagcccggaggaacattccaaaggaaaaatttcaggtaatgtacagaaggattctgcagcaggcgggatttatacagtttgcacaacttcagttcctggaagctaaagagctcttcagaagcggccagcttgatgtccgggagctgatctctctctaccccttcctgttgcccacctcctcctccttcacccggtcccaccctcctcttcatgagtacgcagacctgaaccagctgacccagggggaccaggagaagatggccaagtgcaaacgcttcctcatgagctacctgaacgaggtccgcagcacagaggtagcaaatggctacaaggaggacatcgacacagccttgctcaaactgtatgcagaggctgaccacgacagcctgctggacctcctggtcactgagaacttctgtcttctgacggacagtgctgcctggctagagaagcacaaaaagtattttgcacttggactgctctatcattataataaccaagatgctgctgcagttcagttgtgggtgaacattgtgaatggcgatgtccaggactccacacgctcagacctgtatgaatacatcgtggattttcttacctactgcttagacgaggaactagtgtgggcctatgctgattgggtcctgcagaaaagtgaagaggtcggagttcaggttttcaccaagagacctttggatgaacagcagaagaacagttttaatccagacgacattatcaattgccttaaaaaataccctaaagcccttgtgaagtatctggaacatcttgtgatagacaagagactgcagaaagaagagtatcacacccacttagctgtgctgtacctggaagaggtgctgctgcagagggcctccgccagtggcaagggtgcagaggccaccgagacgcaggccaagctgcggcggctgctccagaaatctgatttataccgagtccactttcttctcgagaggctgcagggagctggcctgcccatggagagcgccatcctgcacgggaagctgggcgagcatgagaaggcgctgcatatcctggtgcacgagctgcaggactttgcagcggccgaggactactgcctgtggtgctccgagggccgagacccaccccaccgccagcaactctttcacacgctgctggccatctacctgcgtgctggccccactgcccacgagctggccgtggctgccgtggacctgctgaaccgccacgccaccgaatttgatgcagcccaggtgctgcagatgctgcctgacacctggtcagtgcagctcctctgcccattcctgatgggggccatgagggacagcatccatgccaggaggaccatgcaggtggctctcggcctggccaggtccgaaaacttaatctacacctacgataagatgaagttgaaaggaagctcaatccaactctcagacaaaaagctttgtcagatatgccaaaatcccttttgtgagcctgtgtttgttagatacccaaatggtggtcttgtgcacacccactgtgccgccagcagacacacaaaccccagctcatccagtcctggcactcggacttgaaaagcttggcccaagggtgcgaggggaactccgagttctttctgagcctgctggacatgaagagcagatgaccaccatgctctgtgtcagccaggacgaagggagacatctgggtgccagggagccttccgtccatacgcaacaaggactcctcgctgctgaccaggctctatgaatgtacatggaaaacccctaaaaatccccaaaacagaaacatacaagagttcacctgtccaggtacatagtaatccaagacagaggtctactttgaaaaaaaaaaagggagtcttcctcatgcagtccaagacccaggtgggggaccccccaccacccccacactccaacctttagactcatgtttgcactggaaacgtggcttcaccatggctggcgacaaagtcctctcttgcctgggtgagtggcgagggcacagagcctcatgggggtcagccttgccctcctgcagaaacacgttctccatccacgccgctcactcatgggcccatttcccagggttacctcgtgggctctgcctttgccctcagaaacggctgaccctggagaagtacctttgttccttctttcttcctctccggctctcagctcccaaaagattctgccttgtgtacccaagcactcactcttgggtgaactaatgcttctggctgcctagcaagtgaagatctgttgagaaactgagaacgctccaagagagaagctgctctcccctccttgaagaagccgcggacacgggaaacccacggcgggcaagggcccagctgtgtgctcctttcctgtcatggcatctgctgatttgaaactccatgacgaacacgttgaactaaacatttttatttaaatttgtatcatgttcgtagttgctctcttgttgagagagtcatctgtcctgtttgttaggggtattttttcttgttaaaatgtatctcctgttgaatactcgggaaattcaaagggaagtgtggtcagcacacactgagcgttcttttctggagaggccggttttagcctcgtacctttagcaggaccgacagcgggtggaagggcccgtgtgctggatgggggtgtcgcctcctggatggcacaccctcccgaggacatccagacaggctgtgtcaccctccagcactttatgtgcctgctctgaggtgtcctgaacacacagcaacggcctctccttcatcacaggccggggattccttttgtgtttctgtataacatcgatgacgagctgaagctgttgtcacttcactgccctctttggaatttcttcattgtgctgactgattctattaggggctaacaataaaggcagtctacccactactatcatgcttgggaaacaagcgtcagcttgtacatatgacaagagaggaccctgaatacaccctctcttcatcagcccaagccttactgaggtgggatgaagacctcattctctgttctttaaaacatgtttcgtgaactaatattggtccatgtattttttgtccttttgggactctaagtgggtcaagaagcaaaaacatccatgtgttgtttggggggaattggcaccattttttcctgactatgtttcaattaactaaagaataaatgatgaagaaattctccttgtagcacaactgtatgctgtgtaaattggtgtgagctcaaagcccagtcatgtgttttacctgtgggtgactctgttgtagaatggtcatattactgcatatgttatcatgacaacttgtgagtttgagtttatatttctcaaagaacaagttacccgtatatgcaacattgcgccattaaaagcttatttctctgtacacaaaatgggtaaaatcttgaaaaaacttagtaatttctcattcctaacacacagacagagtctcactctgtcacccaggctggagtgcagtggcgcaatctcggctcactgcaacctccacctcctgggttcaagcgattctgctgcctcagcctcccgagtagctgggactacaggtgcatgccaccacgcccagctaatttttgtatttttagtagagacggggtttcaccatgttggccaggatggtctcggtctcctgacctcgtgatctgcctgcctcggcctcccaaagtgctgggattacaggcgtgagccactgcgcccaagcaacactaagnnn

SEQ ID NO: 25112 - DNA, 2970 bp, Homo sapiens
gagtcgacccacgcgtccgactctataatgttcttggtattaaaaaaaaagcatatttgtcacagaaatttagttaacatcttacaactgaacatgtatgtatgttgcttagataaatgtaatcactgtaaacatctatatgatctgggattttgtttttattttgaaatgggagcttttttgtttacaagttcattaaaaactaaaaactgtttctgtaaggaaatgagattttttttaaacaacaaaaaatgccttgctgactcactattaaataaaaatctccccaattttttgatagactacttcaagccatttgttacatggtattcctttgcaagtcaatttaggtttcgtgttataacttttcctctttttttaagaaaaatgaaaaaagtaattcttttgtctgaaggggaaaggcattctttcatttttttctttttttttttttttttttatgacttgcaggcacaatatctagtactgcaactgccagaacttggtattgtagctgctgcccgctgactagcagctggactgattttgaataaaaatgaaagcattaaagggtttccctacaaaacatttttctttaaaatacttttgaaatggctataagcagttgactttcacccttggagagcatcacactgtgtgaggttcagtgattgttgaccctccccagcccctcctgcttctttaagttatctgtgtgcgtgcgcttcctctcaatcttctttgcacgctcatttctttttctctgacccatgagaaaggaaaacttactgatgataatttttaaatagtgtaatttattcatttatagcatgtcaggataaattaaaagaacatttgtctggaaatgctgccgggagcctattgtgtaaatgtaggtattttgtaaaataaccttgaaattgtaaattgacacgtgtttggtcagattgtgtcaagtttaatttgttttgttttcttttttcttttttttatttgaaaactactttagcaataattaattccatgattatcacattctgccattaagggatattagtaccgtaatactgaagaaattttattaagtctgaacttctggggtaggcagcttctttgtttcttttctatccacccttgtcggttgaggtatttgtttcttgactaataaaccctttgatacttttagccagaaatcagtctcataaagctatttttgagtatagtttgtgtaaaataaaaatgtttagctttggtaataacttccaagctgaactccctctagcaagatatttttcagtgcttttatttactatgcacttagactatgcactttttctgaaatatttttgtaacacttttttgtatttttgccatttgaaaaggttgtggtgtagttggtctgtaattaagttgcagatttaaaactgctgttagctttgtaaatcaaaatataggtgttttttgtcctggtatatcgtcattccatctgcagctggagctggaatcccattgatcttctagctaccattcattttcttcactgttcacaaaagaagagtgtgaaattcagtgaatgctgttactaatcctgttacgagatgaatctcatttcaccaaaattaaattatgtttttccgctaaaatgatgatacaagttgaagacacatcactctgaaattggaagacctcaccacttaaggctccacagtggcttactcagctgaactctaggttactactctttactttgttcacccattggggggtgcagtttttttaaaatgttgggagatggccattctaactactgttgaatgtctctgttttgggaaggtataacaagaaataaaaaagaatatatatgaagggagagactggttatctcctcccatatggttgtgcttatcctcttatggcttacaaatgaatatttggaggtttgctttcacaatgatttcccatcaacaaatatttttagtaggatttttcctgtttctgttagtccttgcagtactcataaatgttttaagctgagcatactgtaatagtcataagtttaatttcattataataaaaataatcaaacaaaaggactttagaacccaagacaatgagctagttttccctaaagtttgctgaactattaaggaatatgttcttatagcttttgactagaatgagtcatgggaattctaagaagggatggcctagacatttttagctcagttaaattcagcatttaatgcaggtgagttcctgggtcgttttccaactagtctggaacagtctggttctgactcaaactggtataaagcattattttaggttttctctttgccagtttttaagcagttataaccatgtaaatcaagatgtgaggacatctatatgaagtatagtaaagaagtggtgtcagcagatcaatatgtgtgtcctgggtgtgctgctctcttaagtgagactttgtgagactatactttaaatgcattattaccattgcttacattttgggggattttcttcctcctcaaaacttccatttctattgtaatattcttaatgacaatctttttttttttttagcagtgtatgtttgaaacagccaaagatggcgatgaaccaagtgtaaattgatctaagcagcccatgcagtttgtgttgaatcaacaaacagtgtattgttgaagtgaaattattttctgaaatgacttgttagaccagttttgaggacatactcaaaagtagagtaataatggctcctgggatggagaaatatgagatgaacctggaacattctattatggtgccaacaagggggaactctaagaacactcacacccaccactacccaacacatccttcgcgcccccgggcccccgacaaagtcttctacacaacattcgctctgcgccgcgcccccatcgcagcctccacgcgcaccctggtgtccacagcgcccggcaacacaca

SEQ ID NO: 25113 - DNA, 1299 bp, Homo sapiens
gtccgatggctactaatcctgactattatactgaagtggttgagcagtccttacggacctgcaacttggctactgaagaaattgaacgtgatttacgtcgctctctgcctgagcacccagcctttcatagtgatactggcatatctgctctgagaagggtactcacagcttatgcatacaggaatcccaaaattggatactgccaggcaatgaatattttgacttcagtgctgcttctatatgcaaaagaggaagaagctttttggcttctggttgctgtatgtgaacgaatgttgcctgattattttaatcgtcgaattattggtgccttggtggatcaggcagtctttgaagaacttatcagggatcaccttcctcagctgacagaacacatgactgatatgacattcttttcctcagtttctctctcttggtttctcacactttttattagtgtgctacctattgaaagtgcagtgaatgtggtggactgtttcttctatgatggaataaaggccattttgcaactgggattggcaatacttgactataatttagacaaactgctgacttgtaaagatgatgctgaagctgtgacagccttaaacaggttctttgacaatgtcactaataaggatagtccattgccttcaaatgttcagcaaggttcaaatgtgagtgatgaaaaaaccagtcatactagagtggatattacagatttgattagagaatcaaatgagaaatatggtaatattcgctatgaagatatacatagtatgcgctgtcgaaataggttgtatgtgatacagaccctagaggaaacaacaaaacagaatgtgttgcgtgttgtatcacaagatgtgaaattgagccttcaagaattggatgaactttatgtcatctttaagaaagagctgtttttatcttgttattggtgtttgggttgcccagtattgaagcatcatgaccccagtctgccatatttggaacagtatcagattgactgccagcagttcagagcgttgtatcacttgttgagtccctgggctcattctgcaaataaagactcactagctttatggacattcagattgttagatgaaaactctgattgccttataaacttcaaagaattctcctctgcaattgacataatgtacaatggaagttttactgagaagcttaagctgctttttaagctacatattcctccagcttacactgaagtgaaatctaaggatgcttcaaaaggagatgaactttccaaggaagaattactttatttcagtcagctgcatg

SEQ ID NO: 25114 - DNA, 1861 bp, Homo sapiens; identical to SEQ ID NO: 24183

SEQ ID NO: 25115 - DNA, 2051 bp, Homo sapiens
  misc_feature 1, 2051: n = A,T,C or G
nacttggtgtttgtcccccccggcgaacacattttggggtgcgcacactggccctggtggcgcgcttctttttagggggcctgtggcccacagacaatgttctaaccgggtagtggtgctctcttaccccggtggtcagataaccagggggccagggtcccttcttttggcccctgtagcacacccggtaccctaaagcttgacccgttaaaagctgtacttgtaactgggtacctcgtgaactgtcaaggaggccagagcaggaaagggaaaggaataacccccaccacccccaacacaagagaggcacaaattagagggctgggcacaggctgtagccctgggtgagggggtaagcagcttgacagttgctctgtggtctctgggatataattctgcccaaggctagaaccacagagaagagtttgcactcttaagtccaggaaggggactacctggaaggcctgagaacaaaggagaaagtttagcacactaaacacatggccaggaccctagggacacaaggcagctggagagtgggatctcttgttaaatggcatggtaggcagattagagtcctggctataatccctagggccccaatcctagtagttacgtgctaaccaacacattaccctgaggcttctgggagaacaagagccctgaggaagaagcagtaagaccaggcatgagaaaacccagaaagccagctcagttcccaagaaggctggcacatggggcctgagaattcttaaatggccattgtcactggtacttgctcagcctttccaggcccctctgatgagctctctaatcagcaggaccaaggtgtgaagtgggaatgaacatggatccatcccattggatggagaagaaaggtggacagcctgttcgtctctcatgtcagcctagggctgggaacagtttgtgaggacttatctgttgtacctgccaaaagttaattagtaactcaccgtcgagagtgaattaacaggacaaacgtaatccaacatgccagtgtgggtaggacacagttccctaatcagcccttggcccccagatgcaggctctcccctcccctctgagacctctctgggaatagcagacaagagaatgtcagggcagaaacctgctggactaggctctcagcagcccagctcctccctgggggaatcccccagaattcctcactgtgtgacacagttttctcccatgtcctgggcatatctgtctgacatggtggtccttaagtcctcaatgtcacgacgcagctgttgaacctcttctagtttcctcttgatcacatctggcttctgcaaatctagctgagtctctgggtgctgtgagtgaatgcccaggagcagggagagattggggtcatggccctgggccctctgggtcacaatgctacagacagcctgcagatcttgaaggcaactggccaactcctggtgcagctcaagtgccagctgggccgtgtctggtgaaggtggagaccctggttgggcctggcgcaggtgttcctggagtgtcagattcttctcaatcaagtcctggttttgcactgaaagctcctttcacggctgtgcgcagctgctgcagggctgaatcccttcgctgggcctcctctctcagggcctggcttgttccttcttcttgagccacttcctgctctaggctctgtacttgtgagcgcaactgatccatcttctgctgctgcttctccacaatcttttggagcgaatcgtatcgcttctgccaggactccatttccacttctggaccttctccactggtctcctccacagactgtttatcttgcaggctatgtccagcggaggagaattctgcttctctctgcctcaggctttccagttgaatctccttctctctgcagattgcctgggtctcctccagcaaactctccagctcagtcactttctcctgcagctctgtgctcttcaactcagaatccttaagctatatttaatttcctcagcaaggcaatttttactttctgcagaaagggtgctcctcgcagatggaacaan

SEQ ID NO: 25116 - DNA, 1023 bp, Homo sapiens; identical to SEQ ID NO: 22481
  misc_feature 880: n = A,T,C or G

SEQ ID NO: 25117 - DNA, 1591 bp, Homo sapiens
  misc_feature 1, 187, 188, 189, 190, 191, 192, 193, 194, 195, 196, 197,198, 199, 200, 201, 202, 203, 204, 205, 206, 207, 208, 209,210, 211, 212, 213, 214, 1587, 1588, 1589, 1590, 1591: n = A,T,C or G
ncacccacgcgtccgcccatctctactaaaaatacaaaaattagctgggcatggtggcaggcgcctataatcccagctactcaggaggctgaggcaggagaattgcttgaccccgggaagtggaggttgcagttagcaaccactccactgcactccagcctgagcgacagagcgagactctgtctcnnnnnnnnnnnnnnnnnnnnnnnnnnnnacctaatgttttcattgtgtcattgaaactatagctgactggtatgtatactaagtgttcgttgatctaaaccagatataagtcattgacttttctgaaacttagttgtgtcagagatgaaccacctgctcactgaaccgtcttagtaaccagtgatgaagcatataattctaatgttggcaataggacattgctaacagtgcgtttaactgcaatattttaactacagtaatttttctgtttatttctctatccactcagtagaatttgtggttgaattccaccttcgctgccatagttttttaccacattcctaatggttttcaacctctatactgtagtagaaaattcatctaactactgaatttaattttagcataatactggatcaaattgtttgaattttcattcctgtcatttttgatttttaaaaaatgaaacaaaactaaacaacaaaaccctaggaaaagaatggcttctttccaactagtcaattaaaacgtccagtatctccccaaataaagccttaggtttcttttaacctcttaatggttaattgaaaagagtacagaaactatcaaaatacttatccaatcaatggggggaaaagctatgtcttcagggacagtagagtgatgagaattttttagaaaacactattatccatcaaacttaaaagcatttggacctgatatttaaagataatgaagttttccacatattgaagtattcaagacatcttccatccacaaaaatttatctttaagttttgtaaatatcaagtaagtatagatgatatttattttatatattcctatggaaaaaatgctactttaatgttctgacatttgtgattatttgccagtctttactttttaacttattaaaaagttaaatacttattaaggtttctctatgtaaaacaatttaaattgtcttttgatttttagggaaatatctaaacgtgggaaatttccaacgcaaccttaatattaggttgtgttatttatagagctaaagttaatgcatttttgaatttctcaggagcactgcaaggcaaaaaaatactccaaataaaaatgatatatgtaagttggcaatgtcttcagtcacaataaaaaaaatttttacaacaactcttcaacgaaacaaaacaacaaactaagaagaccaaacagaaaagaccaccagtgttgcgggggacgaacaggagcccacagaaaacagcctctaaacggacgaaccgcgatggcgcccgcgcgcgcccccatctacgcggctcacagcgaacgcaacacgggctcccacgcccgcagaccaagcgcaaccccgggccgagtgccgcaccgacggcagcgagcaccactcgcgcnnnnn

SEQ ID NO: 25118 - DNA, 362 bp, Homo sapiens
  misc_feature 360, 361, 362: n = A,T,C or G
accgtgtgactgtgccgctgatgggggctgtgtccgacctgtgcgaggctctctccaggctgtctggcattgctgcagaaaatatggtggtcgcagatgtgtataatcaccgattccacaaaattttccaaatggatgaaggtttaaaccacatcatgcctcgggatgacattttcgtgtacgcgggatgttaatggagagaaaaagcacagtattgtagagacaccaatattagctaatgtattttggagtgttttccattttacagtttatattccagcactcaaaactcagggccaagttttaacaaaagaggtatgtagtcacagtaaatactaagatggcatttctatctcagannn

SEQ ID NO: 25119 - DNA, 353 bp, Homo sapiens
acccttgagacctggaaccagagccacaggccccttttgtgggttcctctgtgctctgaatgggagccagaattcactaggaggtcatcaaccgatggtcctcacaagcctcttctgaagatggaaggccttttgcccgttgaggtagaggggaaggaaatctcctcttttgtactttcctttaggatttactttttgaggaatggagataatacatgtaaatctttcagagtggtttttaatagacaatacataatggctatcattaaccacaatggttcaggtatgtgtgttttcttgtggacccatcagggttttccaagattcctgcctgtacctgcccgggcggccgc

SEQ ID NO: 25120 - DNA, 1953 bp, Homo sapiens
  misc_feature 1, 2, 3, 4, 5, 6, 7, 8, 16, 45, 61, 113, 120, 235, 978, 991,993, 1010, 1013, 1014, 1018, 1024, 1930, 1931, 1932, 1933,1934, 1935, 1936, 1937, 1938, 1939, 1940, 1941, 1942, 1943,1944, 1945, 1946, 1947, 1948, 1949, 1950, 1951, 1952: n = A,T,C or G
  misc_feature 1953: n = A,T,C or G
nnnnnnnnaaaattancccttcaagagtggcccaacataaccccnaagagccctctgggangttaagaattacggcccctaaaagtcggcaccacaagttgcaaacctgctgnccccagncctctgtttgtccacctaaatacctaaattccaacccttatctccctatttgaaggagaaagtaagatccttcccacatccttggcttgaaaagcaaatagtcaagttttccaancccgccaagcttggcacgagggctaatttgaagttccgtaattgtttgtgccatgagaatgtgtacgtttgaaaggattttataaagcaattactagaaatgcctcccttgagagctgtatgactggaggtgttttcagtctgaggggggcagcataaacccaaacctcttctagatgaatggcagggtggcgggaggggtcatgaaatcatggggaagaggtgaaggatttgagagctactaacctgacatctaactgaatgcctaagaaattgcagggcaatttcaggaaataggaaaaataattttgaaaacattcaaagcctccagactttcggtgtgtgactgatcttttttctaatctctttaaacttctttccacctattgccttaatagcaggtgcttcctcttagggtccccccaaattatttacctcgagttccctaatgaaattactttgcattaatttgtcataaagggagaagtgctagaaataccgaggcattgataatttcatggagtagcaatgaatgtcagtcacagtttcctctccccgttgcccggggctgtgccttcaaagcaggtgacagactgcaaggtgtaaacaagctttataatgccatataaatcaaaccgggctcattttacctaacaacagaaccatgtttgttgggctttggggtaaaatggtctacttcagggaaaattggattccacgtagctctaataactctgtgacctnggacattggtttntntagacacagctctcccnccnnttgntttggnaacagtgggacagattgtgaacacaccctgttaaagcaaggggattccattaggattaccagtgcctgcaaattctactaattgcccccttgtcagcatatttcattaattgctgaaaggtaaatgagttacatattttgtttggaccacgtcacctgtacattttcaaagcctcggattgtttatcttgcaaggagagaaggggcctcttctccacagatgcagctcaaattagcaaaactgaactgtagagtttcaggcctttcccttccttaaaatgctgatagatttctagaccagactttgatatttattggcttcttggtcttgctgtttaaacacacccattgccctttctttcttaggccctgtaagcaaagctggagtagcgtcttgggaaaaggccaactgaccaccctaattttgtcgttccaagtctgcagagcgcacatattaagtagttgttaactgacatctttaggctccgtgagtgaaatgcagcaagcctgcccccagcagcctgtgggctaatcctgagctgttccttcgtttaggtacacaggtgaccctgaagttcccactcggccctctgttttctgagtcctgtctcctctgtagcacagtggggattgttctgaaccgtggcacgccttcttggcgaggcaggctctcttatggaaccatagtctgttacctcatttcttccaactgctctgtcccctaaatgtgtgttcccaggtgcagtgcagcaagggtgctcgctgttggcctttgagagtggaggtggctgtatcggagtgtgctccccctactttttcccttgccccgagtggcagttcttttcctctctgttgccggatgctgtctagggcctgttagttgctatttccttgcctccgctctgannnnnnnnnnnnnnnnnnnnnnnn

SEQ ID NO: 25121 - DNA, 3303 bp, Homo sapiens
  misc_feature 3297, 3298, 3299, 3300, 3301, 3302, 3303: n = A,T,C or G
gcgtccgcagctcttctttattgtctggtagaatttggctgtgaatccatctgccatttcagcctggctaagaaccactgctggggaactagtgcagttgtttggagttgcgtgttgtatcacaagatgtgaaattgagccttcaagaattggatgaactttatgtcatctttaagaaagagctgtttttatcttgttattggtgtttgggttgcccagtattgaagcatcatgaccccagtctgccatatttggaacagtatcagattgactgccagcagttcagagcgttgtatcacttgttgagtccctgggctcattctgcaaataaagactcactagctttatggacattcagattgttagatgaaaactctgattgccttataaacttcaaagaattctcctctgcaattgacataatgtgcaatggaagttttactgagaagcttaagctgctttttaagctacatattcctccagcttacactgaagtgaaatctaaggatgcttcaaaaggagatgaactttccaaggaagaattactttatttcagtcagctgcatgtttccaagcctgcaaatgagaaggaagcagaatcagcaaaacacagccctgaaaaaggcaaagggaaaattgatattcaagcatatctaagtcaatggcaagatgagcttttcaaaaaagaagaaaacattaaggatttaccaagaatgaatcagtctcagtttattcagttttcaaagaccctctataacttatttcatgaggaccctgaagaagaatcattatatcaagccattgctgttgtaaccagccttttactcaggatggaagaagttggaaggaaactacatagccctacatcatcagccaaaggattctctggtactgtctgtggttctggaggacccagtgaggaaaaaacagggagccacttggagaaagatccttgttcctttagggaggaacctcagtggtcatttgcatttgaacagattcttgcatcgctgttgaatgaaccagcattggtgaggttttttgagaaacccatagatgtaaaagccaagctggaaaatgcaagaatttctcagttaaggtctagaaccaagatgtaaatccctaggaattgcctatcatagacaagtttactaacattcctgtagctgtcagtttgattcctgtgagtagggctcagggatttatcttgttaccaatgtgtctgaaggccaaaatatatatccagaagcacaatgcatcattcctttgttgttgataatgggctttgttagcactttttaaaacaaacaaacaaacaaaacaaaaaagcaaaccacatttgttatctcaaattttgatgatattctcaaatacaaatatacttttttatatttcacaatatatgcaatatcaggggaatatgctaaatgttaccaccagagggcacaagcatatcacttttagtaaggaaattactagcttgtgttgctatttacatatgaattactgattattttgaaaagacggtgttatgcttgggtgttagtgaggctgatatgtcatgtcaatcgataaaccctactttccaaattatctaaaagattaccatttggggcccttgttttcaagttatctaactgaaatattattaatttttttaagttaatctcattcagtcttctagtaataaatgcttttttaagtaccttctacagtcttcctacctgaggggttcagaggctgctgactcacactgctaactctgttactgacaaaagcaaatcaataactctaaattctgggctgatataaagaaaaaaacaatattggatttggatttaatctgggtaaaatcagccttctgagaagggctaagaaacagttcaattaactgtataggtctttcattagaccgagacatcactagaaattctgggcactgctgtttgtggtatttgtctcagagtagcttatgactgttttggttctagctttagattttggattttcaccagtcatgtgttaatttacattagatagtaaagaatggctacactaagactgaattatcttattagtctggcaagcatataaagtatacttgtatgtaatgattgccaaggtaacagaattgctgacatctgtctaaaaagttttgactatccaatttagatgtgtaatttctatatactttatgctgtttatatttcagtcattacaccaagtccatttagagataatgggctttgttagcactttcaaaaaaaaaaaaagcaaaccatacttgtccactgtcctgtgctattcctaccaaggacaatttattaatcaattgacttagaaaatagggggagaaatcattcattggagcttctttctttagaaaagactttggttataagccttttgacttttctagatgtgaaaccatgaaagggcagacctccttcagagtgactcaagaggtctccctttcttggagggagttggtacagtcagcctttgggaagaatccactgtgaacaaagcttaacacatggggcttcatcgctcatagaatatgttattttcaaagaagttcaagaattttcaagttgagcctttgaaaatcccataaattggttttagctaaacacttactagtagtgtctttaaattatttaatcaaccttgtcttttcaaggaaattaccacttaaagagatagttggtaaataaacatctatgccttttctcagaaatgatttgctgaactatgtccatattttacagcttagataatagtttatatggaaactattatacatctgctattgtgcaatgattgttaaattatactgaagtagctctagaaagacacatgtatacaaggcactattgtacacactttgctgaatattttgtcagttgtatttacaaagaaaggtactttcttaagagcatatatgttattaatatttgatatgattttaaagtcagaatagtacagattgctgagtattatactttaggctagattaattaaaattgaatactgaaagagattttttgagttgcaaaaagtttataaatgcaaagcaaaaagaaaacatttattttctgagtctgcaggagaaacaaactaaacattatagttttatagctgctatcttgttaaccaaacaggttgttcataatattaaaaatcttacgtagttgtgttaaactgaaccagttcattataccttatgcattaaattaaatatgttataaggtggctttacttgtctttataaaaataaatatatctactaaacannnnnnn

SEQ ID NO: 25122 - DNA, 8245 bp, Homo sapiens
aggttcccccccccccggtgggttccaagtgggccccccccttcctcggcgcaagggtattggggccctccccccccctccctggatatatcccggcaccgggggttacctggccaacccagggaagttttaaagacctggaccgcccttaagaatcccctggatgcaaatcccagttaaaagcggtattgggggaaaatagtcttagcctatgttctaaaaatgctcataaggaaggggtggggaattaccctttagacacaagctctaagaactctggatacaacggaaacttggatggatacagtctgggcccgctgggccagatgttccgagggcggcccggcaagcagcctgtcttgcacattgcaactgactggcttaatctacggcaagagtccttcagctccgtcacagagtactctccaatgtgttatagttatccttaaagctgggccattcaagcacgtgcttggcacgtttactcttctgactagaggggaggtatgtcacctgatagcgtaggtactcattctggccaaagacccctgtcccatagcgggctgtttcatagccatccaaagggtatcaatgagtgctttgcgtacacccttgaaaggcgtactagtgtttcgcagatccagcaggtaggagcggaaattcttgcccattaaggaacggggatgccggccttcagaatgaaatgggatctcagaggtacgaatggcatccagagctttcatcctatacagatagttgtagcaactttgatttccctgggtttccagttgtagtagtctagcatcatcatctgcaaggagctggggctcatacttgatatcctgaaccctggagagtcgaatatcaatctcctctttcaagtccttgggggcattgtgtcccacagggacatgaggtccccttcgagattccattgcaaagcgcatgatttgcctcttcacaaaaataaatagcagtacttactccacgaatttctcccttatgggtaacgtaacagaactgataaaattctccatcatcatttggaaggtaatatccttggaatgctagtacacaattgactgttgatccttccacataatgttcaggcataggggaccataaaaacgtgtaataatcacgagcagtactccatccaaccttgaatataccaacccaatcttttggatgtggatgaatatatggagttaaggtgtaatgacattccaggttggatggagtactgctcgtgattattacacgtttttatggtcccctatgcctgaacattatgtggaaggatcaacagtcaattgtgtactagcattccaaggatattaccttccaaatgatgatggagaattttatcagttctgttacgttacccataagggtgaaattcgtggagcaagtacacctttccagtttcgagcttcttctccagttgaagagctgcttactatggaagatgaaggaaattctgacatgttagtggtgaccacaaaagcaggccttcttgagttgaaaattgagaaaaccatgaaagaaaaagaagaactgttaaagttaattgccgttctggaaaaagaaacagcacaacttcgagaacaagttgggagaatggaaagagaacttaaccatgagaaagaaagatgtgaccaactgcaagcagaacaaaagggtcttactgaagtaacacaaagcttaaaaatggaaaatgaagagtttaagaagaggttcagtgatgctacatccaaagcccatcagcttgaggaagatattgtgtcagtaacacataaagcaattgaaaaagaaaccgaattagacagtttaaaggacaaactcaagaaggcacaacatgaaagagaacaacttgaatgtcagttgaagacagagaaggatgaaaaggaactttataaggtacatttgaagaatacagaaatagaaaataccaagcttatgtcagaggtccagactttaaaaaatttagatgggaacaaagaaagcgtgattactcatttcaaagaagagattggcaggctgcagttatgtttggctgaaaaggaaaatctgcaaagaactttcctgcttacaacctcaagtaaagaagatacttgttttttaaaggagcaacttcgtaaagcagaggaacaggttcaggcaactcggcaagaagttgtctttctggctaaagaactcagtgatgctgtcaacgtacgagacagaacgatggcagacctgcatactgcacgcttggaaaacgagaaagtgaaaaagcagttagctgatgcagtggcagaacttaaactaaatgctatgaaaaaagatcaggacaagactgatacactggaacacgaactaagaagagaagttgaagatctgaaactccgtcttcagatggctgcagaccattataaagaaaaatttaaggaatgccaaaggctccaaaaacaaataaacaaactttcagatcaatcagctaataataataatgtcttcacaaagaaaacggggaatcagcagaaagtgaatgatgcttcagtaaacacagacccagccacttctgcctctactgtagatgtaaagccatcaccttctgcagcagaggcagattttgacatagtaacaaaggggcaagtctgtgaaatgaccaaagaaattgctgacaaaacagaaaagtataataaatgtaaacaactcttgcaggatgagaaagcaaaatgcaataaatatgctgatgaacttgcaaaaatggagctgaaatggaaagaacaagtgaaaattgctgaaaatgtaaaacttgaactagctgaagtacaggacaattataaagaacttaaaaggagtctagaaaatccagcagaaaggaaaatggaagatggagcagatggtgctttttacccagatgaaatacaaaggccacctgtcagagtcccctcttggggactggaagacaatgttgtctgcagccagcctgctcgaaactttagtcggcctgatggcttagaggactctgaggatagcaaagaagatgagaatgtgcctactgctcctgatcctccaagtcaacatttacgtgggcatgggacaggcttttgctttgattccagctttgatgttcacaagaagtgtcccctctgtgagttaatgtttcctcctaactatgatcagagcaaatttgaagaacatgttgaaagtcactggaaggtgtgcccgatgtgcagcgagcagttccctcctgactatgaccagcaggtgtttgaaaggcatgtgcagacccattttgatcagaatgttctaaattttgactagttactttttattatgagttaatatagtttagcagtaaaaaaaaaaaaaaaaaaccacacctaaaatagaccactgaggagaccatagagcggatgctttcatgcaccctttactgcactttctgaccaggagctactttgagtttggtgttactaggatcagggtcagtctttggcttatcaataaattttaatctctgttaatcttacctgctttaaaaaaaagttcttgtgtgttcgtatctttatttattccctagtttgcagaactgtctgaataaaggatacaaggattatttcaatgttactgcactgaaaaacgtgtatgtattagtgtgctagattatttagcagaatattcacaagtttctgttgaccttgttgattgagcatgactactaaatattatgtaataaaaagcatttgtcataacagtcttatgaagtagttcttcgaatatagaaagttctataatttagcccatgaaatgataggtttttaattttcagaaatggagctgcatgtagaatgagatcacatgcttttatatgtgaaatattggttttagcaattaacagaaggcatactttgctaattttatggcaaaattttagaataacctgaatgattatttttaaactatcttgaagttgtatgtatatatctaatgggaaaatggaacaagagatgtcagtataattgttttcctattaaatgatctcataacaggggtgtttgtggcataaaaatcatagaatatatatcagtatcttttttacattttcctgatgagaatataaatttgaaatattctcagtaagtgattaaaagtacaatacataaacccaaatcaaagtaatgtgtttcttcagttatgtctgtgctgtatagaactgtcactaacattaaagaaagaggacacatttttcaagatctgtaatttcattgttgtcaaatttatttgtgaaagtttttcattaatctagcatcttgaacatctttttttggtttgggcctttaaaaatacttctgaattggtattccctttcccttttataatgtgcgtgtgaataatttaaagcaccaacttttgattttgccgcttttgtagttatcatcaaaatagtttacatttgttctgagcaaactagctattgaagatgttaacctaatatttagacttggtggcattttgagttgctatatgtgaactgcagcatatcatgtcgtcacttgtatttgtttgtggaagcagagtttgtatattgttagaatcctttaaaaagttttttgagtctagggcaaaccagtatgaggcattcatatgccagctgttaggacacagcagtcctaggaagcaatagctttggagactttcagcttccagataggttatatacttaggtaaaatatgttcaacaatgggagcatttttgttggagttaataattatggaccatgttaatccaaaagtatccttggaatatttattatagtagtagacactgttcatcttactagcctagaacttattttaaaatagtttaagtaagtaagtccaagcttaatttgttattgacagaaaagtaatacagcctaatctaatctaagcaaaaatgtaagggaataaagtctacatgcatcaactgaacagccttagaatgaggaactgaatggttatattaatttccatggtaaactggatactggttttcataatggacactaaggaaaataaagagccatatttatttttgggtcagaggcagtttattttaaatgtgatttcatttacatttataagcagcttttcttgacaggaattttgattaaattgccttcagttctaaaacaaacctctgttgctttcagacttaatgtgctctgtccccaacaaaacatatgaaaatataatttaaagcacagttttcacagacacagtacaatacattcactatacacagtataacaaaatattcccatccttacctgtttagtaatactgtcacaatgaataagtaaatagaaattggaatttatctttgaaagcattgaaagaaatttaacatgcacaatgactattttatgactgtttagctgttgaactactgatccagcctgcagtttcttgcactagaaagagcgaagctaaataataattgctggcctaaaaaattttttttggtcaattgtaggtagatatgaaatagccaagtggggccttcttatgcaccaactagttgcgtctcatgtctggatcacccttttaaacataggataacactgtatattcaggaccaagaccatacttcagatctgaggaaatttttagagggcagtgtttttataaatactttgaatccctcataatgaaggattttagaacttatgaatatagaggtttactcatctaacaaacagaactgtcatcctttcaaaatgtctgaaaattgaggagggacccctgcttcccagttatatgtgatgtaagacttttcatcaaatgggaacatgggaagaaactttataagcaatttgagtttgttttatgggcagttagctatctcaaagcattttttattgcattattaggcaactggtaaactctcgtgtttaaggaatagcacttgggagaaaagaacactcaaggcatgatggtactgtcggtgaggaaaaacttaaggaatggtccagatgtagattactctaataggtcgtattagtcatgcttttctttgaccacctgctgcaagaagcacttaattgtcaataaggctcattttcctatttcagcaaagtgtttgttttataaagctaaacagacatttccaatgagaatgcagacctctctacaatgtgatgagaaaagtaccttttaaaaaaagtaaaaaatgagcatgaagaagaggcaataggggtcttaacaaaagtgttcatctttgaaacgtgcttagaattttagttctgatttgcaacccacaggtttggtagggcagtggttgcaagaattggcaacacataaacattaaattgttggcaatagagaactacaaagtgctttaaaacttcatctgaagatgaagatataactaaacttcacacacacacactttgcactgaagtatttcaaagtcttttctaacagatttcagggaaaaaagtatttcactaaatgggtatcttggtccgcagatatcaataggcataaattgaatcccttgtacccagcaggcactcaatcaatgtgtgttaaatgaatgaacgaactgaatagactattttgtacaaaatgccatttataacactaaaatgactagtaagtcagatggcaagattttcagctttttaaagggcaaaaggatttgcaagataatataaaacacagaaagcacacctttacgtatgttatttaaatatgaaaatatttttagcatattatgttaaacattctttcttatttatatttccattacctaaagtctttctactcacaaatactaactccattatgtaaggcatggtaaccagtttgataatgaaggtattattttggttttgaacatatgtgagttgatgtgttgaaaacttcaatcacattacaatcttgaaaaaaaaaatctcagtgccagcccctcctccccccaggttgataccaccgcaatacaattcaacaatatgcaacatgccctcaattttattttgttttgggggaaatgtgctgaagaacctagagctttttttgtttagcaccttatatcaaagtaatgaaaatgggtatgatgattacatgtgcaaatgtacaaaatcattaactctacaaagatacatcattccaaaattacagaaaaaatttaaagcatgcatttaattctttttctttaaagggttgctgaatgcttcccctgaaaaaaggtggctgttttcaaaatcagcaactgctggtgaggatttcttggcacagttatgaccagcatgttattgctgcatcttcctgataatctcagccgacaccgggggatggaaattgattgtgtggtgccgcaggccctgagctgtcttgtaactcttcccacagcgacacttgaatggtttgcggacacgaatctgtgttctgtgaccattcttagcgtgatactttatgccattcacattcttgtatctctttttacatccaggaactgggcaggcaaaaggcttctcttcccctccattcatgcacatggagctgaggatggcttcggagctgatggcactctctgtggtccaggactcatcgctgtccgactcctcatagtccacctcctcctcgtcatactcgctgcctgtcggagtgctgctgcggaatgaagaggagggggtgatgggtggggtcacggggggagtaaggcttccactgctgtggcgtgggggagtggacacattccctcgagacactgagctggacagagtcagcgagagcttcggctgaatcttcttctttagggactcctgctctcggcgggcagcatctgtcatgaatctatttatgtaactcagggcaacataggttggctgctgtaattcttgtttttctaaaacccgtggatctgtatcgatgtggttgtcctcgatgtgctcgatgaggtcggccagggtggggaagtggagtccgcagcccccgaatcggcaggtattggagaagaaggaggcggcggcgatgcctgtcatggtgctacatcgagagcccccctggtgtcggctctgcgagcgccgggcgggcgagggagggagggaggccgggtggggtgaggagaggaggggctgggggagggggagagaggcggggtgaggggagcggcgaggacgggacggagggagagggggcgagagagatggaaggagagcgaggagccaccgggaggcagaggggaggcggcggctgcggacgcgtgggc

SEQ ID NO: 25123 - DNA, 1108 bp, Homo sapiens; identical to SEQ ID NO: 20121
  misc_feature 1, 2, 1103, 1104, 1105, 1106, 1107, 1108: n = A,T,C or G

SEQ ID NO: 25124 - DNA, 2494 bp, Homo sapiens; identical to SEQ ID NO: 24959
  misc_feature 1, 2, 3, 2482, 2483, 2484, 2485, 2486, 2487, 2488, 2489,2490, 2491, 2492, 2493, 2494: n = A,T,C or G

SEQ ID NO: 25125 - DNA, 1888 bp, Homo sapiens
  misc_feature 1, 2, 1888: n = A,T,C or G
nnactcgcgtcagttcgcgcgttagtctcaagcctgttcctagcctagctcctagaagagctctaaggagcactgttgactcctggtcttcctagctctgtgacccgctttagcctccttctatttcgatgatgttctcgaaccttttttgattttataccgcttatggcaggtcatgcgtttacttgctttctttaactctttttgcactactcatgcgcagtgtgaccgggatggcgcattttcttgcaccaactaatgcggtgtcgctggcggctgaggagggcggagagttctgtggtgaaatagtgggaaggattcatgtaggcatcgggaagagcctaagtccacattataaaataggaagttgatgcggggtacagttactcccggaccggcggcgtgaaagtcgtgatatcatcgttgaactattagctttgaagtttaaatccaatggagaagactcaagaaacagtccaaagaattcttctagaaccctataaatacttacttcagttaccaggtaaacaagtgagaaccaaactttcacaggcatttaatcattggctgaaagttccagaggacaagctacagattattattgaagtgacagaaatgttgcataatgccagtttactcatcgatgatattgaagacaactcaaaactccgacgtggctttccagtggcccacagcatctatggaatcccatctgtcatcaattctgccaattacgtgtatttccttggcttggagaaagtcttaacccttgatcacccagatgcagtgaagctttttacccgccagcttttggaactccatcagggacaaggcctagatatttactggagggataattacacttgtcccactgaagaagaatataaagctatggtgctgcagaaaacaggtggactgtttggattagcagtaggtctcatgcagttgttctctgattacaaagaagatttaaaaccgctacttaatacacttgggctctttccaaattagggatgattatgctaatctacactccaaagaatatagtgaaaacaaaagttttgtgaagatctgacagagggaaagttctcatttcctactattcatgctatttggtcaaggcctgaaagcacccaggtgcagaatatcttgcgccagagaacagaaaacatagatataaaaaaatactgtgtacattatcttgaggatgtaggttcttttgaatacactcgtaatacccttaaagagcttgaagctaaagcctataaacagattgatgcacgtggtgggaaccctgagctagtagccttagtaaaacacttaagtaagatgttcaaagaagaaaatgaataatgttaagccattcttgattggacctcatagcttattttagttaatcttttttttgtcttttagccttaccaccttttaaaaaatttgttattctccagaaacagtaaataggtgagtaggggtggtgcaagtgaattcgttttcatttagaagcccctctgtacagataatcaaaattcaaagttgaaagaatcaaaagcagccacagttatgtaggtctgatttgaatgtcataattgcagtgacaggacattgccaccaactctatcctactaccatcaatgttgtgtttattccgtcaataaaaaagacttgcttccaggaaaaaaaaacaacaggacgaccaacatcacacaaacaagagggggggcgcaaaaaattccccggggggccattacgcccgtttttgtaaagggcccaaaggggcaaaaacacaagggggcggtaaccccggggggaacagcgccggcttggaggaccctcctgggcacgccccagagacccgaaaactggggtggaccttgcgatgcaatan

SEQ ID NO: 25126 - DNA, 749 bp, Homo sapiens
  misc_feature 748, 749: n = A,T,C or G
gtggggagaaacttttatttccaggacacgtgtgcagaagcaacaagtcaaaattaaccattctatctgaaagagaagaaacatgtactactaattctacaatgcctttctctttagtcagtattaaaaatcttttttaaagtattggtatgaaaacaaatttttgttgccctgataatggaattttaaaactacccacagtttaagagaaaacataacttggtaaaaaaggtagccaataaaaccacaatttgaaattgataccattttctactcacaatggatgatgaaaaatttcacctttaaatgggtcagaagttgtctttgacatttaccatgaaaaaactacattaaatggcgccctcggggaggctacagacaccggcccctggtgataggggggtgtcaaaagtttatccagggggcccaacgaaatgggggttccctcggggaagttttccccaacttttgtttgaaaggtaatttgactttttccaaatttttttaacggaggggaagaaggcccaatgtgtaaatttgccacaaacgggggattcccttttttctcaaactccggaaaattccctttttgttaaaagtggccctttttctccggaaattttcaagtggcgttttgaagggggggggtattttttggggggttttttttgggttggggttaacaagaggttcccattggtcccaaaatgttgtgttttaagggtgaaaaattggccatcggccgggnn

SEQ ID NO: 25127 - DNA, 7743 bp, Homo sapiens; identical to SEQ ID NO: 24872
  misc_feature 1, 2, 7743: n = A,T,C or G

SEQ ID NO: 25128 - DNA, 3228 bp, Homo sapiens; identical to SEQ ID NO: 22886
  misc_feature 1, 2, 3216, 3217, 3218, 3219, 3220, 3221, 3222, 3223, 3224,3225, 3226, 3227, 3228: n = A,T,C or G

SEQ ID NO: 25129 - DNA, 4137 bp, Homo sapiens
  misc_feature 4136, 4137: n = A,T,C or G
aagcgctgcgtgagcctcccacgtagccgcaggcagctccttaaatagcgtccgcgctgagcaaacagtccagacgtggggcccaggagggcgagctgaggcgaccgcaccgggcgcgcagcggcggcgggtcagccggcggccaatgccagcggcgcggcccgccccgtcgcctcccctcggggagcctataaggcctccgcagcgccccgggcgcctgctgctccgtgcctccaccgacgacctcactcagctgcgttacgcgccgctccggctgccggccgcgcgccttgcccgccggctcccgcccgcaatcggcggctcagggcggacccgggtctctgcgttctcgcgagaagcgcggcgctgcggggccgtgggcgcctgagcccgcgcggccctcgagggccgaatatggggggatgcacggtgaagcctcagctgctgctcctggcgctcgtcctccacccctggaatccctgtctgggtgcggactcggagaagccctcgagcatccccacagataaattattagtcataactgtagcaacaaaagaaagtgatggattccatcgatttatgcagtcagccaaatatttcaattatactgtgaaggtccttggtcaaggagaagaatggagaggtggtgatggaattaatagtattggagggggccagaaagtgagattaatgaaagaagtcatggaacactatgctgatcaagatgatctggttgtcatgtttactgaatgctttgatgtcatatttgctggtggtccagaagaagttctaaaaaaattccaaaaggcaaaccacaaagtggtctttgcagcagatggaattttgtggccagataaaagactagcagacaagtatcctgttgtgcacattgggaaacgctatctgaattcaggaggatttattggctatgctccatatgtcaaccgtatagttcaacaatggaatctccaggataatgatgatgatcagctcttttacactaaagtttacattgatccactgaaaagggaagctattaacatcacattggatcacaaatgcaaaattttccagaccttaaatggagctgtagatgaagttgttttaaaatttgaaaatggcaaagccagagctaagaatacattttatgaaacattaccagtggcaattaatggaaatggacccaccaagattctcctgaattattttggaaactatgtacccaattcatggacacaggataatggctgcactctttgtgaattcgatacagtcgacttgtctgcagtagatgtccatccaaacgtatcaataggtgtttttattgagcaaccaaccccttttctacctcggtttctggacatattgttgacactggattacccaaaagaagcacttaaactttttattcataacaaagaagtttatcatgaaaaggacatcaaggtattttttgataaagctaagcatgaaatcaaaactataaaaatagtaggaccagaagaaaatctaagtcaagcggaagccagaaacatgggaatggacttttgccgtcaggatgaaaagtgtgattattactttagtgtggatgcagatgttgttttgacaaatccaaggactttaaaaattttgattgaacaaaacagaaagatcattgctcctcttgtaactcgtcatggaaagctgtggtccaatttctggggagcattgagtcctgatggatactatgcacgatctgaagattatgtggatattgttcaagggaatagagtaggagtatggaatgtcccatatatggctaatgtgtacttaattaaaggaaagacactccgatcagagatgaatgaaaggaactattttgttcgtgataaactggatcctgatatggctctttgccgaaatgctagagaaatgggtgtatttatgtacatttctaatagacatgaatttggaaggctattatccactgctaattacaatacttcccattataacaatgacctctggcagatttttgaaaatcctgtggactggaaggaaaagtatataaaccgtgattattcaaagattttcactgaaaatatagttgaacagccctgtccagatgtcttttggttccccatattttctgaaaaagcctgtgatgaattggtagaagaaatggaacattacggcaaatggtctgggggaaaacatcatgatagccgtatatctggtggttatgaaaatgtcccaactgatgatatccacatgaagcaagttgatctggagaatgtatggcttcattttatccgggagttcattgcaccagttacactgaaggtctttgcaggctattatacgaagggatttgcactactgaattttgtagtaaaatactcccctgaacgacagcgttctcttcgtcctcatcatgatgcttctacatttaccataaacattgcacttaataacgtgggagaagactttcagggaggtggttgcaaatttctaaggtacaattgctctattgagtcaccacgaaaaggctggagcttcatgcatcctgggagactcacacatttgcatgaaggacttcctgttaaaaatggaacaagatacattgcagtgtcatttatagatccctaagttatttacttttcattgaattgaaatttattttgggtgaatgactggcatgaacacgtctttgaagttgtggctgagaagatgagaggaatatttaaataacatcaacagaacaacttcactttgggccaaacatttgaaaaactttttataaaaaattgtttgatatttcttaatgtctgctctgagccttaaaacacagattgaagaagaaaagaaagaaaaaacttaaatatttatttctatgctttgttgcctctgagaataatgacaatttatgaatttgtgtttcaaattgataaaatatttaggtacaaataacaagactaataatattttcttatttaaaaaaagcatgggaagatttttatttatcaaaatatagaggaaatgtagacaaaatggatataaatgaaaattaccatgttgtaaaaccttgaaaatcagattctaactggatttgtatgcaactaagtatttttctgaacacctatgcaggtcttatttacagtagttactaagggaacacacaaagaattacacaacgttttcctcaagaaaatggtacaaaacacaaccgaggagcgtatacagttgaaaacatttttgttttgattggaaggcagattattttatattagtattaaaaatcaaaccctatgtttctttcagatgaatcttccaaagtggattatattaagcaggtattagatttaggaaaacctttccatttcttaaagtattatcaagtgtcaagatcagcaagtgtccttaagtcaaacaggttttttttgttgttgtttttgctttgtttccttttttagaaagttctagaaaataggaaaacgaaaaatttcattgagatgagtagtgcatttaattattttttaaaaaactttttaagtacttgaattttatatcaggaaaacaaagttgttgagccttgcttcttccgttttgccctttgtctcgctccttattctttttttggggggagggttatttgcttttttatcttcctggcataatttccattttattcttctgagtgtctatgttaacttccctctatcccgcttataaaaaaattctccaacaaaaatacttgttgacttgatgttttatcacttctctaagtaaggttgaaatatccttattgtagctactgtttttaatgtaaaggttaaacttgaaaagaaattcttaatcacggtgccaaaattcattttctaacaccatgtgttagaaaattataaaaaataaaataattttagaaaaaaaaaaaaaaaaaaccaagcaaaaaaaaatttgtggggggctcgactggaaaagtttttaaaacattcgttggggcgggcgccatggttattgacttggtcatagtgtccaggaaatcggccagaactcggtgcggtttctcaccattaaaaagccggcgaccgggtttgacaatccatggggtcgagcctaagggtttaaaggggtcaaggatcttccccgtggagggnn

SEQ ID NO: 25130 - DNA, 752 bp, Homo sapiens; identical to SEQ ID NO: 25041

SEQ ID NO: 25131 - DNA, 4817 bp, Homo sapiens
acgcggggactctggcaggtaggaacaggggagagtgcacctgctaccagtcaagctcagccagactgcaagaggaggcgaggcggagccagccgagggagtgaaccatggacaagttgaaatgcccgagtttcttcaagtgcagggagaaggagaaagtgtcggcttcatcagagaatttccatgttggtgaaaatgatgagaatcaggaccgtggtaactggtccaaaaaatcggattatcttctatctatgattggatacgcagtgggattaggaaatgtgtggagatttccatatctgacctacagcaatggtggaggcgccttcttgataccttatgcaattatgttagcattggctggtttacctttgttctttctggagtgttcactgggacaatttgctagcttaggtccagtttcagtttggaggattcttccattgtttcaaggtgtgggaattacaatggtcctgatctccatttttgtgacaatctattacaatgtcataattgcctatagtctttactacatgtttgcttcttttcaaagtgaactaccatggaaaaattgttcttcgtggtcagataaaaactgtagcagatcaccaatagtaactcactgtaatgtgagtacagtgaataaaggaatacaagagatcatccaaatgaataaaagctgggtagacatcaacaattttacctgcatcaacggcagtgaaatttatcagccagggcagcttcccagtgaacaatattggaataaagtggcgctccaacggtcaagtggaatgaatgagactggagtaattgtttggtatttagcactttgtcttcttctggcttggctcatagttggagcagcactatttaaaggaatcaaatcgtctggcaaggtggtatattttacagctcttttcccctatgtggtcctactcatcctgttagtacgaggtgcaactctggagggtgcttcaaaaggcatttcatactatattggagcccagtcaaattttacaaaacttaaggaagctgaggtatggaaagatgctgccactcagatattttactccctttcagtggcttggggtggcttagttgctctatcatcttacaataagttcaaaaacaactgcttctctgatgccattgtggtttgtttgacaaactgtctcactagcgtgtttgctggatttgctattttttctatattgggacacatggcccatatatctggaaaggaagtttctcaagttgtaaaatcaggttttgatttggcattcattgcctatccagaggctctagcccaactcccaggtggtccattttggtccatattattttttttcatgcttttaactttgggtctcgattctcagtttgcttcgattgaaacgatcacaacaacaattcaagatttatttcccaaagtgatgaagaaaatgagggttcccataactttgggctgctgcttggttttgtttctccttggtctcgtctgtgtgactcaggctggaatttactgggttcatctgattgaccacttctgtgctggatggggcattttaattgcagctatactggagctagttggaatcatctggatttatggagggaacagattcattgaggatacagaaatgatgattggagcaaagaggtggatattctggctatggtggagagcttgctggtttgtaattacgcctatccttttgattgcaatatttatctggtcattggtgcaatttcatagacctaattatggcgcaattccataccctgactggggagttgctttaggctggtgtatgattgttttctgcattatttggattccaattatggctatcataaaaataattcaggctaaaggaaacatctttcaacgccttataagttgctgcagaccagcttctaactggggtccatacctggaacaacatcgtggggaaagatataaagacatggtagatcctaaaaaagaggctgaccatgaaatacctactgttagtggcagcagaaaaccggaatgagatctcattgaaaaaaatatatgattgtataatgtgattttttttagaatagggggaaccttatttatttgtgtgttaactgaataggaaaatgtacatactatgttcatgatagtgtgatttttttcacatttaagcaggaatgcaatataaaaatgtgaatctcttaattctcagccatgtgcttattatatttctttttagattgtctatctgtataacacacacacacacacctaagagtctctatttcacaattatatttttgtaaatagtatatgcatttttaatacattggaggctttattttgaactaatttcttagagaatagttatattttctattacacaagtttaaaaatattattaacttgtattttcttaatatacaatctatcttttccacaaatatgagtgggaaataaatcagcacatttgaaagaaagtgttaaaactgaaggcctcacttaattagaaacgtgataaatatatggacaaatggactatacatactataagaggactgtagtttaatactttttacccaaatatgtttaaaaacatcgtgcatttgttacagctcatgttttctatatgaacttagtcattaatgttctttataaaaagtgaaataagatggaaaaattaggatcctacagccagtacgtgataaatctagaaaattgagttttgagtacctcttttcccatatacaatcttccttccttaggtaatttggaagaaaactatgacccatttaatttctattgtgtttcaccaaattcagtgttgttcattatacctctctgaaatataggtttaatttcaaatagaatatggacttaaatgttaatgagaaactggctttaatcaattctagcattttattactgtaatacagggctgatagagtgattttgtcttatatgagtcagttactacttacaggtgataacttgcatactattggaagataaagttgtcaaacttgtcaagaatgagaaaagccaaattagaaaatcctatgtcctagtttccttaccaaggataattaaatatatcactaagagctttatatattgattatatattgttgacaactggtttaagcatcatagcctatgatgataaacactgcctatatatgtaaatagcttttcatcaattcttaaatttcttaacctaggcttcagggagcatatgaaaccaaaattatatggaacattttctgtgtgtacatgtacatgcatttttctagggagagagtccgtaggtttatcagaatatcaaggaaaactgtgacccaaagaagtttaagaatcacatacagtgctgctggctttttgtgcttggcaaatgagtgacaatagaagaaataatttttcttacacattttaaaacgttttctcttccttgtgattgaagatgaaaggagtaagaaattaaggcatttgtttaatttatactggtaacttatttaggggggaggggacatgaaggtaggtaaataggtaggcctctaattgaaccacctctctaagttatgtacgtatatataagctgaaattgtgtttgacattctgagggttttctttttctttttcctttttttttttttttggtggggggctgggggtcagagtcttgttctgttgcctgggctggagtgcagtggcatgatctcagctcactgcaacctctgccttctggattcaagtgattctcctgcctcagcctcttgagtagctgggactacaggtgcccgccaccacaccagctaatttttgtatttttagtagaggcgaagtttccccatgttggccaggctggtcttgaactcccgacctcaagtgatctgtctacctcggcctcctaaagtgctgagattacaggtgtgagccaccgtgcccggcccattctaagggttttctttgaagacaggtcaaatgctgttagtaagtttcaggagattgttaattcctcagttataccagattttataaaatatttgagaatagatggctaacaagaggttagaaatacttttccttaattttaatccacagtatgttacatgcattctaccactacattttggtgctatttaaggtgtgcaattttctataggtgacttttgcaattcagggaagatttgggcatattaaatgaaagaatatctaattgggggaggtgtgaagggaaagaaattcttttcaaaagctgaccacaaagagtagttaaaagtttttgtcactatcttcacaagtgtgtaaagcacagatttcaacagagtgcttggcatattgtagggtgctcaatggtggtttttattattattactcagattccacagtggcaagaaacatcattctacataatggaaaacatttacatcaaatcccacttactttaatgcgaacttggagataatttatggtattgtattgtaaaccattaatgaaaactttttcacagttgagtgaaattaaaatcactatatcccaaaaaaaaaaaaaaaaacacttttttattgttaacaaacttttgaactgtttttctttctctattgtgcttccattccttcctcagtaagtatattttagccatatgtaatcaattacttaaagtataaataagaaacttggtaagtatctggattttttgtatgtgacttggaatcccctccctcttaaaaaaataattcatttagtataaacacacaatcaaatgaatctactcaaagtgtctttaatgatttccaccactggcattacatcctgt

SEQ ID NO: 25132 - DNA, 2640 bp, Homo sapiens
  misc_feature 1, 2640: n = A,T,C or G
ngtattaatgtccacacggagtatgtgtttgatggtgacccaaagcgtacgagtgtccgtccccgtatgaatactgtttctgatcctccgaaatgagtccataatgtctattatgggtataggtcctccctcaaagactttctggaagaatgtccaaagtgttttgttcttagagatattaacagtagtacatagtcccttaagtctgtgaaagacatttattgttaaagaaggtgcttttattaacaattcctctggcagcactagtgaagtacaatatccttcaatattatttctaccataatatatacatttaactttcatgcctctagaaaacatctacagtacatttcaaaatataaaaatatattacaaatctgctgaattatttacaagcaatgttctattatctctatgcaacatttgtttaatacaatactaacaagttacacatatttccatttctgtaagttaaaaaaaatcgatatggcttcttgcttaccaagcaagaaagtgattttattttccttttcaagaccaactttggtgcataaaagattcagtttgaagatacttgtaaaaaaaatacaatttttcttacattaagaaaaaacaactcaaaaaccaaatgatttcctcagaaaaaaaattagagtcatataggttaaatgaaaatatgaagattattcaaataatttgaaaggtttttcaaaaaccgttaacagattagttatataggtaaatattaacatactgtactccatgagaaagccctagtcctgaaaagggagccaccagacatactgcaacactctttaacagtaattttcagccctaattcgatagacgaatttttagttgattgcaaacgtcgttcactgtttgcttaaatacaaattgaacacttttcttatcagagttctgcaaaagaacacaaatggcaaccaatcacatctatttatcataattgaaaggtaaattatctcttgataattttcattgtctaaatatttcctaatatgacttcaaatcaataaacactgtcaagacaaatatccttacagtgcttttggtatttgtaagggcacatgttgtaattgtttttctttccaatataaactactgaaatcactaaagggaagaaaagaaaaaaaaaagcagcttaaagcagcaagcatgcaaagcctttaagaagctgttctactaagttgccaaaagagtgtttgctcagtctcccacagtaccattccatgaaaatgtggatatacagtaatatattaatatattccaccgaagagtctacttcattcacagaatgtttacactaagcataaatattatcctaaatactggatttaaaaaaaaaaaaaaaaaatcggaggggttgactctaatgtgcaactttccctaaacccattgtcagtgactaagactgcaggtgtccccgcttgtttgctttttatgtatttatttattttttacctcttcaacctcttctgcggcattgttctgtatatgtttgggtccaaaagcaaggcagtatctttgggtagctttgataaatgaactactttagtttttaactgatgtcgttcactttcattcacccacacatcaggcagaatgtcttcaggcatccaatgaagcaaaagtttgatcttcccagaatcttcttttctcttagctattacagtactatgaaaaacaacactgtgtcccttccctaaactttctatatgagctgagaggttaaagcatatggctcgatgtcttatcgcatccagtgtttgtgcatcgaagaaatcatgtggccgtggtaatgagcgtcgtcttttgttctttaatttcctccttttgttcattccagctttagaaggagattcttctttggcctttggctggctagaaacttttgaggagttctgctgactgaagtgtgtgggtacatgacgagctagccctccctgagaagcaaagctggcattgcagccaccaacaacacacttgaaaggtttgtctccactgtgtgtcagcatatgcctttgtaaccaactttgactggtagatggagtgttatatactttacaacctttccataagcaaacaaatacccctcctcgctgaccatctacatgtatggaacggatgtgatctgccagatctgggctagagttgaagcaagcctggcactggtcccaacaacaattataggcaatatttttgcttgaagaagtagtgcttccttgtccattcatcattgctggagttgaacgcccactggaaattgtgctgtctacatccattatagtactgcttatgctgtcctccgagtccatgcggctcaggggttccccatccgacgacatctccaagctgccccgccggcccccggaggtcgcgctgcttccgcctcccccagtcccgtagccctcgtcgccgccgctggagactacgctgctgctactgctgccgcccccgccgccgccctggctgccccgcggtcccttgggctcctccaggccctccttgccgtccccatccccgctgctgctgctggcggcgccggggctcaacgagcgggtctcgtcgctgctgctcccgccgctgctgcccaccaggctctcggcgctactctcccgn

SEQ ID NO: 25133 - DNA, 1497 bp, Homo sapiens; identical to SEQ ID NO: 22452
  misc_feature 1, 2, 3, 4, 5, 6, 7, 8, 9, 10, 11, 12, 1493, 1494, 1495,1496, 1497: n = A,T,C or G

SEQ ID NO: 25134 - DNA, 3060 bp, Homo sapiens; identical to SEQ ID NO: 25077

SEQ ID NO: 25135 - DNA, 1187 bp, Homo sapiens
  misc_feature 1158, 1184, 1185, 1186, 1187: n = A,T,C or G
acgtgggacctgccacaggaagaactgggagatcaatacatggccactgccaaacactggtcctctcctcagggccacatccccaaaccagaccctcctacctcccagccaggcaggtagaaacttctgcagcattgtagagcaatctagccctcctctcttagtcccacattcaaaatgttcccaggtttagcccattcactgtgtaggctcttccctcccatgcccctgaccctggttcaggtcctcaggaccatgcagccagaccacagcagtcacttcttatccaggatttaagcagcccagctccacagaccatgttaatccctgggttatacggtctctactcctatatatattttatccatagataatgtggcatggttgctaacacacccactgagcccctggcacacaccattaatcaagcacaacagtcttctccactgggcccagataacatctaggtatccttttcaatacagtactttaagtagccactatgaactgttcataagagttctagaaatgagatttgcctttctttacttacaggataaaggcccaactcttcaacctgacactcagcgcctttagtgacttgccctcaacttacccctccagcctcagcaactattcctttcccaacacataccctcttctcactgtgagccaagtgcccctgaacactgcccatttctttgctccttcctttaatgcctctatatgtccaaatcctcttcacccttaaatgccaggcatgtttttagaaagtactttccaacctcccaaactagaagttacctctctcttccattgtattttgtaattttctaataccttctgccttaaattatggctgtggtcatctcacctcctctgctggatccaatacttcttaggggctgggactgtatttgattcatcttgactccacaaaggttgacccagctccttcccccaaaaagggaagactatagagatttgctaaaccaaaattagcacctgtgatacagtgaaatatgtatttgctcttcatcctgtttcctggcaaaggaatctcaaaagtaatgtctttttgtatactaatgacaaactattgactgatgctgatagccccccaggtagtttcaggatgggggctggtcaccagaaagncaaggcaggattagaaggttgggacnnnn

SEQ ID NO: 25136 - DNA, 1102 bp, Homo sapiens
  misc_feature 1, 2, 3, 4, 5, 6, 7, 1094, 1095, 1096, 1097, 1098, 1099,1100, 1101, 1102: n = A,T,C or G
nnnnnnnctcaccttttgggcgtttccctttctgtgtctgggcttgtttcccttcccgggattttgtcagattcggttccccccgggaccttctgccctggggcttaccccgtccttcccgtgtgtggggtacctctgttactttgctggcatgacctttgccgtggtgggcatcttgggacacttcagcaagaccatgctactattcttcatgccccaggtgttcaacttcctctactcactgcctcagctcctgcatatcatcccctgccctcgccaccgcatacccagactcaatatcaagacaggcaaactggagatgagctattccaagttcaagaccaagagcctctctttcttgggcacctttattttaaaggtggcagagagcctccagctggtgacagtacaccagagtgagactgaagatggtgaattcactgaatgtaacaacatgaccctcatcaacttgctacttaaagtccttgggcccatacatgagagaaacctcacattgctcctgctgctgctgcagatcctgggcagtgccatcaccttctccattcgatatcagctcgttcgactcttgtatgatgtctgagtcccttgatcattgtcctttacctcacagtctctaggattccgtgagctcaggccgacctctctctctggtccccgactgcctccttgcccaggcctctgctcactctctcagtactcctccagattttgttctcagcattttcctttctctgtgatcattggcatcctgggcgtttcttgccctccgctgactactgaatggaatttacctacggctttctgccacttgcctactctctccctctccatcccatcttagcagcctcatagggtgggatacagcagctttttttgcagttatccacactcacattgtcagagtcctgactcccaaggaaccactggtttttgggataggacatgggccagggctaggaacacaaggctccacggtgacaatgtcatttgagttgtaaattatattgttcctgacttagtaagaactaagcagggggccacatgctctcaatggagacaataaaaagttgtcnnnnnnnnn

SEQ ID NO: 25137 - DNA, 3098 bp, Homo sapiens
  misc_feature 1, 3086, 3087, 3088, 3089, 3090, 3091, 3092, 3093, 3094,3095, 3096, 3097, 3098: n = A,T,C or G
nccaggaatcgatagtgcattcgtgcgcgcggccgcccgtcgcttcgcacagggctggatggttgtattgggcagggtggctccaggatgttaggaactgtgaagatggaagggcatgaaaccagcgactggaacagctactacgcagacacgcaggaggcctactcctcggtcccggtcagcaacatgaactcaggcctgggctccatgaactccatgaacacctacatgaccatgaacaccatgactacgagcggcaacatgaccccggcgtccttcaacatgtcctatgccaacccggccttaggggccggcctgagtcccggcgcagtagccggcatgccggggggctcggcgggcgccatgaacagcatgactgcggccggcgtgacggccatgggtacggcgctgagcccgagcggcatgggcgccatgggtgcgcagcaggcggcctccatgatgaatggcctgggcccctacgcggccgccatgaacccgtgcatgagccccatggcgtacgcgccgtccaacctgggccgcagccgcgcgggcggcggcggcgacgccaagacgttcaagcgcagttacccgcacgccaagccgccctactcgtacatctcgctcatcaccatggccatccagcgggcgcccagcaagatgctcacgctgagcgagatctaccagtggatcatggacctcttcccctattaccggcagaaccagcagcgctggcagaactccatccgccactcgctgtccttcaatgactgcttcgtcaaggtggcacgctccccggacaagccgggcaagggctcctactggacgctgcacccggactccggcaacatgttcgagaacggctgctacttgcgccgccagaagcgcttcaagtgcgagaagcagccgggggccggcggcgggggcgggagcggaagcgggggcagcggcgccaagggcggccctgagagccgcaaggacccctctggcgcctctaaccccagcgccgactcgcccctccatcggggtgtgcacgggaagaccggccagctagagggcgcgccggcccccgggcccgccgccagcccccagactctggaccacagtggggcgacggcgacagggggcgcctcggagttgaagactccagcctcctcaactgcgccccccataagctccgggcccggggcgctggcctctgtgcccgcctctcacccggcacacggcttggcaccccacgagtcccagctgcacctgaaaggggacccccactactccttcaaccacccgttctccatcaacaacctcatgtcctcctcggagcagcagcataagctggacttcatgtaaaccgaacaggcactgcaatactcgccttacggctctacgttgcccgccagcctgcctctaggcagcgcctcggtgaccaccaggagccccatcgagccctcagccctggagccggcgtactaccaaggtgtgtattccagacccgtcctaaacacttcctagctcccgggactggggggtttgtctggcatagccatgctggtagcaagagagaaaaaatcaacagcaaacaaaaccacacaaaccaaaccgtcaacagcataataaaatcccaacaactatttttatttcatttttcatgcacaacctttcccccagtgcaaaagactgttactttattattgtattcaaaattcattgtgtatattactacaaagacaaccccaaaccaatttttttcctgcgaagtttaatgatccacaagtgtatatatgaaattctcctccttccttgcccccctctctttcttccctctttcccctccagacattctagtttgtggagggttatttaaaaaaacaaaaaaggaagatggtcaagtttgtaaaatatttgtttgtgctttttccccctccttacctgaccccctacgagtttacaggtctgtggcaatactcttaaccataagaattgaaatggtgaagaaacaagtatacactagaggctcttaaaagtattgaaagacaatactgctgttatatagcaagacataaacagattataaacatcagagccatttgcttctcagtttacatttctgatacatgcagatagcagatgtctttaaatgaaatacatgtatattgtgtatggacttaattatgcacatgctcagatgtgtagacatcctccgtatatttacataacatatagaggtaatagataggtgatatacatgatacattctcaagagttgcttgaccgaaagttacaaggaccccaacccctttgtcctctctacccacagatggccctgggaatcaattcctcaggaattgccctcaagaactctgcttcttgctttgcagagtgccatggtcatgtcattctgaggtcacataacacataaaattagtttctatgagtgtataccatttaaagaatttttttttcagtaaaagggaatattacaatgttggaggagagataagttatagggagctggatttcaaaacgtggtccaagattcaaaaatcctattgatagtggccattttaatcattgccatcgtgtgcttgtttcatccagtgttatgcactttccacagttggacatggtgttagtatagccagacgggtttcattattatttctctttgctttctcaatgttaatttattgcatggtttattctttttctttacagctgaaattgctttaaatgatggttaaaattacaaattaaattgttaatttttatcaatgtgattgtaattaaaaatattttgatttaaataacaaaaataataccagattttaagccgtggaaaatgttcttgatcatttgcagttaaggactttaaataaatcaaatgttaacaaaagagcatttctgttattttttttcccttaactaaatccgaagtgaatatttctgaatacgatatttttcaaattctagaactgaatataaatgacaaaaatgaaaataaaattgttttgtctgttgttataatgaatgtgtagctagtaaaaaggagtgaaagaaattcaagtaaagtgtataagttgatttaatannnnnnnnnnnnn

SEQ ID NO: 25138 - DNA, 1654 bp, Homo sapiens
  misc_feature 1, 1651, 1652, 1653, 1654: n = A,T,C or G
ncgaccacgcgtccgccttcagcctatggaatgctttaaaaaatgttaatggaaagccccaggagaccattttaggtaagacttttgtttgaattttaaaatgcatagaacgttaaaaaaaaccagcaatttattttctaaaatattgctctacttttgggaataatagcattggtaatacgcacaggtttacctcattctatgcaagaggggttaataacataaggttttataatagctactggaagtaaaatttgttactttatagtgtaagaatgtatggaatcgcatgtcaccatttcttaatactgactctttaggggcataaatgcagatcacatcaacgcaagttgattctcatgtgtcaaatatatgtgaattcagctgttaaattactggatatttatcttaacattgctgagagggacctactgtaaatgtgacatcctcacacttcccatatctttaactttgaaaaatcttcttgtaaacttaaagcctagaagtattccaaagcaagggttacagcagtctttattctcaggctcactgaattaaacccaggactaattccacagcacaggcacaagaagcctgttgtgtagtgtactctgccagtaccttggatttaggagctccatggggaactgactaaaccaggagagagaggatttggagctagtcagtcctggtaatctatgaaatgctcatttatacccaggtttcataagcttccaattctatagcaaacccaggctctgagtgttttagaatttcctaattcatgaagtgtttcttgtcttgatcccgtgaccaacagttgaaggttggtaaggacttttctacagtctgaacacaacctaaagccctctttcattgttcacacactaactcctactgccgacgaaccgaaaaataattaatgcagaggagatttatgtcttagccataactccagttgtacaactcaatcgccccattctcttttacggttcaaaatgtactgctgaccttgggtttgtttttgttttgttttgtttttcctgttaggatttatttggggacttttggtagtttaaactctttaaccttttccttgccgtgtatgaggaaagctaaagctgttatcaacttcttattctacgatactaacacgggttttcagtgtttgtttgtttttattattattattaattttgcgtgatgtgaataccctctcccatcaatatttgtattatggtgctatatattggtaatgatcctttaatattgggaagggattttaaaaatactgtgattaaactgggtttcttcctttgattttcatattttaaataaagccacagtcatttatacaaaagaaaagcatctgtccctgggcaaatcttttgaggacagaggtcaaagtaaactgcataaggtttttacatcatttctgtatgtatttgatatatagatcaatatctgtacaaatttaatcttttattttcttggtaactcgtgatcattgagaaagtgtttgaaactttctcatgaagtgtatatataatgggcgtggaaaaattccctttggggaaaatttatgggtccccttccatttttacccaaattgccaaattttcagccagggatgtggaaaagccattaaaannnn

SEQ ID NO: 25139 - DNA, 372 bp, Homo sapiens
  misc_feature 372: n = A,T,C or G
acaagtgtcacagaaagtgaggttgcacgagccagaaatcttctgaaaacaaacatgttgttgcagcttgatggttcaactccaatttgggaagatattggtaggcaaatgttatgctataatagaaggattcccatccctgagcttgaagcaagaattgatgctgtgaatgctgagacaattcgagaagtatgtactcttaaaaatctgttaagagagtggatctcattttaagggttcttaccacaataaaattaaatttttgaaataaatcagtcatatttgagtgaaatgaaacctttccgagtagtttcagacaattgataatacctagtttacagttcctgtagtcattttgggagggtgaggacn

SEQ ID NO: 25140 - DNA, 1872 bp, Homo sapiens; identical to SEQ ID NO: 25106
  misc_feature 1, 2, 1859, 1860, 1861, 1862, 1863, 1864, 1865, 1866, 1867,1868, 1869, 1870, 1871, 1872: n = A,T,C or G

SEQ ID NO: 25141 - DNA, 3228 bp, Homo sapiens; identical to SEQ ID NO: 22886
  misc_feature 1, 2, 3216, 3217, 3218, 3219, 3220, 3221, 3222, 3223, 3224,3225, 3226, 3227, 3228: n = A,T,C or G

SEQ ID NO: 25142 - DNA, 1185 bp, Homo sapiens
  misc_feature 1, 1185: n = A,T,C or G
ncgacgcgtaagacgtgttatgcgacctcgcaccaccgtagattataaacgtggccagtatgaaagctggaactattatcgctatgattttggtttctatgctgatgatcctggggcataacattggaaagaacagaatttgatgctgctgataattctggagaactgtggtttgtaaatttttactccccaggctgttcacactgccatgatttagctcccacatggagagactttgctaaagaagtggatgggttacttcgaattggagctgttaactgtggtgatgatagaatgctttgccgaatgaaaggagtcaacagctatcccagtctcttcatttttcggtctggaatggccccagtgaaatatcatggagacagatcaaaggagagtttagtgagttttgcaatgcagcatgttagaagtacagtgacagaactttggacaggaaattttgtcaactccatacaaactgcttttgctgctggtattggctggctgatcactttttgttcaaaaggaggagattgtttgacttcacagacacgactcaggcttagtggcatgttggatggtcttgttaatgtaggatggatggactgtgccacccaggataacctttgtaaaagcttagatattacaacaagtactactgcttattttcctcctggagccactttaaataacaaagagaaaaacagtattttgtttctcaactcattggatgctaaagaaatatatttggaagtaatacataatcttccagattttgaactactttcggcaaacacactagaggatcgtttggctcatcatcggtggctgttattttttcattttggaaaaaatgaaaattcaaatgatcctgagctgaaaaaactaaaaactctacttaaaaatgatcatattcaagttggcaggtttgactgttcctctgcaccagacatctgtagtaatctgtatgtttttcagccgtctctagcagtatttaaaggacaaggaaccaaagaatatgaaattcatcatggaaagaagattctatatgatatacttgcctttgccaaagaaagtgtgaattctcatgttaccacgcttggacctcaaaattttcctgccaatgacaaagaaccatggcttgttgatttctttgcccctggtgtccaccatgtcgagctttactan

SEQ ID NO: 25143 - DNA, 1458 bp, Homo sapiens; identical to SEQ ID NO: 22244
  misc_feature 1, 1458: n = A,T,C or G

SEQ ID NO: 25144 - DNA, 3389 bp, Homo sapiens
  misc_feature 1, 3375, 3376, 3377, 3378, 3379, 3380, 3381, 3382, 3383,3384, 3385, 3386, 3387, 3388, 3389: n = A,T,C or G
ncttctaaacaacctaccctccttccccattttctgtggtccaactaccctcggcgatcccaggcttggcggggcaccgcctggcctctcccgttcctttaggctgccgccgctgcctgccgccatggcagagttgggcctaaatgagcaccatcaaaatgaagttattaattatatgcgttttgctcgttcaaagagaggcttgagactcaaaactgtagattcctgcttccaagacctcaaggagagcaggctggtggaggacaccttcaccatagatgaagtctctgaagtcctcaatggattacaagctgtggttcatagtgaggtggaatctgagctcatcaacactgcctataccaatgtgttacttctgcgacagctgtttgcacaagctgagaagtggtatcttaagctacagacagacatctctgaacttgaaaaccgagaattattagaacaagttgcagaatttgaaaaagcagagattacatcttcaaacaaaaagcccatcttagatgtcacaaagccaaaacttgctccacttaatgaaggtggaacagcagaactcctaaacaaggaaattttaagacttcaagaagagaatgagaaattgaagtcaaggttgaagaccattgaaatacaggctacaaatgcactggatgaaaagtcaaaactagaaaaagcactgcaagatttacagcttgatcaaggaaatcaaaaggattttataaaggcccaagacttaagtaacttagaaaacactgtcgctgccttaaagagtgagtttcagaagacacttaatgacaagacagaaaaccagaagtcactggaggagaatctggcgacagccaagcacgatctactcagggttcaggagcagctgcacatggctgaaaaggaattagaaaagaaatttcagcaaacagcagcttatcgaaacatgaaagagattcttaccaagaagaatgaccaaatcaaagatctgaggaaaagactggcacaatatgaacctgaagattaaaactgaagatttcctctggaagctaccacatgcaaacatacaagcagtctcacctcaggcatgtattttgaaaagcattttgtcatatcccctctccttatttttctaatatttagactttgaatatttagaactagagttcctattttcagctagttgaaaacagagaaaacctagtgattctgtctggtcatcccacacacctctctactgagtgctccagagtcttagctcacatgcactgagaattctttacagcaaagaagagatttttagagtgggaagaagaggcttatccttctgcattagtataaagagtctgtatttttaataaatgttaaataagctaacaatgtttgtacttatgcattccccatgggtaaaaataaataatagcattgttaaagatagttattaccaaaaaaagagagttattacaaataaatatgtctctttatttttaaaaatgaaatcttaattcatttactctatttgatgataaactataaattcattgaaaatgtgaattctattatgggtagcctttttaccaattataaggaaaatttacagcagtgaacatgaacattcacttagcttcctcagtctctccatcttaaagatcatttatcagaggaggttcagcattttttgcagcataacttttcatgagtctgtattactaatggataagtcaaatccatcctgcacttctacagtttagaaagtatctggactcagaataaatgtaatatttatacttgtttccagaatgttattttacattttatgttcaataagaacactttttaaaagacgtatattcaacataaaatcagctatcagacttcagattagactttatttatgtgggtctataataattgtattttcaagaggttttcactatatttgtattggcctggttttctcagacgattttggacaaatcattagaaactgggcatcatatccacagttatgtaaggcagtgatatactataaggataaacaaagtcaagtccataaagcaataatccctcagaaggaaagtccttacttttcacatattaatatttagtaatttttcctgcttctaaaagtgagagtatcacaccctaaatgaacactgtctactaagagacatcattccatttccacaaatgaagattttattccaagaaacgagtttactgattggagcatagggcttgttgttatttttattcaagcttttagtaatagccttgaatttattatttttcttataggctttttgttaaaatagtgaaggaacaaatgttaaagggtaagataatttccctgcaaaaggacacagaaggcagtcttaagaagatgaatggatgagagaagggagagaataaaatgcaataacgagccagcatttactatgtattttctcctcacctgtctctccatatttaggtcacttaccagtttctgtgcccttttggagcttttgttgagggcttcattctcaccctgtatttctttagccctaaattgacactctctccaaaaatccattccattgtctgtggaccaagatgttctatgtaattcagaagcagaactcttggctaaagggctagtgtggccttcagaaaccattcaattattttctccctacacctttgtcagtttgaaaccagtgaggaaaaaaggtatgttgataagaaacctatattgctaggtagaatttgtacttgttttcttggtagcagttttgaaatattctgtacagtacgttcctattgtttaataataaattcaaaaatatttctaaaaccttaaaaccaactatgccaagcattaagataaacaaatatgatgttctttgacgtaaatcaacgtgatgattctttcacatgtaaacacattttagtgtttctggtttgtcatttttgttgttgttgttgttgttgttatttactctataccctttagcaaaatacagttttaaatttttattgtttttagtagtttcccaactttaagacttatctaatttaactgagaaagaaagcctttttcatatatatatatattggatttctaaggatggtggtttgagccttgattagacttttgatgtgctaagccagacaggcagtctgtacattgatggccatcacaatgcagctttggtttaatttaattcaggcctgctgctgagttatgcacagactttttgttgaccaaaataaaatataaagggttttcttctgtttgacatttgtgttcattttttctctttatgtattacattttaacctatattaaataaatgtttaaatgataatttgcttatgtcttataaaactcagcannnnnnnnnnnnnnn

SEQ ID NO: 25145 - DNA, 1413 bp, Homo sapiens
  misc_feature 1, 2, 3, 4, 1413: n = A,T,C or G
nnnncgcggccgcgtcgatacggctgcagtagtcagaggccgggggaaaagtgggggggagcaagatggccaccaccaagcgcgtcttgtacgtgggtggactggcagaggaagtggacgacaaagttcttcatgctgcgttcattccttttggagacatcacagatattcagattcctctggattatgaaacagaaaagcaccgaggatttgcttttgttgaatttgagttggcagaggatgctgcagcagctatcgacaacatgaatgaatctgagctttttggacgtacaattcgtgtcaatttggccaaaccaatgagaattaaggaaggctcttccaggccagtttggtcagatgatgactggttgaagaagttttctgggaagacgcttgaagagaataaagaggaagaagggtcagagcctcccaaagcagagacccaggagggagagcccattgctaaaaaggcccgctcaaatcctcaggtgtacatggacatcaagattgggaacaagccggctggccgcatccagatgctcctgcgttctgatgtcgtgcccatgacagcagagaatttccgctgcctgtgcactcatgaaaagggctttggctttaagggaagcagcttccaccgcatcatcccccagttcatgtgccagggcggtgatttcacaaaccacaatggcactgggggcaagtccatctatgggaagaagttcgatgatgaaaactttatcctcaagcatacgggaccaggtctactatccatggccaactctggcccaaacaccaatggctctcagttcttcctgacatgtgacaagacagactggctggatggcaagcatgtggtgtttggagaggtcaccgaaggcctagatgtcttgcggcaaattgaggcccagggcagcaaggacgggaagccaaagcagaaggtgatcatcgccgactgtggggagtacgtgtgaggcggcactctctctgcttccccctccgctcttgaccctgcatatccaggaaggaactgccagcctcagaggaggcagcaccgagggtgcctgtttgaagcaagcagcatttgggatatgtgcccttcctcagggtctgcttggagcagctcctctgcaggcacagcctggactattcccaggcacagctgtgggcccaggagccagctcaggtgctcccctccaccatgggcaggctgtgcaaaaagccactggcttttctcagcatttgctgctgggcctctcctgggactaccagtgtggctcttacgtgttttctttgctaaaataaaccctagttcttataaaaaaaaaaaacaaaaccgggcgttaggcgggcgaaaaggttcgacctcggccgccaccgcggggagctccaattcgccctaagtgagtggtatan

SEQ ID NO: 25146 - DNA, 2905 bp, Homo sapiens
  misc_feature 2895, 2896, 2897, 2898, 2899, 2900, 2901, 2902, 2903, 2904,2905: n = A,T,C or G
agtcgacccacgcgtccgcgggcccggtcgtgggcggggattggggcggagcctgaccgttacgcgcagccccgcccccgcggcctcgtcgctcctgctgaggcggtagccgcttttcgtcgactcttaccggttggctgggccagctgcgccgcggctcacagctgacgatgggggaccccagcaagcaggacatcttgaccatcttcaagcgcctccgctcggtgcccactaacaaggtgtgttttgattgtggtgccaaaaatcccagctgggcaagcataacctatggagtgttcctttgcattgattgctcagggtcccaccggtcacttggtgttcacttgagttttattcgatctacagagttggattccaactggtcatggtttcagttgcgatgcatgcaagtcggaggaaacgctagtgcatcttccttttttcatcaacatgggtgttccaccaatgacaccaatgccaagtacaacagtcgtgctgctcagctctatagggagaaaatcaaatcgctcgcctctcaagcaacacggaagcatggcactgatctgtggcttgatagttgtgtggttccacctttgtcccctccaccaaaggaggaagatttttttgcctctcacgtttctcctgaggtgagtgacacagcgtgggcatcagcaatagcagaaccatcttctttaacatcaaggcctgtggaaaccactttggaaaataatgaaggtggacaagagcaaggaccaagtgtggaaggtcttaatgtaccaacaaaggctactttagaggtatcctctatcataaaaaagaaaccaaatcaagctaaaaaaggccttggggccaaaaaaggaagtttgggagctcagaaactggcaaacacatgctttaatgaaattgaaaaacaagctcaagctgcggataaaatgaaggagcaggaagacctggccaaggtggtatctaaagaagaatcaattgtttcatcattacgattagcctataaggatcttgaaattcaaatgaagaaagacgaaaagatgaacattagtggcaaaaaaaatgttgactcagacagactcggcatgggatttggaaattgcagaagtgttatttcacattcagtgacttcagatatgcagaccatagagcaggaatcacccattatggcaaaaccaagaaaaaagtataatgatgacagtgacgattcatattttacttccagctcaaggtactttgacgagccagtggagttaaggagcagttctttctctagctgggatgacagttcagattcctattggaaaaaagagaccagcaaagatactgaaacagttctgaaaaccacaggctattcagacagacctactgctcgccgcaagccagattatgagccagttgaaaatacagatgaggcccagaagaagtttggcaatgtcaaggccatttcatcagatatgtattttggaagacaatcccaggctgattatgagaccagggcccgcctagagaggctgtcggcaagttcctccataagctcggctgatctgttcgaggagccgaggaagcagccagcagggaactacagcctgtccagtgtgctgcccaacgcccccgacatggcgcagttcaagcagggagtgagatcggttgctggaaaactctccgtctttgctaatggagtcgtgacttcaattcaggatcgctacggttcttaatactgaagtcatgatgtgtatttcctggagaaattcctctttaaatgaacaagtaaccacatctcaggcggcagtgaagtccagatagttttgcagattgttttgctactttttcatatggtatatgtttctgatttttaatatttcttttgagaaattctgagttctgatgtaggagctttcctgtgatttctgtttcacgttccttcctgtcacaccctcctttggcgtctctgtgtatatccttgctttattttcttggaacctttggtttcaacactgagggcctggagacctcggctcctcctgctcctgaaccaggaggcttcatgtgggggaggaggagaggtctccatgtgacacatgggctcagggctgccagaatcagcggatgctggatgggcctgcagaaacaacactcaccacacacacttccttcaaaagaccaaaagtgactggtgtctcgtgtgacagattgcttcatttatgtttctacatagtaaggtgactgccaaataatatttgaagtcatctgtctctttgtaaattattttatatgacctataaatttaaaaatgtttttcagtgagtgcttttaacaaacttaagcttctgccctgccaagggaattaatgttatcttgtgaaaggtgttgctgtttgaattgatgagaaatggaagatgagaactccctaagagttctcataataaatcatctcatcacaaatcaatacggtatacagagttaaagtggaatgaggtaagaagatacagctacagaaaatagttgcgtgtatgggagaacagtcattgtaattgggtagttttgttaataaatatttttaaatcttgcttttcagaaattaccgaatgtgtataaacaaataaagaaaaataatttagctgtgttttagacagcattagaatatattgttcagcacagtaaaatatatttgaaatttgataagccaaaaatgtggttttgaatgaatattttgtgaatctttcttaaaagctcaaatttgtagacttctaaatagaataaacacttgcagcagaaaaaaaaaaaaaaacaacagaagggggcccccacgacgcaagacgcctaaccccgtggcggcggcccgtatacaagcacggtccgcaacgcgcgcagggggggtcccacaaaacnnnnnnnnnnn

SEQ ID NO: 25147 - DNA, 2187 bp, Homo sapiens; identical to SEQ ID NO: 21516

SEQ ID NO: 25148 - DNA, 2929 bp, Homo sapiens; identical to SEQ ID NO: 21129

SEQ ID NO: 25149 - DNA, 4440 bp, Homo sapiens
cacgcgtccgcgcacctggcccggcgaccgctggagctgcgcagcgcgcctcggagctgcctgcgggcgcacgccgtcttccccgccagtctgccccggaggattgggggtcccagcctgcgtcccgtcagtcccttcttggcccggagtgcgcggagctgggagtggcttcgccatggctgtgagaagggactccgtgtggaagtactgctggggtgttttgatggttttatgcagaactgcgatttccaaatcgatagttttagagcctatctattggaattcctcgaactccaaatttctacctggacaaggactggtactatacccacagataggagacaaattggatattatttgccccaaagtggactctaaaactgttggccagtatgaatattataaagtttatatggttgataaagaccaagcagacagatgcactattaagaaggaaaatacccctctcctcaactgtgccaaaccagaccaagatatcaaattcaccatcaagtttcaagaattcagccctaacctctggggtctagaatttcagaagaacaaagattattacattatatctacatcaaatgggtctttggagggcctggataaccaggagggaggggtgtgccagacaagagccatgaagatcctcatgaaagttggacaagatgcaagttctgctggatcaaccaggaataaagatccaacaagacgtccagaactagaagctggtacaaatggaagaagttcgacaacaagtccctttgtaaaaccaaatccaggttctagcacagacggcaacagcgccggacattcggggaacaacatcctcggttccgaagtggccttatttgcagggattgcttcaggatgcatcatcttcatcgtcatcatcatcacgctggtggtcctcttgctgaagtaccggaggagacacaggaagcactcgccgcagcacacgaccacgctgtcgctcagcacactggccacacccaagcgcagcggcaacaacaacggctcagagcccagtgacattatcatcccgctaaggactgcggacagcgtcttctgccctcactacgagaaggtcagcggggactacgggcacccggtgtacatcgtccaggagatgcccccgcagagcccggcgaacatttactacaaggtctgagagggaccctggtggtacctgtgctttcccagaggacacctaatgtcccgatgcctcccttgagggtttgagagcccgcgtgctggagaattgactgaagcacagcaccgggggagagggacactcctcctcggaagagcccgtcgcgctggacagcttacctagtcttgtagcattcggccttggtgaacacacacgctccctggaagctggaagactgtgcagaagacgcccattcggactgctgtgccgcgtcccacgtctcctcctcgaagccatgtgctgcggtcactcaggcctctgcagaagccaagggaagacagtggtttgtggacgagagggctgtgagcatcctggcaggtgccccaggatgccacgcctggaagggccggcttctgcctggggtgcatttcccccgcagtgcataccggacttgtcacacggacctcgggctagttaaggtgtgcaaagatctctagagtttagtccttactgtctcactcgttctgttacccagggctctgcagcacctcacctgagacctccactccacatctgcatcactcatggaacactcatgtctggagtcccctcctccagccgctggcaacaacagcttcagtccatgggtaatccgttcatagaaattgtgtttgctaacaaggtgccctttagccagatgctaggctgtctgcgaagaaggctaggagttcatagaagggagtggggctggggaaagggctggctgcaattgcagctcactgctgctgcctctgaaacagaaagttggaaaggaaaaaagaaaaaagcaattaggtagcacagcactttggttttgctgagatcgaagaggccagtaggagacacgacagcacacacagtggattccagtgcatggggaggcactcgctgttatcaaatagcgatgtgcaggaagaaaagcccctcttcattccggggaacaaagacgggtattgttgggaaaggaacaggcttggagggaagggagaaagtaggccgctgatgatatattcgggcaggactgttgtggtactggcaataagatacacagctccgagctgtaggagagtcggtctgctttggatgattttttaagcagactcagctgctatacttatcacattttattaaacacagggaaagcatttaggagaatagcagagagccaaatctgacctaaaagttgaaaagccaaaggtcaaacaggctgtaattccatcatcatcgttgttattaaagaatccttatctataaaaggtaggtcagatccccctccccccaggttcctccttcccctcccgattgagccttacgacactttggtttatgcggtgctgtccgggtgccagggctgcagggtcggtactgatggaggctgcagcgcccggtgctctgtgtcaaggtgaagcacatacggcagacctcttagagtccttaagacggaagtaaattatgatgtccagggggagaaggaagataggacgtatttataataggtatatagaacacaagggatataaaatgaaagatttttactaatatatattttaaggttgcacacagtacacaccagaagatgtgaaattcatttgtggcaattaagtggtcccaatgctcagcgcttaaaaaaacaaattggacagctacttctgggaaaaacaacatcattccaaaaagaacaataatgagagcaaatgcaaaaataaccaagtcctccgaaggcatctcacggaaccgtagactaggaagtacgagccccacagagcaggaagccgatgtgactgcatcatatatttaacaatgacaagatgttccggcgtttatttctgcgttgggttttcccttgccttatgggctgaagtgttctctagaatccagcaggtcacactgggggcttcaggtgacgatttagctgtggctccctcctcctgtcctcccccgcaccccctcccttctgggaaacaagaagagtaaacaggaaacctactttttatgtgctatgcaaaatagacatctttaacatagtcctgttactatggtaacactttgctttctgaattggaagggaaaaaaaatgtagcgacagcattttaaggttctcagacctccagtgagtacctgcaaaaatgagttgtcacagaaattatgatcctctatttcctgaacctggaaatgatgttggtccaaagtgcgtgtgtgtatgtgtgagtgggtgcgtggtatacatgtgtacatatatgtataatatatatctacaatatatattatatatatctatatcatatttctgtggagggttgccatggtaaccagccacagtacatatgtaattctttccatcaccccaacctctcctttctgtgcattcatgcaagagtttcttgtaagccatcagaagttacttttaggatgggggagaggggcgagaaggggaaaaatgggaaatagtctgattttaatgaaatcaaatgtatgtatcatcagttggctacgttttggttctatgctaaactgtgaaaaatcagatgaattgataaaagagttccctgcaaccaattgaaaagtgttctgtgcgtctgttatgtgtctggtgcaaaatatgacaatctccttgcttgtatgatcgtccctggtcacccgactttggaatttgcaccatcatgtttcagtgaagatgctgtaaataggttcagattttactgtctatggatttggggtgttacagtagccttattcacctttttaataaaaatacacatgaaaacaagaaagaaatggcttttcttacccagattgtgtacatagagcaatgttggttttttataaagtctaagcaagatgttttgtataaaatctgaattttgcaatgtatttagctacagcttgtttaacggcagtgtcattcccctttgcactgtaatgaggaaaaaatggtataaaaggttgccaaattgctgcatatttgtgccgtaattatgtaccatgaatatttatttaaaatttcgttgtccaatttgtaagtaacacagtattatgcctgagttataaatatttttttctttctttgttttattttaatagcctgtcataggttttaaatctgctttagtttcacattgcagttagccccagaaaatgaaatccgtgaagtcacattccacatctgtttcaaactgaatttgttcttaaaaaaataaaatatttttttcctatggaaaaaaaaaaacctcggccgcgaccac

SEQ ID NO: 25150 - DNA, 1397 bp, Homo sapiens
  misc_feature 1, 2, 3, 4, 5, 6, 7, 8, 9, 1383, 1384, 1385, 1386, 1387,1388, 1389, 1390, 1391, 1392, 1393, 1394, 1395, 1396, 1397: n = A,T,C or G
nnnnnnnnnatccatcccagtgatgccttatttgaaactgggcttaaactgcaaaaagaatgaagttggatttaggaagctgttagatcattgagtggtgttgagagtgaagtttcactagcagggaagtttccttgagcctaaaataaaaagaaaaaattaaaaagaatcagtttttttaattaaaaaaatagaaagctgttaggctcctaattcgtggggttttttttgtaaaaacagtttagataatcctgaatgcaatcattaacttggttgctaattacaagaatgaaaattataatggaaaaggacaaaataatataccagctggtttgttattatagtccgtgtattaaaatactattgaaatacgttaaaggtaaatttttaaggtttaaaaaaaatttagtaacttacagggatggagaatttagatgtcagaggtggggagatttatttttataaggtaatttttatcctgataaggacttaaaaaaaagttttgcaactgaaattttaaagtaaacatgttaagtacagttaaaaagtaagcattgtagtaaatagtggattctctggtgtgtattttttatctcagtgttgaaaattggaaaagaatggactgaagtctaaaaactggaataatgaaggacactaaatgcctttattgtagatactatgtttgtaagtctatagctaagcaacttaagccaaaaaggtctttcaactgaagctttaatcaacttattttggagatgttctcttcccttatctcatgcgtcatccctaaaataataagatacatgggatcaaatagcccttgccttttcaacacaaatcagttggaaaattatggtttgagtcctgttgctgccatggcttctgtttctcagaaatgagtgtgtatgaacataccaatctatgtaataggctacctttttttgtcttctttggaactttgtacacaaaccaagacaatatcagggtgacaggtgaatgaacttaaattctcagtcttgtctattcaccaaaaaagtatactgcctgttttttctttaattattcaaggttgatgacttttaggaacatgttttatactgtattttttaattaaagcaagtgccttgatgtaattccatgtaaatcattgcttaaccctcttatgggatgaggatgagttattaatgtattgcagcctactggaaaggagggggagttggttaatagcagatacttttcttctagaagcttatgttttatgctgtttattatgtaagatcctgtatgtgtgttgagatttagaggtttcatttgttttgtctgctaataaattgttactctaataatacaaaaaaaaaaaaaaaaaagggaaaaacaataaannnnnnnnnnnnnnn

SEQ ID NO: 25151 - DNA, 1162 bp, Homo sapiens; identical to SEQ ID NO: 21517

SEQ ID NO: 25152 - DNA, 1783 bp, Homo sapiens; identical to SEQ ID NO: 22104
  misc_feature 1180: n = A,T,C or G

SEQ ID NO: 25153 - DNA, 4512 bp, Homo sapiens; identical to SEQ ID NO: 24525
  misc_feature 1, 2, 3, 4506, 4507, 4508, 4509, 4510, 4511, 4512: n = A,T,C or G

SEQ ID NO: 25154 - DNA, 959 bp, Homo sapiens
  misc_feature 1, 2, 3, 4, 5, 6: n = A,T,C or G
nnnnnncccttggatctggcttcccaaagtctttttgctttcacctcggtcagacccagatactcacacatctacctaactaacagactgtactcccacaggggttccgggatagccccctcctatttgggcaggctctcaccaaggaactaatcgagcttccccttgctcctagcagcctccttcaatacatcaatgacctccttatgtgtagtccctcctttgatctatccatcaacacatcacccaacttctaaatttcctctatggccagggatatcaggttttacctacaaaggctcaagtagcccaaacccaagtcactaaccttggactcaccctaacccctaattcttgagccatgccagcccgatggaaggagctaatacaggatgtgccccttccccacaccaagaaggacccttcctttttgggccttgttgggtacttccagctgtggatcattaactttggcctgttgaccaaaccactctgcacggcatcacgtgggtccatcctagaacatttggacccagcttgcccattaactcccacttctaaaaactgaaagatgcccttttaatgtcccagcactaggactacccaattccattaaaccctttaccctgtatgttcattgtaatcaaggccttgcccttggatttctctgccaaacccgtggcaacactccagaagccattgcatacttctgaaaactggactctatcatccaaggctggcctccatgcttgaaagttctggatgcagctacattgctggcctcagaggcacaaaaactcaccctctaccagcacattactattgcatcttcccataacttatgggaccccatgagccattgatctcttcttttcctcctgccatccagcttacagcaaccctctaacaccttccagagatgtaaaattctaaatccaaccaccctcctccctataagt

SEQ ID NO: 25155 - DNA, 1185 bp, Homo sapiens
  misc_feature 1, 2, 3, 4, 5, 6, 7, 1169, 1170, 1171, 1172, 1173, 1174,1175, 1176, 1177, 1178, 1179, 1180, 1181, 1182, 1183, 1184,1185: n = A,T,C or G
nnnnnnncgagagtcttctagaattaattaacgcaggcaaagactgacgaaatggaatcataccatcgtagactgaatgttgctctacatgatcatgatcaaagtcactcaacagaaagagaccaagagcttgatttccagggcacagtagataaattgcgtcatttacaggaaaatttgaattctcatgttctgattctttctcagcaactttctaaagctgagagtaagtccaggtgcctcaaaactgagctccataacacaagagaggctctgaaagaaaacgctttggtttttgaacacatacaaagagagctaaaccaaacggggtcaaaggaagaacatggaaaaaaaagaacacaaggggcccaagataaagtagaaaaatgcacagaaaagcaagtaagattatgtcaactacgaagataaaatatgttgcttcaacagcaactggatgatgttcacaacaaagctgacaatcaagaaaaaacagtaactgatattcaagccaaatgtgatgctacagcacaaaatcttcaagctgagtgcataaagcaccgtcttttgctagaagaacaagaggatgatcaataaagttaatcatttgaaagaaaaacaatgtcaatatgaaagagagaaagcagaaagagaagtagttgtgagacaacttcaacaaaaacagggtgacgtcctaaacaatcaacaacaaaagctttgctggatgcttcattgcgtcactgcgtccattgagaaagtgagatgtaggattcaaggaagaaattaggtcagatgagaattcaatttcaagaaaaatggaatcaacttacagcgactataaaatgtactaaggagacgcaaggccacgtacaaaaacttgaaatagaaaattctagtgttaagaaatacaattaaaaagcaagatggccaaattgagcagcttcagaaaatcctgcgaagttcaagtttgatgcagcagttattgcaagaaaatgaaactacagaaatagatgaagcttcttctgaatttaaatctggatcctctgtagccagaggttcccaacctacaggccatggacaggtccatgacctgttaggaaccagctgcacagcagtaaagctacggtggatcttctagatcatctgcatgccatgtgaatcttaaaaccagnnnnnnnnnnnnnnnnn

SEQ ID NO: 25156 - DNA, 982 bp, Homo sapiens
  misc_feature 1, 2, 3: n = A,T,C or G
nnnatatagatcgattaaacgtccctaaagtattggcctgggccaatatcggcacagattggctgggcatctccaagaataaccggtaagttggattacaatgaaagtctgtaacttctttatgggtcagtgaaaaaggaaagaatgttgcacctgtctagtcccatagtcaagaggcttctggatcacaaagtcataactagacaggtttgttcttgtagttttctatccccagtctttgctccccagatggcagtagtttttagtaggaaagtgccattcctgtccttaaggcacagtctcatcagaagtctaatacctgggcaggtttataacatcctgagagccagcctgacattagacagaataccctttgtaatacattggaaatttttactcatgcctttttgtttaggataaataggtaagcacaaagagctcttcaaaatcagaaaaaacaataggagtccttccttgtcttttctgtgatctctgtccttgtttctgagactttctctaccattaagctctattttagctttcagttattctagtttgtttcccatggaatctgtcctaaactggtgtttttgtcagtgacagtcttgccagtcagcaatttctaacagcattttaaatgagtttgatgtacagtaaatattgatgacaatgacagcttttaactcttcaagtcacctaaagctattatgcaggaggatttagaagtcacattcataaaacccaagtgctatgggtgtattattcatgatagctggcccacaggtcatgaattgaggaggaatttgctttcaaaaagcaagaatgtccaacactgaaagtttatagttttatatttggaccttgaaaggtaagaaaaaaccaggttctccaaagttaggaatagggaactaatttatgaaacagccatcttaaaaaaaaaaaaaaaaaactgcggccgcaagcttattccctttagtagggt

SEQ ID NO: 25157 - DNA, 335 bp, Homo sapiens
  misc_feature 1, 2, 3, 4, 5, 6, 7, 8, 9, 10: n = A,T,C or G
nnnnnnnnnncaggtacatacacacatgcgcctgcagcacatggttttgtttcctccacctcccacccctttagctgctgttgcctcccttttcaggctggggctggatccttcctaggggatgggggaagccctggttgcaggcagccttccaggcaatattaagataggaggcccccgggcctggcagtgaaaggtgtggccccccaccgatttatgatattaaaatctccactcgccaaaaaaaaaaagttaaaatctaagtacttggcaggaatgctggcaatagcttgtgccagattactgtataaacttgaaagtaataaaaatgttct

SEQ ID NO: 25158 - DNA, 1078 bp, Homo sapiens
  misc_feature 1, 2, 1075, 1076, 1077, 1078: n = A,T,C or G
nnagtctctctgtttactgggcttgtctcctggcgagttttctgtgtgtggtccggctcctaatggcggatcctcgtggtgtgtctataagtggtctcttcttcctttgcggcccgtcccgctgtttccccctttgtcttctcacgtggcctccccctgtagatgttccccgccgttgcgcttttgctaagacgggaccttgtgcagttgactctcataactattttgtgaagtagggaagattgtcagcctcattaggtgaaaatatgttggttcaagatcacacagttagtatgctgcaaagtcaggactcaaacccaggtctctggaatcctggttttctgaatgtcggagggcacctctaacaaaggctctggagcactctaaactctcattctgggctcattcctcactcctggaggctgatttctgggggaaggaggaagtgcatgaggtacctttctgtcacatgactggtggcagaccctactttaacccagcccaacaaggtcatgctacagagctgctcatggcattttcctggactctcctcccttggtcctgactggattcttctaccctgatccacttagtaagtccaagctccatctcctacttacacaatgccccttctcttgctcctttgctcatggtgtttacactggctttctccagtctctggttctcagtccccttacaaagatcctggattagatttgcctgcctagctctgcctgattgggattacacattgtgtagtgccaacatcacacgttcggcatctacggtgtgtgcacggcactgcactaagggttttacacccattctccatttaatcctttcaacagccttgtgaagtagatagtattacttcatttacatatgaagtaactgaggctcactgaggctccgggagtcatcttcccgaagtcacaaaactagtgatgaagacccaagaactgaacccaggtctgtcagactgtaagccctgtaggcttaactattctgccttatgaccttctgaaacctcatcctgtggtctgatgcctacagggttggaagatatttactacannnn

SEQ ID NO: 25159 - DNA, 4802 bp, Homo sapiens; identical to SEQ ID NO: 24957
  misc_feature 1, 2: n = A,T,C or G

SEQ ID NO: 25160 - DNA, 1498 bp, Homo sapiens
  misc_feature 1, 2, 3, 4, 5, 6, 7, 8, 9, 10, 11, 12, 13, 14, 15, 16, 17,1487, 1488, 1489, 1490, 1491, 1492, 1493, 1494, 1495, 1496,1497, 1498: n = A,T,C or G
nnnnnnnnnnnnnnnnncacccgtgtcccaggagaccctctgaacctcacgggcgcttttcccgccggcaaccctcccgtggaggcgccgaagcctaacccccgaatccctttaggaaggccaaggctaagattccaaatacgagacgtcctaaacccattcgaacagccaggaaaaataccggcttgtcacaaaactcggctcccacgtgacccacagaacaaccaaggtcaaaaagagtccaaaggtcagaaagaaaagttatctgagtagactgatgctcgcaaacaggcttccattctctgcagcgaagagcctcataaattccccttcacaaggggctttttcatccttaggagacctgagtcctcaagaaaacccttttctggaagtatctgctccttcagaacattttatagaaaagaataatacaaaacacacaactgcaagaaatgcctttgaagaaaatgattttatggaaaacactaacatgccagaaggaaccatctctgaaaacacaaactacaatcatcctcctgaggcagattccgctgggactgcattcaacttagggccaactgttaaacaaactgagacaaaatgggaatacaacaacgtgggcactgacctgtcccccgagcccaaaagcttcaattacccattgctctcgtccccaggtgatcagtttgaaattcagctaacccagcagctacagtcccttatccccaacaacaatgtgagaaggctcattgctcatgttatccggaccttgaagatggactgctctggggcccatgtgcaagtgacctgtgccaagctcatctccaggacaggccacctgatgaagcttctcagtgggcagcaggaagtaaaggcatccaagatagaatgggatacggaccaatggaagattgagaactacattaatgagagcacagaagcccagagtgaacagaaagagaagtcgcttgagctcaaaaaagaagttccaggatatggctatactgacaaactcatcttggcattaattgttactggaatactaacgattttgattatacttttctgcctcattgtgatatgttgtcaccgaaggtcattacaagaagatgaagaaggattctcaaggggcattttcagatttctgccacggaggggatgctcttcgcgaagggagagtcaggatggactttcctcatttggacagccgctctggtttaaagatatgtacaaacctctcagtgccacaagaataaataatcatgcatggaagctgcacaagaagtcatctaatgaggacaagatcctcaacagggaccctggggacagcgaagccccaacggaggaggaggagagtgaagccctgccataggaggagaacacagcccacctcaggcctcctgcaaaaatacatagaataaacaacaacagttactaaatgaatgaagattgtgattccgatgaagcctgccagagaaataaagcannnnnnnnnnnn

SEQ ID NO: 25161 - DNA, 716 bp, Homo sapiens; identical to SEQ ID NO: 24972
  misc_feature 697, 698, 699, 700, 701, 702, 703, 704, 705, 706, 707, 708,709, 710, 711, 712, 713, 714, 715, 716: n = A,T,C or G

SEQ ID NO: 25162 - DNA, 1554 bp, Homo sapiens
cgagagtacttctagaattaattaagaaagcagttgctgttcgaaagcatcttgagaggaacagaaaggtaagctaataaataaaacctggtgctaagtaggactgcttgtactaaattttttcggtaaaatgtaatgcatctggtttgaattatccaaggcttagtacacaaaccagtgtagtgctgctttgaagttcaaattctatccaaagagattttcattatagaaagtgcatggtagctctacattctcttattaatgtttgataatgttaggtcattttgggtggttttcttgaattgcaccaaattttatttttaggataaggatgctaaattccgtctgattctaatagagagccggattcaccgtttggctcgatattataagaccaagcgagtcctccctcccaattggaaatagtaagtatcaactcttttgtcgttgttatcaagaataggagtcagccagtagtaaaagtcctagtagtaaatatgttcagccttgggggctagtagtaaatatgttcagccttgggggctattttgttaactgctctttgagctctgccctggtagtgggaaagcagccacaggcaatacataatcgaatgggtgtggctgcttgtctttaataaagacaagcagagggccatagttgcagaccccagatttagaccatgaataagccctttgactctcttttagatagtaggtagattttcctttcatacctctactcccaggagtttgaattaattttcacatgaattgctcactatgatgattggttgccagacattcgcagtttccaccagaaatgtttttccttatgttggccagttcttccttggatgtctgagtgagcatcttcattcattgtgcttgaacacaatgagttggttcaggtattcagtagtttggtgcactttatatagtttggatttattaactgtttgagaatagcaccattagtggggagattctgttaatgaatgtggagggaccagtattaatcctgattttctttctttccccttttttctttttcagtgaatcatctacagcctctgccctggtcgcataaatttgtctgtgtactcaagcaataaaatgattgtttaactaaaaaaaaaaaaaaaaaaccgagactaattctctctctccttttcttcccattggctctcagagcctgttcgagccattcaggtaaatgggtctccattattacctggtcacaccagattttcccccagattcagaccatccagtctgattccccgtttctgggctcaagtttgactctaaaatctgtttgctattttaaaaagtccaagctgggtccccaggaagaagttttgccaccccggaaactttcaggaagaccgtgcaggcttcgaaggagctcccaagtcacagaaagcgctattgagacagggaggtccccaaatggtcctctgaagccggggtcaccaagtcagtccagatcacagttctgtgagcagcctgaaccttaagaaggggatacggccgttatctggaacaggcccgg

SEQ ID NO: 25163 - DNA, 786 bp, Homo sapiens
  misc_feature 784, 785, 786: n = A,T,C or G
acaaacattggcttcttagtgccattagcacttttaccaggaaatgcaaaagatgcaaccacataatgttttcacttttgttttatgctgttcttcaatcgctctttttgtttatttgtttgtttgctttcattaaccaaactcaggggaatgtcatgatgtcaccaaggccaatgggtagagaaataaaaaccagccatccataattgaatctgtaaagtcagtgaacttagccttttcaggttcaaaattacacaaacacaaggattttcttatctttcacctttcaaaggttttctttttattttgccacctgttttccaaataagaagtgggaagcctcttagataaattgtgataaaaatgtctctttgtttggcgtgagctatcaaattagctttgtgtgtccactgagccatcaaattaggctttggctgctggaggcctaggttctagctttggtcacctatcagaatcttactgttacgctgggcatggtggcatgtgcctacagtcccagctatttgggaggctgaagtgggtagattgcttgagcccaggagcctgtgcaatatggtgagacccatctcaaaaaacaaacaaaaaaagaagtagaatcttactgtgaatagctactagcctaccctagaagatatatattttaaatctgtttcttaggaatagtagctaaaagaaggaatggccaaaggagggaaagtggttggccgcagcggctcacacctgtaatcccagctctttgggaggctggggtggaaggatcacnnn

SEQ ID NO: 25164 - DNA, 2028 bp, Homo sapiens
  misc_feature 1, 2027, 2028: n = A,T,C or G
natagggagtcgacccacgcgtccggcggcgcggcagagtgcggcgcagcgcagctcctgaggttttggttatgaacaggattcggattcacgtcttgccaaccaatcgggggaggatcactccagtgcccaggtctcaggaacctctgtcttgtgcattcactcatcgtccatgctctcaccctcgtctggaggggcaggagttttgcattaagcatatccttgaagacaagaatgcacccttcaagcagtgtagttatatatcgacgaagaatggaaaaagatgtcccaatgctgccccaaagccagagaagaaagatggggtgtccttctgtgctgaacatgtccgtaggaatgccctggcacttcatgctcaaatgaagaagaccaacccagggcctgtgggtgaaacactcctgtgccagctgagctcatatgctaagacagagctggggtctcagactccagaaagtagtcgcagtgaagccagccgaatactagacatgctggtgtctacacagcagaagaagtggccctgattatgcgtgaaaagctaattcgtttgcagtcgttgtatattgatcagtttaaacgacttcagcatctgctcaaggagaagaagcgccgatacttacataatcgcaaagtggaacatgaagctctaggcagtagtctcctgactggcccagagggacttttggccaaagaacgagagaacttaaagcgattaaaatgtctgcgacgataccgccagcgctatggagtggaagccttactgcataggcagttgaaggaacggagaatgctggccacagatggtgctgcccaacaggcccataccactcgttccagtcagaggtgcttggcctttgtggatgatgttcgttgttccaatcagtctcttccaatgaccagacactgccttacccagaaagatgcgactgccattggtgacctgttaactctttactgtggtctaatggagacagcactcgactgaaagtgaaggacccagactctagttgacttggatgttgtgggtgatggtatgcagtgtcctccttcacctttgctttttgatccttcactaacccttgaagatcatttagtcaaagaaattgctgaagacacagtggatattttgggccagatgcagatggctggagatgggtgcagatcccagggatctcgaaattctgagaaagcctctgcaccattgtctcagagtggattggctactgcaaatgggaagccagaacccacttctattagttgatagtttggggaaccattttactttggtggatttaaatttctcgttcttcaaagaagtatttctgatcatctctcacaaaacacaggcaacccagactaccttgtttttcttctggattgagtattatagtcaaacgtaaagccaaattttgaggacgtggaccgtgggtttcttcccactcagggcaaggaagagaaagagagataatccctatcaaagcttctgggattatttgggactatacctaaaaggaaagtgacatctttgtaatgggatttcccaagtcatggatagaaatccacttaagtagctaggtgggagctgtctttgtgagtggtgtctttgagatactgatggccctaatatcggttatctctatctgaagacctgcagtttagcttttcttcacctctacttaattgggcagtctttaacccctttccctggtgaactctggctttttatcctctgagaaaacagcccacaggactgggtcctccttatccgtcttgcttttaacctatgtaaatttctgtggttgctatcttatgtaaaatatagtaaaaatttattgtatatagtttctattaaatgttaaagaaaatgttatgaaaatatcaaacagtcacctgaattgaaagcatgttggagaaaagtttcttcgcggttttggggacctgtctctgatgggaaagggaagttgggacagatcctccttccatcccaagaagtaaataaatctacagtagcnn

SEQ ID NO: 25165 - DNA, 350 bp, Homo sapiens; identical to SEQ ID NO: 22488

SEQ ID NO: 25166 - DNA, 995 bp, Homo sapiens; identical to SEQ ID NO: 25072
  misc_feature 1, 2, 993, 994, 995: n = A,T,C or G

SEQ ID NO: 25167 - DNA, 1092 bp, Homo sapiens; identical to SEQ ID NO: 22835
  misc_feature 1, 2, 3, 4, 1092: n = A,T,C or G

SEQ ID NO: 25168 - DNA, 1522 bp, Homo sapiens
  misc_feature 1511, 1512, 1513, 1514, 1515, 1516, 1517, 1518, 1519, 1520,1521, 1522: n = A,T,C or G
ccacgcgtccgcccccatgagtgtgtgctaaatggggggaactggctgtgagccacagcagccccacacagacagtggtctctgaacttcaggaaagccatggacagaaaaaaaaataaaattcttttccatcattctattttcaaagaggtcttggcgttttcctacatcttttgtttagaggggaaaaaaaggtttcatttgctgccatttcagaaaggttatgctatcctgttttttccaagcagttgtgagtcaggaactgcctgggccgtgtgcatctactttgtggccgaaccattacagctgtcatatccttggcctgatcgtctctcccagggactactgccctccacttagtgtctgacggtaagcctagaagggtgctgctattgggtctatggaagcttatctatcaaaggagcaaacatccagaaaagtgtttataaagcaaatgtattgcctctgtttagagatttgcccagctgttccagttttaaacattaaaaaataaactcagttgccatggcaaaaatagaatgcacagcttacttataattttccatgcagtatagcataaggatttttgacttgaaacaaccaaagaactcctccttaacgagacagttcaaattcctgaattagtatttcttgactatcaacttaaagaatggacttcctagtacaatgttgcacttatttttttttctgaaataattctgcctgcatgtatgtgttgtgttttagcttctccccttaccccaccccaaagatcttttcttcctaatggttaatgtctcaactcggttactgtttactatcagatggtttttcattagtgaatttagacctctttgagaaagcttgtatataaaaagttaacagatatattttatggaaaaacccatcttattttcaaatatatttaactgctgttatattttattagaggaaggttgtaaatattttctaggagttctattgtaaagaaaagtatttttgaaaaaaattaatgtaataaaaaggaaaacatttttaaatagtggttgtgattgcttcctgttctggcttcgttatgttctattctcagcagatgaattgcatgccttccatatcaggatgtaatttattcaggtttgcactattataagttgacatcataatatctagtgtgcttaactgtattttcccggaatgcaagtcccttggtccatattaaagcactatgtatagcatattcataatttttcttttgtaacgtgtgtatttttaataaggattttatgtaacattttggcaacaagaggaccgtattttctagtgaattttataataacattttgctaaaaatgtttcttcctaggtcagtttttgttaaggtgaaccaaaagtcttattttaccaggggtttaaaaaaagtttgaagcttgaaagcaaagttatatttaaacatcatatgtaacaaataaataaagatgttttatagacttgtcctaaaaaggtgcattccnnnnnnnnnnnn

SEQ ID NO: 25169 - DNA, 354 bp, Homo sapiens
  misc_feature 353, 354: n = A,T,C or G
ggtgcctctcctctttccctttgtgttcgtcattttggcgaattactggaagatggcggttccggccgaaaggccccgcgtacaacaaaggccaaggaatgtttatctggcaattccaaggcatgaggtttcacttctagtcgtctgagacgcaccttgtcacgtttctgccgccaggaatcatgtaggaatgattccagtcgcttaaacctgagcccttttcctttcttctgctccttctttgccaaaagtgcctgctttgcctgggtggctttgagggcttgataagccttcctctttttcaggagattttctggaaccaaagggatttttctttgctcttgctccgccann

SEQ ID NO: 25170 - DNA, 1719 bp, Homo sapiens; identical to SEQ ID NO: 23180
  misc_feature 1703, 1704, 1705, 1706, 1707, 1708, 1709, 1710, 1711, 1712,1713, 1714, 1715, 1716, 1717, 1718, 1719: n = A,T,C or G

SEQ ID NO: 25171 - DNA, 3966 bp, Homo sapiens; identical to SEQ ID NO: 21853
  misc_feature 1, 2, 3965, 3966: n = A,T,C or G

SEQ ID NO: 25172 - DNA, 369 bp, Homo sapiens
  misc_feature 369: n = A,T,C or G
acttttttttttccttttttttaagagtataaggtttacacaatcattctcataatgtgacgcaagccagcaaggccaaaaatgctagagaaaataacgggatctcttccttgtaaacttgtactgcagccgcctcaatatccccttccccttcatcgtcttcgcttacttctacatggtggtgaagaagtgcctcaagtgttgctgcaaggagaaaaacatggagtcttctgtctgctgtttcaaaaatgaagacaatgagactctggcatgggagggtgtgatgaaggaaaactaccttgtcaagatcaacacaaaagccaacgacacctcagaggaaatgaggcatcgatttagacaactggatan

SEQ ID NO: 25173 - DNA, 2583 bp, Homo sapiens; identical to SEQ ID NO: 24862

SEQ ID NO: 25174 - DNA, 1952 bp, Homo sapiens; identical to SEQ ID NO: 24377
  misc_feature 1952: n = A,T,C or G

SEQ ID NO: 25175 - DNA, 2819 bp, Homo sapiens
  misc_feature 254: n = A,T,C or G
ctgttcttgtactgttcacttgttgattcgtgtttgttgctgttgtcctctgtctttttactgccttgcttgcgtttccttgtcttcgctcgtcgttctgttctgcttctttcgttgtcgtttgtctgctcgtctattccttgtgattttctctgtcggtctgtatgtgcgtctaccgtcgtctctcttgtgtgtactgtcttgcgctgctctcttcgtcatcattcctgtgtttctgcccgctccgccggcgnggcggtcatgaatttcgggggttcgcctggagccccccggtgtatagatgcgccccattgggccctcccgaccctccatctcgggtttggggtgccagagacaccccgggtgtccccccgggggctttttttttaattggggggagaaaacgccacagccccttgatgtccggagccggggttttcctttgggaacaccccttgggccacaggttcaactaacccatccgggggccgccgcgcccccacacgaaattggttttgaaaacctttttccaggcccgagggccccaacaaatgtttttttttttttttttttttttttgaactttaaagatcagatttatttggagaaaacaaaaaacccacaacccaaaggatgggattttacatcaagacatctcccaggtaataagtctacagattacaaatcattttcatagaagatatttttgtacaaattttacatgtattcaggagcgggacattaatcaatccctgtttctattttaataggggggacaaggtaggggagagggaaaaacagttttggatataactatttggaaggagagtagacatgaagagggcaaaccctagcttttcattatctacaatcaatagtttgtttttcttttttaaaaaaagaaagaaaaaccctttcaatcttcaatactctttaaaagcccacttcttagctactggccaatccacaccaattatttaaattcacttggtacacacctttgtccactgggtaaattatattcattatgcccactgctgcagcacgcataaaccaacacccctgcatggctgaacagggcctaatctaggactgatgggagaagggcttgcaaaccaagatcaaggtgtttctccgctaatactgtctaccaagctgatccctacaaaaatgcatataaaagcaggcaagtttagctactgtgttgcaagagaaaccaggaccttgttaaatagttctctccattaccatttattctctcaagggaagcttaaaaaaaaaacaacaacaaaacaacacattggtctggccacctcatgaatccaacaagcattagtgtggcatttcagtggagaaggaaacttggggggaaaaatcccatcaaggttgtaagaaaggctcccaatttaactgtccctgtccctatttatccatcatccaagaccatccattattctagagcactctgatcaataaaaggggtccaagcatcaggagcaggcaaggagaaccaaaagacatcaagaaaccgatttgcttgagaaaagcagcgattcttcctttcagagttctccatggctcagaaaatgcccaagacatcatgtatgtgacttagatactgctttttgggaggttaagagtagcatgaagaacttaagatgacgataagagtctaaatttttagtttcaaggtttcaatagaatgtggatatattcaaaactttcaaaaaggacagtgtttagaaagggtaaaactaggacacagaaaacactgggaattaccacgacccccaagtgcttccggctccaggaaataaccattcatgtgtttgctggaggtcacacaattttcccctattacctggtgcaaaatgactcatcacttcccaaaagcttcttttcaaaccacgattttcccatttattttggtccaatgcagtcccattctttatggcctatagtctcactcccaactacccccctggggggttaaaaaaaaaaaaaaggaattccctctaggctggcccccaaaactcagaattaaataagaggaggggctggcagcctcctggagactagaacaacttgaggctaaatctacctttccaagagtggaaaatttattcagataatgtttgagaattcatatatgccacaataggataaaaactaaaaggtagaaatctcacacttttccttctacctccctcccctactgcccaaccaggttccaggcattatatcactgtcattaccatttctgctaaatggagacccctaggcactaatcacactggcaactgcatggtgacataacgcaccacaacttttcctctaaaaagctgtagtccctttctctctggctgtattggcaattctccagttacttcaatactttaaaggctgcagcagcatgcaaaataatttcattttttgtttttaaaaaaaggtaagaaaggtcttcaggagatgttgagttttattttgtcttgtctggatagaggttttgatttgctctcgaatgttccagggtggagagaaactaggagaaaagcacaggatgtagaggtctattcggcataatcttctccctcattttcatcttcaccatcaacagagagagcagcatacttgcttgcagaactgaacttctgtaacacaacgagagtgacaggataatgaaggccctgaattatcacatcaaaccccaagacacaggatactgatcctttggcaatgggggatgacagtcagatgacacccacttgcttgctcatcagcattgtccactggagaggagccgtacgcgtgggcggacg

SEQ ID NO: 25176 - DNA, 618 bp, Homo sapiens; identical to SEQ ID NO: 24969
  misc_feature 1, 616, 617, 618: n = A,T,C or G

SEQ ID NO: 25177 - DNA, 2367 bp, Homo sapiens
gcgtccggcctgaaagacctttctaggccagtcggggtccggcacccagttgacgagacagcgcggcgctttcagagctggggagaggcgaaaactcttccggccccccgatcccccggccagccgcccccggcagctccttgccgcctcccggcctgggcccgcccagccgttctcggcctgccgtcaggcgatctcggcggccagcccagccgcgatgtgacgccgcgcgccccggggtcctcggcgcctgcgccctctcctataaagcagacgccgcgccgcgctgcgacgctgtagtggcttcgtcttcggtttttctcttccttcgctaacgcctcccggctctcgtcagcctcccgccggccgtctccttaacaccgaacaccatgccttcaattaagttgcagagttctgatggagagatatttgaagttgatgtggaaattgccaaacaatctgtgactattaagaccatgttggaagatttgggaatggatgatgaaggagatgatgacccagttcctctaccaaatgtgaatgcagcaatattaaaaaaggtcattcagtggtgcacccaccacaaggatgaccctcctcctcctgaagatgatgagaacaaagaaaagcgaacagatgatatccctgtttgggaccaagaattcctgaaagttgaccaaggaacactttttgaactcattctggctgcaaactacttagacatcaaaggtttgcttgatgttacatgcaagactgttgccaatatgatcaaggggaaaactcctgaggagattcgcaagaccttcaatatcaaaaatgactttactgaagaggaggaagcccaggtacgcaaagagaaccagtggtgtgaagagaagtgaaatgttgtgcctgacactgtaacactgtaaggattgttccaaatactagttgcactgctctgtttataattgttaatattagacaaacagtagacaaatgcagcagcaagtcaattgtattagcagaatattgtcctcattgcatgtgtagtttgagcacagatcccaaaccttacggccaagtttcttctagtatgatggaaagtttcttttttctttgctctgaataaaactgaactgtgggttctctataagtggcattttgggctttccctctttttttgtaaagcaatgtctgcctagtttattgtccagttaactttagtgaccttttaaaagttggcattgtaaataaaacaacttgcaaaaaagttttctggaatagaattaacaaaatattatctttattcatgagttggaaactggaaaaaggcttcttgaagtaaatgttctgagtggagctactaggatgtcttccagcctcctgcagtcaaggagtaccactgtattgattagcctgtatgtagcagggctcccttcattgcatctgaggacttgttttctttttctttatttttaatcctcttagttttaaatatattgcctagagactcagttactacccagtttgtggttttttgggagaaatgtaactggacagttagcttttcaattaaaaagacacttaacccatgtgggatgtcatctttttataattagtgttcccatgtggagaaaattattcacactacttgcatgtaaagaataatttaacttttaacattaaaatatgtggtaaaacccagaaagcatccatcatgaatgcaagatactttcaataaaaagtaagttatatagtaggtagttaagtttgcttttgtggacttaaatgtgtctcttcacttaaatgggttgaatgtgtatatatttgttcagcttgaaaagacttagtttatatcctagctcactggaggctgctgacataaccataacttctgtcccttctaattgtcatttatatgcctaactggagctagtactttaattcttaacacaaaattactctgccattgtttccagcttccctcctacaatagaatgaagtttttttgatggcttgagatggctcacaaattttgatttttttttcttccttgtgctccctttttttctccttgcttttccagttaacatctatattcacatgtaatcttgttttctcttcacattcactgagttgttcaggctcagatcatcccttgacagtagtttgccttcatctcacctttcatttgtcccaaattcaccttatttaataaagtcccatatgttgtctcaaaaaaaaaaagaactaaaactcgaggcggggcccggaacccaattcgccctatagtgagtcgcattacaattcactggccgacgttttacaacgtcgtgactgcgtgggcgtatagccaagaggcctgaccgatcgccttcccaacgc

SEQ ID NO: 25178 - DNA, 351 bp, Homo sapiens
  misc_feature 351: n = A,T,C or G
acactctacttgtgcagtagcaaagtctatgattatgtaagaaagattcttaagctgcctcattcttccatcctcagaacgtggttatccaaatgccaacccagtccaggtttcaacagcaacattttttcttttcttcaacgaagagtagagaatggagatcagctctatcaatactgttcattgttaataaaaagtatacctctcaagcaacagcttcagtgggatcctagcagtcacagtttgcaggggttttatggacttttggtcttggaaaacttgatgctgatgaaacgccacttgcttcagaaactgttttgttatgggcgtgggtatttttggccattggan

SEQ ID NO: 25179 - DNA, 2136 bp, Homo sapiens
  misc_feature 1, 2, 3, 4, 5, 6, 2134, 2135, 2136: n = A,T,C or G
nnnnnngcgaccccccgcgggggggcctttttgcccgacccgcgcgctgtgggggcaaccaggacgcggacgaggcccgggccacgcggcctgcccttagaaagaaggaaaaagtcgcatcacgaagggttaagactgaggaatcaaaataggattgggaaaactttgggcgggcacacagcacaaacaagccatagttgttttcttaaaaaaacaaggctcacacatagacatccaataatacagcagaccccagtgccagaaatgccagaccatatgctactgaaacactggtagaaatgttacagacaactattcactatgtattgtaatattcttgtagttctgaggtgaaggtaaaccaaccaggagagattactcccttgtaactggctttggtttaagtgatctttcacatttttttctaaccataccttcttataaaaaatgtagcaattacatgttactgagggaaaatagtactagttttaatattcacaaccaactactccagctgacacaggatgccatcaaccattaaaatttattgatcatacttagattttctaaggctgatcaacagatagcaaagatggaacccttttgggaaaaaataaaatcccttctaccccagttttgacactgttaagaagttataaaggaatgttaaattatttaagatatttcaaaaaagaattaagaatggaagagtaaattctgctggaaaagatagggcagctttacagtctgcaaagtaaataatctacagagatgcagcttaacttttttttattataataaacatacttatttccataaggtgctgtgactttgcagctagtgcatactaatgccacccactgtacccaatgtgcaaaaggaaataatggagatggctaacctccagttttctgatccttgatttgcataagtggtgatgtacaccaaatacacaaaagctggagtataaatatttatttttaaaaattaggccaaactgaatatagatatttaatctggtttcacaaactcttaaaataattttctgaggaaacaatgatgaggaatgtgtaggaaaggcaatgtttctatgctagcggtaccaaacctggaactttaagtatcattttttagctcattaactatatagaagattactaagaccagtaagggagccattttcttcccctcctctatttttattacttatctctctcctctttactcttaaaattggcaatcttctgacaacccaagctaataaaataatatagctatatataattcaaataactaaagaacttttgagtccatatatgcaggatttttgaatacctcactacatttgctcttataccctcactgtcctggtatcataaatattattaagggaagataacttagaaggggaaagcaattccaacctgggataaaaaagtgattacaaataattatcttgttgatagtaagggcttatggtaacaagtagctctgatttttcacataaagatccccccccaaaaaaacaaaatacaaacaattccagtttttttcccccagaatgtgacttatttccattatacaaagtagtataacaaaataagctctcttctgcacaaaaaacgattaatggtttataagacaaataagtagaatgcttctctttgcctttaaattaaaatactatgaacctaggtaacaaaacatacatggctttcttcaaaagggccacaagatttcttctggttattgtgacagctacccaatttaatgggaaataacactcaagcagtcatttggtaagtttcccatgaatttcagcatttacagtgccacaaacacaactgccacagttatgacaactctctgaaaagcacaaataaagcaaatttaaaacattaatcctcataagcagttcaaggcagatcaaagtgctgagtggtaggaaaatgaataaaaatttcctatcaggagaataaagtttgtgtaaactatttagtatcctgaagatcactttaatgaccacctataagatgcagagtttcggtaattctcgctgcatcatgggcaagtgtccacgcccgcactatgccagatgcttagtgccttaacgggagagtatggtaatcaaccnnn

SEQ ID NO: 25180 - DNA, 386 bp, Homo sapiens
  misc_feature 1, 2, 3, 385, 386: n = A,T,C or G
nnnatgtcagcctcgccatgcgggttccagcatttatgtatgaaccagacgtcctaggtcttgtgcaagaatgttgaacagtcagtgcgtcccaactaaagggagatggagccctcaatgatcgggacccccaggccccgtaaagactagggcgcgtggattatgagctgaatcctgaggacatcaataaacacctgttggtccacgcccctgacgacaagaaagaaattctggccagttttatctccgtgcctcttcaatttctacgaggacttgtacttcaccctacctcgatgatcaatcccacttggtaacatgggtgtgcttgtgtgggatgggggcaagggtcccagtgcctaacaagcgcctgggggtacctgaagcnn

SEQ ID NO: 25181 - DNA, 3417 bp, Homo sapiens
  misc_feature 1, 2, 3, 4, 5, 6, 7, 8, 9, 10, 11, 3416, 3417: n = A,T,C or G
nnnnnnnnnnncgtccggggcgggagagaccggagctccctttatacggaaactctgccttcgttatatggcgggatggcgttcccctcccccatcccgaagccagttccaccccctgcgcaggacgccttggccgggctcccctcggccccctgctgccgttgtctttacggaacctttggtgtcggggcttggaagtctccttggcgccggcttctgggcccgggcgaagctggtgcgtggcgccggggtgcaggcggctaagtcccagggacttctgccctgcgcctccgacgggcatttgtctggctgcgtccgggctcgggacgatcctgggtccttgctggcgctgcggccctgcccggcggcttcgtgacctccggcggcgaatccccgggctcgcgcaacgagttgtagccgcggagagcaggcgtcgatgctggcgcccaaagcctccagcctgagagtcgcctcactcgtgtgacgacagagtttcactcctgttacccaggctggaggacagtgatgtgatctcgggtcaccacaacctccgcctcccggattcaggcgattctcatgcctcagcctcccgagtagctcagattacaggcatgtgccaccacgcccggctaattttgtattttcagtcgagacggggtttccccatgttggtcaggctggtcttgaattcccgacctcaggtgatctgttcgcctcggcctcccaaagtgctgggattacaggcgtgaaccactgcacccggcgaggcattttttactgtctacagaaacttattgtaattcatttttcctcactccagtagtaagaattataccaaattgaaaagatatgaatgagtatcctaaaaaaagaaaaaggaagactctacacccttctcgttattcagattcctctggaataagcagaattgcagatggattcaatggaattttctctgatcattgttacagtgtctgttctatgagacagccagatttaaaatattttgacaacaaagatgatgattctgataccgagacgtcaaatgacttgccaaaatttgcagatggaatcaaggccagaaacagaaatcagaactacctggttcccagtcctgtacttagaattctagaccacactgccttttctacagaaaaatctgctgatattgtaatttgtgatgaagagtgtgactcacctgaatcagtcaaccagcaaacccaagaggagagtcctatagaagttcacactgctgaagatgttccaattgctgtagaagtgcatgcgatttctgaggattatgatatagagacagaaaacaattcctctgagagtctccaagaccaaactgatgaagaaccgccagctaaactttgtaaaattcttgacaagagccaagctttgaatgtgactgcccagcagaaatggcctttactgagagctaatagcagtggcctctataaatgtgaactttgtgagtttaacagcaaatatttttctgacttaaagcagcatatgatcctgaagcataaacgtactgattcaaatgtgtgtcgagtatgcaaggaaagtttctctaccaatatgcttctgatagaacatgccaaactgcatgaagaggatccctacatttgtaaatactgtgattataagacagtaatttttgagaacctcagccagcacattgcagacacccattttagtgatcacctctattggtgtgaacagtgtgatgtacagttctcctcaagcagtgaactctacctacatttccaggagcacagctgtgatgaacagtacttgtgtcagttctgtgaacatgaaactaatgatccagaagacttgcatagccatgtggtaaatgagcatgcatgtaaattaatagagttaagtgataagtataacaatggtgaacatggacagtatagcctcttaagcaaaattacctttgacaaatgtaaaaacttctttgtatgtcaagtatgtggttttcggagtagacttcacacaaatgttaacaggcatgttgctattgaacatacaaaaatttttcctcatgtttgtgatgactgtgggaaaggcttttcaagtatgctagaatattgcaagcatttaaattcacatttatctgaagggatttatttatgtcaatattgtgaatattcaacaggacaaattgaagatcttaaaattcatctagatttcaagcattcagctgacttgcctcataaatgtagtgactgcttgatgaggtttggaaatgaaagggaattaataagtcaccttccagtccatgagacaacttgattattctctttaacttacagaatgttagtttaaaataataaattcatcctttttttggagatgattaaatggatgattgtaaacacaacttatgaaatctgcctttaacaagtaacttttttaaattataaaattttattggcattgctccattttctgtatataaatatatctttaatgtggtattttcaattgcgtgatagtttgtagtttcaaccactcttggtgactgtcatcctgtttcttccatattctctgatttcatgaattgaaaagaaacaaatgtattgaagaagtgagctacagttttccttccttaaccatgggtgctagtaactttttaaaactcaagacaagattagttttttatgtgtgaagtcattaaattattacacgaccagaactaaaatgcaatatacagttaagtccacggatactcccattaatgagaaataacactaggaagccactattacaggaagaaaagatttggttttcatggcagtctgtttttttaaaaaaaaatttttgagccactatctattgttgaatattttaagatgggatgagggaggaactaataagggcttacacaataaaaaataactatatcataactcattcataacttgatgtttcattttctgttgaggaaccataaattcattcacagacttaatatttttttcttagagatggtctcgttctgttgtccaggatggagtgcagtggttgatcatagctcccgggccgtagtctcccaggctcgagcaatcctcccacttcaccctcctgcatagctaggactacaggcatgtggcaccatgcccgctaagtttttaaatttcttgtagagatgagatctcgctatgttgcccaggccagtctcaaactcctggactcaagcaatcctcccaccttggccttccaaatcactgggattataggcatgagccattatgcctgactcttgcccaaatttctgatgtcaaattgttcattgacagaaaacccactgaagtatttaaagttaggaagatctgggagataggggttgctggcatgaaaatgtataacttacaacatttattaataaaatgataaattann

SEQ ID NO: 25182 - DNA, 2670 bp, Homo sapiens; identical to SEQ ID NO: 24256
  misc_feature 1, 2, 3, 4, 5, 6, 7, 8, 9, 10, 11, 12, 13, 14, 15, 16, 17,18, 19, 20, 21, 22, 23, 24, 2643, 2659, 2660, 2661, 2662,2663, 2664, 2665, 2666, 2667, 2668, 2669, 2670: n = A,T,C or G

SEQ ID NO: 25183 - DNA, 6221 bp, Homo sapiens
  misc_feature 1, 2, 604, 1889, 6215, 6216, 6217, 6218, 6219, 6220, 6221: n = A,T,C or G
nnacaacaactcctacagctttggtttatgaaatcagctagtcaacattagtagaaggtagtataaccagatggctcttcagaatctcatatttatgcaaatacagaataaaaggagttaaagaggaaaaatattacacacgtaacctgaaagcacaactgaaaaatattaaactgttatgaaaatctaaaaacataattaactccctgcaattttcttctctgattgcagcttatttgtctggaaatgtgtacatacacctcactgagagatgctgagatgactacagaaattaactttgagaccagaattacagagaagaaaaaccaaaacccaaccctgcatggtcaagtggtgctaacccaagactgtaacagggagaaatgcccagaatcatcaaaatagtgaaagactgatctgttcaaaatatttgctatatgcactgggtataatccgtaatccatacactgccagataatgccatttcaaggaaggatcgaatacttgatggtaaaggccaagtccccctgtattgggaagtgtgtgatttcggcagacctgctgggaaaatttagggtagagcactctttacagaagaactcanaaacccaatttggataattttcattatctttttagcaaaatggtttcttaatgtttatattttattttcaaggttcattgtttaatgaaatattttattcttgcatttccataaggaaagggaaagtcatgatcatcctaaaggatcacagtttttaaaaggcaaacattttccctaaggaaacagacacaagctttcctagagaatatgatgttttttaggcattaataaggtccttttttataaaggacacttttctcctagtagttttgaattcaggaacagatccaaagttagcagtatatggctgctacatttccattttcattttcgagccatcagtttatgttcagatgccatctctgtaatcgcacatttaaaacataactgtagcctcactaatggaaaagtagtatgatgaacaatcattcccaatggtgtacaatgtaagggttttagggagcaacagtatttaactggaagaaagaattgcatatttaatgtagtctaatatatacacatttgtttaacatgtaaacaaaagtgttaaattcacatatacaacattatacaatttaatcactcttggaataaaatttttatagccttttttctattgggaaaatttgtttagatgtgtgccactccataggtttatttccaaaatgaatgagcccaactccatttgtaaaaacttgtcagttagaattcctttttttagtggattagggctgaattcttagatccttatttcttttcactttaaatgctgccaaagatcactactcatcattcaggaattcgctgtctagcctatctgtagtttcctgaagattgaaaattatgtagactgctatttaaaaatatatttttctaagtgtgaggtttaagatgctgtattgaccctatgagtttttaatgtgttaattatctttatagcataatagatcgctttaggttcctggaatcccatttggtctgacaggatatatgaagattcttaatacctattttctgtgtctaatacttggttaatactaaaaatagaaatgactaaattacatcacagaaagcataaccagtgattgaacctggtagttttaaagctctaaatagctgtggctgaaggactgattatggggctaagaagcttgaaacgtaagttggtacttgttcatcagtggattctcctaaattaagccaaatgttaaatacatgactattaagtttctactcatgtatttacagtcagtcaataaattaaaggaggaaaaaaatccctgancaacctgcccataaaaagaaaaatactctacatttgagcctgctgcagttttaaattttccctctgggtcaagtttgccagcttttggctacagagaaattatatttccattacagtgcaggtagaaactctgtaaccttaagcatgtaaactacatagaataaaactgtttccactgcatttctgtccttcaaagtggccaacctgattaagtcagccttaatcactgctgctgtcagtttcacgactaaaggtcatattgactaagtagtcatcagctgaccacctcgctgtatcagccagcaacgaggggaaggtgaagaaacatgataggccatatagaatctgccctatgtttacttttttaacccagataattatttttgtgtgcagtatctaagctcctgattgtgtaacctgggacttctggcaccttttgttccattcattttatgtataaaatgcatgccaaagcacactgtgccctctggtacccttgcttccaatcgccaaccatgctcatttccttcctttttttgtggtccctttttgtggtgatcattttaaaccacgtcatccaacaaatgttttatggtcaaccttagcttgttcataagccatagcaactgaaagattaaactcttaaatatgtgtctgggcagtggctattaaatagcaaaaaaacaatcagattttagtattttattatttccttgtaaaatggctgaactaaattaaacccttgtttcccatttgttctataatttatagtgaaactgagaacaaaactatctttataaatgatagctaaaagtatttccagatatttaaacaatttaaaataaatttcttctgcagagatgcaaagcatctcaacactggaatgaacaaatgccttaaattcaatggagtaaacctttagaatgaagaggaactgtcatttcacccaagccgaagacaacagccttatgcacttgtgtgctctgtctttgctgcttctcgtgtttcaagcctttcctgtgggatcagcacagcaaagtgcaacttaccaaatggtttaatgactggttaattctttcttctcccaatggaaaagcaatggcaacacaacagtagactgctggcttgacaatcttaaacgtgagcctttgcacatgtaggtttatcatcatttgagtatacgactaagcaagtcaatgaacttttttttttttttagcagtttaatttggtcctgagaatgttgcagtctttattaccccttttgcattaatccacttttctaaccaccttttaagctttaatttttaacactatacaccaagtctttgaaatcagtgatctgttatttaactctaaagcatttgacacttcttgccttaacagttttaaaaaccacacacaaaaaaactctgtaagtaatacagtaggccaaaagtttcatcctatctatcttgcagtttacctatctgatctgatctctgtaattatagttctgtcatttaaaatatactatttaaatctaatttttacatttcaaaaattatcttcagtagtaactaagtatattttctgtggattctgagaatgttatttttcagaatgtgagaatacatatgtacatttataatcttgtgactttaaagtctgttttcagatacagtatgtaaatacttgtaaaaaaatttgtataattttgtgataatgtagtttcccaaaaaaattatttagaaggcattatgttattagtaaatgagagcactgtatagaactgttcctattttctgcacttgccattccagctgcctccactgtccatacccacctcattcatcctgtcacagaaggcaggaaaactgggaactttaccaaagtagcactcagcctgagaggcctgtataatcatgcttttcaaactaaattcacttaaaaattaaaaagcagaattgaatattttaagcagcctcagtacctttggccaatgctgttttcatggtggattatgaacattatataatctttgggaaaagtgaaagtagtacaatttttagaataatgacaactgcctcactgcatctctccactcacacagcaaccgtgtagccccctaagctgcagtaccatgactaaccatgatgtcaatttcatatgctgatcctcacaacagcagtgcacaaacatgccccaaatattttaacagaatttagctcttccttaagctgtcttttcatagtaaaaacaaaacaaaaacacccaatgttaaaaccacataataaacttacaaacttgaaaaattagacacttcagatagataggcaataaaacttcatattatgaaagcaatatattccaagtttcaaagatttgacaagttctgtagagtatctttcatcagtacatgaaaacttccaaactgcatgatcttctgccaggcaggactgggtgctattcgctggtttgaggtcgaatccatttcaaggcatgtcgtggtgggacattaatggtgggatggtagaatgtgcagtccggtcttgtacattgagtgttaaacctacaatgttttggatgatagaagggacattccatcttcttacaagcagggaagtaacggcagagctgactactggaaggtggtgctggtggtgcaactgggttttggagacagtactggaattcttctactcacatgagtgaagggacaatctggtttagtacactttgcatcatatttacaatttgggtgaacaaacaaacatttttcagcaaatttacaattggggaaggctttgcagggtgagatggggtgatggtaggcacactcatccccatttttacaagcaggccagtacttgcagcgctccaaaagtttttctggtttctgtgccacactcagttcactcatctcagcttgactcatctgcagagtttctgccattactgggtcgatttgcagtcgggataataattgcctctgttgagttccttgatttttttctacagaatctccttttgtttcctcttctttaatggggggacttattctgggggtcctactttgtccctggaccacttctgctagcaattcttcttgagaagttcgagttctgggagcaactggaagtgtctgtttctgtggaactgtagagtagttagttgtttttgttacggattcttgagcttcagatatagccttcaaaatcagattcttgttagcttgtttagaaggtggaagagaaggtctcctttcaggctttgcaggcacagacacactgctggagatgcttcctgttcgagacccgtaatcatcatcttcttcctcctcttctccatcatgattgaatttttttactttaacaactgaacttaccacaggcaactttctcttccgaaagttttcatcctccatactcattttctccgagttgtataaccgcgtatttcgtctaccgctttaacccgtttgtacaccaacgtgcgttataacgcctctgtcgtgaattcaaattttggacgcataataatttccgcgccttttgaatttccacgcgtgttaattgcccccctatgcccatttttactgcagttgtcaaaaatctccaattataggggctaaacgaccaatatgtaagggtcactgtagttttttctgagataagggatttctcctgcacaaacttgaggtcttcgtcaatgagatcatctggttctggcttaaatagcaatcacatcttcagaggtgctggctccctcaaaggtttcactgttgacattagtcggttgcagctccatcatcgtaagtctgtctgacatttgtggtttttgactcctgcgaacttgtagaaactctggaatctctcttgtttcaggtctcgcgctaggaatggcaagtgttggcactgcagcttcatgcctcctctcatctccccgactgaaattgctcttgtttgaaggcacgttactatcaaagatgttggtatcagaagacttcagactagagggttcacgttgtaacagagcgaagtttatctaatacaccatgaagccatacggtgaatcgaattgtgttgttccctagaaacagggacagatcctctgtcatttggtcctgacttttcttgttggccagccatcaccataatgtaatcaggaagttcttcatcaacataagctcctaattcttgtaatttccaccttaatggcaactccggatcttgcggctgatctcggtgccgatctccatggctctgcggcgtgcgggaactcagcactgcgcggcgcttggcttacccggaggctaccgcggactcctaccccgcagccgggacannnnnnn

SEQ ID NO: 25184 - DNA, 3041 bp, Homo sapiens; identical to SEQ ID NO: 24930
  misc_feature 3036, 3037, 3038, 3039, 3040, 3041: n = A,T,C or G

SEQ ID NO: 25185 - DNA, 2114 bp, Homo sapiens
  misc_feature 2113, 2114: n = A,T,C or G
ggagtcgacccacgcgtccgggcgcgcgcgcgctcgcgtcggaggaccggaaaggaggcggggctgcggcggcgcgcgctcccggaacgcgcgcaccgcagacggcgcggatcgcagggagccggtccgccgccggaacgggagcctgggtgtgcgtgtggagtccggactcgtgggagacgatcgcgatgaacacggtgctgtcgcgggcgaactcactgttcgccttctcgctgagcgtgatggcggcgctcaccttcggctgcttcatcaccaccgccttcaaagacaggagcgtcccggtgcggctgcacgtctcgcggatcatgctaaaaaatgtagaagatttcactggacctagagaaagaagtgatctgggatttatcacatttgatataactgctgatctagagaatatatttgattggaatgttaagcagttgtttctttatttatcagcagaatattcaacaaaaaataatgctctgaaccaagttgtcctatgggacaagattgttttgagaggtgataatccgaagctgctgctgaaagatatgaaaacaaaatattttttctttgacgatggaaatggtctcaagggaaacaggaatgtcactttgaccctgtcttggaacgtcgtaccaaatgctggaattctacctcttgtgacaggatcaggacacgtatctgtcccatttccagatacatatgaaataacgaagagttattaaattattctgaatttgaaacaacatatttttatacttaatgaattgtatctcattaatctcttcccttacatcttcatgtattgttggtttgttttttggttttgggttttttttttttttttttggtataagaactaacatcaaaaggcctgtttaaagggaaaggttaatgggctacttaatattatgaacaaaacaaaaaaacaaggctgccacagtggaatattatcttacaagaataagaactacataaaacagatttgtaaaaaatacatatttgaagtattccctgtatttccattattctttatggaatataaagtaagcatgaaaggtagttaaaactttcaggtgcctgtagagtcataataactgtattttatgccttgcattcacgcaaattcacattggatgtgatttaaaagtagacattctctttttcctcttttaggatatgtttgattactggaaaattaatatggttatttgttagaagtctggtttataaaaaagccaaaagtgatggaatttattccatttgtcttaggaaggcccataatacttgtttttcttacatgtgactagcaactttctccacttaaagactaaatacctctttatatgatgtaaattattctaattcattttaaaatcttttaggtcagcaaaatgtgtgtcttcagtgctttctctaaaaacgttcctttatagctttgtacttttttttttagcgttgccattgaaagttaaaatgtttgcatggtttaccctctgagttatgtttcttctagtgagcatgcctgctgtcactaagtgaattatttactactttttgtaggtctatattttaataattattgggataataataattgtggtatgctttccatttacaaaccactcatatactttagtgtatgtcatcctcaataatctaatgaggtaagtagtataagtgttagctctttgcagataagaaactgaaacccagaagtttattgaattgcttcattgttacctagccagcaaggagtggaattaaaacttgaactcagatcttctaattttctgagctcatcctttctcttatacctcagattgcagactaatcaaattttacttaaaaccttcctgatatttttgttaccctggacaccctttctattctagaaaaggtttcccattttatatggaagtgactaattttcaagctgccaacaacttatatcgaggtaatattttattctctgaataaattcatttcacttatattaaaagcataaggaaatctacatgtatgtaaaaataacttagaaattcagtacataatacatgattgaatcatggatcgtattaacaagttttttttttctgcagtggann

SEQ ID NO: 25186 - DNA, 4397 bp, Homo sapiens
  misc_feature 4356, 4363, 4364, 4372, 4373, 4374, 4381, 4392, 4393, 4394,4395, 4396, 4397: n = A,T,C or G
gcatttcctcttcttggcaaaggcaaagtaaagaaataaatcccaaaagtcactcaacaattctcaatatattccattttgagttgctatttaagttgaaatgaaaaattgtacatttatgtgctaaagaacagaacaattattacaatatagacatgtacagattacttgttagatgaatttaaacaaaacaagttagttgaaacttaactgaaaatttttcccctttcagtctttgtggtgggaacgacgggcttttccactgaagggtgaagacatggcagccttattatgtcaagatgaaaaaaaggatcaggttgaaaggtcaagcacagctttccatggtgaaatcttcggtaccagtgtaccagagaatggccaccatccaaaaaagcagtcagatggaatggaagaatacaaaacctttggtctaggacttactaatgttaaaaaaaataggtgacagggaacaggttaagaaaactatgtaaatgtaggaaagatgggaggaaataaagccctgttctggatcccccatcccctccagaataagagcatgttctgcatgtattaatcttttatgctgtttatgaaacaggcaagataagtctgtttttccttctggaaccataagggtaaccagattttcatctacagacaagtggtagtcatttgtgtttatcatgcaacttacttacaaacaccaagatattaattgctgcaacttgatgtcaaatcacattactgggtaatttttaagactatgtacccacaccatacatacatacatatatatatacacatacatacaaacctgtgtgccaagtgacagctatttttttatatacatggtaattcattaaaattgccttagtaatatattagaatatacaaatatgtgtgtataaaataaacatacacacacacacacacccctatgtagtttttaaaacactggcaatgacccactccccttggaaatgcatgtatgaactaccctatgaaatgtaagctgcagaatagataaaacacaggtttccactaataaaagacatctgaacgtcctgaatatagagacagaagttttttgttgttgttgttgttgttttaacatgtttaaccaacagaagttatttacagaaattcatatatccaggcaacacaaaactcctttattcaaaatcactgctatctttgggactaaacacaggctactttctgtttactcctaacaaaataaagcaagcaaatttgagtcaaatattggtgcactttaatactatcacatctttgaaaactcaatttgagttttaccaattaatgtgtctcatgaagagaagacaccagttttaaaatgagccacaaacagtaaagccctatcagtataaaatttgaaaaaaaaaaaaaagatgattgtatttctagattagcaagaaattagttaattctggctgatttctatttctagctaatttggtcattctttgccatagcttactctattcaaataaacatatattcttgcttgcatcctagattggaaattaaaatttttcaaagaacaaagcttcaatattggatactgaagagtatacatgaaagaaaattccttttgaagctattaaaccatttttttcctatgtgaaagttgaggacaatttatataactcactttttgtcatgtaaaaaaggttactcaagttgtactacccacataactgaaaatattggccatttggccttatctgtgagatttgacactaagtttttgttagagattggaaattatactagtccttttaaggggtaaaaaattcaattcaatactgacaaacttttgcttgtagttttactgtacatttatttttaaagaaaaagaaaacaaaagccagacaaacccaagttgtccaggcaaataaactcaaatctttgtcacgtctgatattataatcttctatgtaagttttttaattaaagttatttctatatgccgtgtgttgcttgttattaaatgcgacgtattcatggcacaaagctttcccaagctgaataaaaacaaacattaacaaatttttaccttgtaatgcaggaagaaacccaagcaagctctagtctgtgcttaagtgttagcattcttattttttgaaccttatttctcaaaacttatagtagcctcaagaagtctattgatattggtcatgtttatttcttgccatatttataacacagcaagagtatttacaggaatgaagtagctgacacatatttttagactctgtataattcagaacagttataaatatttagtttatggattgactctgtatcctgtcatcttttcgcctacctgatctttcttggaataaaataatatatccttggggtcaagatccatagttccagaattttctcagccatctggttctgctacagcgtaaaattagactggaaataagacaacgttaagtaaaaagcttcttttacctaacccacctcccaagggctccatttgtaaaagtacagaccagaaattctaccacttcccagatcctttccagggtaccaccctattaagcattaatttcttcattttttaaatggggacaaaaatatctgctttattattaccacttacttatagaggtgatttacagatttaatgagaatatatcaaagtactttataactcacaaaaatataaacttatataatgctgtttactttgtgttgagcatattctaaattctgggactagtactggaaactttacatatatagtgttagctcttaattctcaacagaaccccacagttgctataattacatttaatgtataaatgactttagagaaacacaaaaaagattgggtgatttgttaaaggtccagctagaaaggggcagtcagaattcaacccaatattacctccaaacagaggttttactttttcctttctactcagagctaacacaacagcattatttaacgttcttaagaatggtggggaggaatcactgaataacctgctttgacaaaacaccctgataaaatctatgcttgtattttagaacccctgggtttcacacattgtttttatagttttcacacatcaagtgtaaggtgaaaagtgatagattttaagaaccaagaatatggtatgcaccccacccaaacttataaacaaatcacaataacatgaaatagaaaaaaaccataaagacttcctttgcttttggaaaaacagctgagaaacaacaaaattcttttcagaagtacagacacacattgtgtttttgtagtgtagctaatatgccctccttagaattaagacacttttctgtttgtacctaatgagccgatttactctactttataaaaatcaaatctctcaataaaaacagtatcttactcactaatcaataaattgcatcactaaaaatgtagttatacacaccaatttctgacctcttagaatattctgcacaatcagttttaatcactggaaaataactgctcaaaacagacgctcaagcttggaatggacacaactctttcctaaaggatttgaccgacctggtcttgttcccacaagtttggcgttctgagcagcttctgagcaaacatttcttaatagattgatcacagatctggggtcttcactcctcataatagcactgccagacacaatcatgttagctcctgcctctgcacatttatggacagtgtcaggacctactccaccatcgacctctatatccaaagatgggaactgggtcctcaaccagtgaacctttggcatcatatcttccatgaatttctgccctccaaaccccggttccactgtcataaccaaggccatatctatctgattagcccatggtgccaaatactcaactgaggttcctggtttgatggcaaggccaaccttcatcccattctcccgaatgtctttaatcaaagcccctgggttctcagtagcctcgagatgaaaggtgtactgattggctcctgctacagccattggctttacccactgttctggcttggacaccatcatgtgcatgtcaaagaaagggtcctggcctagctgctttcgaaggctttctaccacagggtgaccaaaggtgatgttgggaacaaaatgcccgtccattacgtccaggtgcagataatcggccccagagtctagcatccggaggcactcggcccctaaattggccaggtcgctgttgaggatggacgggccaatcttgcagcccgacgccataccgctggctcccaaaagcaagttacccacgagtccccggcaaggctggccgaattcccgggtaccaacacaatggcgcgcgtcccgagcnaattgannttcaggtnnnatccaancgggcatccannnnnn

SEQ ID NO: 25187 - DNA, 217 bp, Homo sapiens
  misc_feature 1, 2, 210, 211, 212, 213, 214, 215, 216, 217: n = A,T,C or G
nncctccctcaaaacatccgtatattggcctgggcccctgtaaaaccaaccttaagggctaggttaagctgccttgagcggacttaccgttattttttccctcgggctgattaaaatattgaaaccatggattatgcacctaaaaagtttgttggcacccatgatttcaggaacttgggtaaaagggatgtacccaacggggtgattaannnnnnnn

SEQ ID NO: 25188 - DNA, 1022 bp, Homo sapiens; identical to SEQ ID NO: 23803

SEQ ID NO: 25189 - DNA, 746 bp, Homo sapiens
  misc_feature 745, 746: n = A,T,C or G
ttagggagtcgacccacgcgtccggcccatgagatttgagtcaggttgtaagtgaaatcacttacacttttggatagaatttatactcctgctcttataaatcagtggtagacttaccattttttaaagttttcttgcatttttttgtttttttattgccacagctccctattctttcttgcctgcctccacccccctgttcaggaaaaaaaaaaattgagccttaaagtgacagctgattttttaattgctgaattttgtgaaattttactttttccaagtgtttccaactttaaaaagagaagtgaagacaaataggttggaatggtgaagacaaatggattggaatttcacaggctgtgaataattccttaggatctggcaaaccgtgaagtcttatttgaagaccttatctcctgagagttcttttggagtaggaaaaagaaccctatttgaaatagaccgtttttctcttgtttttaatctgtttaatatttctgatttttaagcagctttcaaaacaagtgtggtggaaaaaaagaaatagtagtaggaagatgtttagggcagcagaactctgggtctaaataagtacatgttcccacttgttgccgatttttgagagtactagggccatctttctcaattttgtatcattgtgtgcatgtctatctcaaagatgccattttgttaaaatgcctattcctttattaccttggaaactgactcagcctcatgtggtccnn

SEQ ID NO: 25190 - DNA, 1021 bp, Homo sapiens
  misc_feature 1, 2, 3, 1019, 1020, 1021: n = A,T,C or G
nnncggaaagggaactccctgaccccttgcgcttcccaggtgaggcaatgcctcgccctgcttcggctcgcgcacggtgcgcgcacccactggcctgcgcccactgtctggcactccctagtgagatgaacccggtacctcagatggaaatgcagaaatcacccctcttctgcgtcgctcacgctgggagctgtagaccagagctgttcctattcggccatcttggctcctccagaataaacctattttttgaggaaatataacttttgaaacaatgatggaaattcttcgagataaaccaagtggcattaatatggagggagaattcctgaccactgcaagcatggtttctattttacctcaagactccagccttccttgcattcacttctttacagggactcctgatcctgagagatctgtttttaagcctttcatatttgtgccacatatttcacaactattggataccagttcaccaacatttgaacttgaagatctagttaaaaagaaatcacattttaagcctgacagaagacacccactctaccaaaaacatcaacaggcattggaagtagtaaataataatgaggaaaaagccaaaataatgttggacaacatgaggaaactggagaaagaactattcagagagatggaatcaatccttcaaaacaagcatcttgatgtggagaaaattgttaatctctttcctcagtgtacaacaagatgacaattcacatttatcagtcaaatcttatcagtcaaagttagtccttagtgatcatatggtcagctaatattagttcttaggtgattccagggtcagtaatcttccaaagtcagaatctatcaccttggtaaattttttaaaactaattgggcagatctgattatctgggtaggatcccagggggtctcggaaattaactacgtttgggtggtgatagaagaaaccgttgggtgggtcgctcgcggacacggggtccggggggcggcattttgccacattgcgcaaccgnnn

SEQ ID NO: 25191 - DNA, 1698 bp, Homo sapiens; identical to SEQ ID NO: 24380
  misc_feature 1, 2, 1698: n = A,T,C or G

SEQ ID NO: 25192 - DNA, 1215 bp, Homo sapiens
  misc_feature 1, 2, 3, 4, 5, 1214, 1215: n = A,T,C or G
nnnnncccgcgcccgctccctcgtttgtgcgcccgtcgcaggtcgcaggcctctttgtcagctggagttgcgcgggctgacgcgccactatgtagcgggtttcgggcgggccacgcgtgcgggacaggaacccaaccccagccgaccttgagctccaggagttcgtctcttacgtctgcggaagtgcagctgcctcagttcttagcgcaggttgacaactacaggcacaagccattgaagctggaatgtcctgttgctggtatttcaattgacttaagccaactatcccttcagttacaataggaaagtgcctctaataaggccaaatatgcgtactaacttgtagcaaccacgtgtccgtgcagtgccacaggagctagagcagtgacaatgctggtggcaacagggcagtgtagcaggtgcttcatgttcaccttttcaaccttttcatttaattgtcacaactcggaggtggattctgttagggacaggctgccccaggaccactccgcccccgctaactcaatgcagctgacccttaccctgaatactctgcagctgcattcctgaaccgttatctaggcgctatagcaaggtcaccagacttgctacaccgaagccctctgggtggcacgggggaggtcatgagaaacgtggattacacccccttgtaaattcctattttcacaagataatatattgtaagccggtcatgagattatatgtggtaaagttaattgactaacaaccccagggtctctctcccccatataaacccctcattttgtaagctcagggctgccacctccgactggtggagaagcctggcaggttaataaacttacttggcctgaaaaaaaacaaaaacacggcacggggacacaacccaccagcgcgcgcaccaaagcgcgacacgaacgtgacgaggcacaacagggacagacaccactccggcccaccgtgcaaccccacggacacccatcacaggagcaccacaacaaccgcacaccccagcgacacgtaaccacacacccagacacacgccaacacacaccacaccccccgacgacccaccccccccacacacccacccacccacacccaacgccaagcccacaccaacgcccgcccacacacacccgaccacgcaccagcacaccatcagcccaacacacccaccaagccgaccgcaaccaacacaccacggaccgcann

SEQ ID NO: 25193 - DNA, 1093 bp, Homo sapiens
  misc_feature 1083, 1084, 1085, 1086, 1087, 1088, 1089, 1090, 1091, 1092,1093: n = A,T,C or G
caatctgggaagcacaggaataagtagacactttgaaaatggatttgaatgttctcatcccttttgcagcttttctttttggctctctcatgtccttggcttgctcctctattctacctctctttctccagcaataatatgcaaatgaagacatgtatccataagaaggagtgctcttcatcaactaatagagcacctaccacagtgtcatacctggtagaggtgagcaattcatattcaaaggttgcaaagtgtttgtaatatattcatgaggctggaagtaagaagaattaaaaatttgtcctaattacaatgagaaccattctaggtagtgatcttggagcacacatgaataactttctgaaggtgcaaccaaatccatttttatttctgcctggcttggtcacctctgtaaaggtttaacttagtgttgtcaagtaacagttactgaaagagctgagaaaaagaacaatgaacagcaacgatcttgactgtgcaactcagacattcctgcagaaaagacatatgttgctttacaagaaggccaaagaactatggggccttcccagcatttgactgttcattgcatagaatgaattaaatatccagttacttgaatgggtataacgcatgaatatttgtgtgtctgtgtgtgtgtctgagttgtgtgattttattaggggcatctgccaattctctcactgtggttccttctctgactttgcctgttcatcatctaaggaggctagatccttcgctgacttcaccattcctcaaacctgtaagtttctcacttcttccaaattggctttggctctttcttcaacctttccattcaagagcaatctttgctaaggagtaagtgaatgtgaagaggtccactacaacactcctacaggatatagggtgggtggctggtgaaacagcagtctggcctggggcgcgaagggggaataagccacaacctcagggcgaacgaggggaccaggggggggaggagaaccgcacggccaccgggggcgagtccccacgtggagaagaagtacccctggagagacaaagggggcgaaaaccgccaggtgnnnnnnnnnnn

SEQ ID NO: 25194 - DNA, 505 bp, Homo sapiens; identical to SEQ ID NO: 24561
  misc_feature 502, 503, 504, 505: n = A,T,C or G

SEQ ID NO: 25195 - DNA, 3305 bp, Homo sapiens
  misc_feature 1, 2, 3, 4, 5, 3114, 3235, 3281, 3299, 3300, 3301, 3302,3303, 3304, 3305: n = A,T,C or G
nnnnncaaattggccctttggcctctggagcaaattcaaatgtaactcttccccaatcccccttctcttcttccagattaattaaaagaagaatgaactataatccttgaagataactgggcaattttttaagtcggaggctgttcttactggtgtgaggatttacacacgtcttcagtttttcagcacagaccagcagaccatcatttttagaggaaatactccctctgccctcctttttggtttccttggtggtaaagattaaatttggttgcatcattttgacttgtgtttgagtctaggttttatggcacaaggaatggcataaacttttcatgtgttttggttaaaacaaaccagaccattgcattgaccctggacatctttaattgagaaattggtaactttattttaatatgtatatctgaagaattcaagaaaacaaaggcatcctcagaggtgtgcctcttttctttattattagaggcaaaacgaacaattttataggatttgtagtgaaattataccagattataaggagaaccaaaactaagtcgcaaaatttattaatttaaggggctctcgctttgaaagtttgagagtaagttacgataggcatttgtatccattcattactttcctcttttcaaataagcaactaaatagaaatgctaatctcagacttaattatttaacagaagagtgtaccatggaaaacctccagacaaatttctccttggttcagggctcaactaaaaaactgaatgggatgggagatgatggcagccccccagcgaaaaaaatgataacggacattcatgtaaatggaaaaacgataaacaaggtgccaacagttaagaaggaacacttggatgactatggagaagcaccagtggaaactgatggagagcatgttaagcgaacctgtacttctgttcctgaaactttgcatttaaatcccagtttgaaacacacattggcacaattccatttaagtagtcagagctcgctgggtggaccagcagcattttctgctcggcattcccaagaaagcatgtcgcctactgtatttctgcctcttccatcacctcaggttcttcctggcccattgctcatcccttcagatagctccacagaactcactcagactgtgttggaaggggaatctatttcttgttttcaagttggaggagaaaagagactctgtttgccccaagtcttaaattctgttctccgagaatttacactccagcaaataaatacagtgtgtgatgaactgtacatatattgttcaaggtgtacttcagaccagcttcatatcttaaaggtactgggcatacttccattcaatgccccatcctgtgggctgattacattaactgatgcacaaagattatgtaatgctttattgcggccacgaacttttcctcaaaatggtagcgtacttcctgctaaaagctcattggcccagttaaaggaaactggcagtgcctttgaagtggagcatgaatgcctaggcaaatgtcagggtttatttgcaccccagttttatgttcagcctgatgctccgtgtattcaatgtctggagtgttgtggaatgtttgcaccccagacgtttgtgatgcattctcacagatcacctgacaaaagaacttgccactggggctttgaatcagctaaatggcattgctatcttcatgtgaaccaaaaatacttaggaacacctgaagaaaagaaactgaagataattttagaagaaatgaaggagaagtttagcatgagaagtggaaagagaaatcaatccaagacagatgcaccatcaggaatggaattacagtcatggtatcctgttataaagcaggaaggtgaccatgtttctcagacacattcatttttacaccccagctactacttatacatgtgtgataaagtggttgccccaaatgtgtcacttacttctgctgtatcccagtctaaagagctcacaaagacagaggcaagtaagtccatatcaagacagtcagagaaggctcacagtagtggtaaacttcaaaaaacagtgtcttatccagatgtctcacttgaggaacaggagaaaatggatttaaaaacaagtagagaattatgtagccgtttagatgcatcaatctcaaataattctacaagtaaaaggaaatctgagtctgccacttgcaacttagtcagagacataaacaaagtgggaattggccttgttgctgccgcttcatctccgcttcttgtgaaagatgtcatttgtgaggatgataagggaaaaatcatggaagaagtaatgagaacttatttaaaacaacaggaaaaactaaacttgattttgcaaaagaagcaacaacttcagatggaagtaaaaatgttgagtagttcaaaatctatgaaggaactcactgaagaacagcagaatttacagaaagagcttgaatctttgcagaatgaacatgctcaaagaatggaagaattttatgttgaacagaaagacttagagaaaaaattggagcagataatgaagcaaaaatgtacctgtgactcaaatttagaaaaagacaaagaggctgaatatgcaggacagttggcagaactgaggcagagattggaccatgctgaggccgataggcaagaactccaagatgaactcagacaggaacgggaagcaagacagaagttagagatgatgataaaagagctaaagctgcaaattctgaaatcatcaaagactgctaaagaatagaaactgttaaagagattcatctgtgtattactgacaaggttttttttgtttgttgcttgctttggtaattgaattctgaagaatttatctgcatgacgataactaggcattctatccatttgtagatcagagaaagtgaagagattatatattagtacttaaatttttacattttccaaatgaatgaaaatgtatgtttctttgtacttttttaaaaaaatcagcttagtaacaatactatatggtttcaactagtaggtaatctgcttatatttctaatgcaaacttaacaattgtgtactttttaaaagctgcgatatgtgatggaaaatagctgtggtcaattttgntatccatatttcagactcaattttagatacaatggtggctttatattttaagtatatagagctactcaaggagttgaatctcccttttctcattaacacaatttttctaagttgatatggngtactcattacatacaccaaatttacttttactttggtcagattgngggatgaatttcaccagnnnnnnn

SEQ ID NO: 25196 - DNA, 2600 bp, Homo sapiens
  misc_feature 1, 2600: n = A,T,C or G
ntatagggagtcgacccacgcgtccggcgcggggccgcgttggcgcgcacgcgcctgagcgtgcgcccggtggggccggccgggactcgccgctcgcacgcccttgggccgcggccgggcgcccgctcttccttccgcttgcgctgtgagctgaggcggtgtatgtgcggcaataacatgtcaaccccgctgcccgccatcgtgcccgccgcccggaaggccaccgctgcggtgattttcctgcatggattgggagatactgggcacggatgggcagaagcctttgcaggtatcagaagttcacatatcaaatatatctgcccgcatgcgcctgttaggcctgttacattaaatatgaacgtggctatgccttcatggtttgatattattgggctttcaccagattcacaggaggatgaatctgggattaaacaggcagcagaaaatataaaagctttgattgatcaagaagtgaagaatggcattccttctaacagaattattttgggagggttttctcagggaggagctttatctttatatactgcccttaccacacagcagaaactggcaggtgtcactgcactcagttgctggcttccacttcgggcttcctttccacagggtcctatcggtggtgctaatagagatatttctattctccagtgccacggggattgtgaccctttggttcccctgatgtttggttctcttacggtggaaaaactaaaaacattggtgaatccagccaatgtgacctttaaaacctatgaaggtatgatgcacagttcgtgtcaacaggaaatgatggatgtcaagcaattcattgataaactcctacctccaattgattgacgtcactaagaggccttgtgtagaagtacaccagcatcattgtagtagagtgtaaaccttttcccatgcccagtcttcaaatttctaatgttttgcagtgttaaaatgttttgcaaatacatgccaataacacagatcaaataatatctcctcatgagaaatttatgatcttttaagtttctatacatgtattcttataagacgacccaggatctactatattagaatagatgaagcaggtagcttcttttttctcaaatgtaattcagcaaaataatacagtactgccaccagattttttattacatcatttgaaaattagcagtatgcttaatgaaaatttgttcaggtataaatgagcagttaagatataaacaatttatgcatgctgtgacttagtctatggatttattccaaaattgcttagtcaccatgcagtgtctgtatttttatatatgtgttcatatatacataatgattataatacataataagaatgaggtggtattacattattcctaataatagggataatgctgtttattgtcaagaaaaagtaaaatcgttctcttcaattaatggcccttttattttgggaccaggcttttattttccctgatattatttctatttaatactcttttctctcaagaaaaaaaaaaaagtttgttttttctttattgtccttcatagcaggccaagtattgcctctctgcaatagacagctactgtcaatacatgctgtaatttgacattctgggtcacagatataaggtatttaaaatctatttatgctttatagagaaaccagacattaaaacttcatgcactacttatttcgaattactgtaccttatccaaatttacacctagctattaggatcttcaacccaggtaacaggaataattctgtggtttcatttttctgtaaacaactgaaagaataattagatcatattctagtatgttctgaaatatctttaagactgatcttaaaaactaacttctaagatgatttcatcttctcatagtatagagtttactttgtacacgtttgaaaccaactactgtagaagatgaggaatctattgtaattttttgctttattttcatctgccagtggacttatttgaaattttcactttagtcaaattattttttgtattagtttttgatgcagacataaaaatagcaatcattttaaattgtcaaaatttccagattactggtaaaaattatttgaaaacaaacttatgggtaataaaggctagtcagaaccctataccataaagtgtagttaccatacagattaatatgtagcaaaaatgtatgcttgatatttctcaactgtgttaatttttctgctgtattccagctgaccaaaacaatattaagaatgcatctttataaatgggtgctaattgataatggaaataatttagtaatggactatacaggatgttaataatgaagccatatgtttatgtctggatttaaaaattttaaacaatcatttactatgtcatttttctttaccttgaagaacataaactgttatttcacttctacaaatcagcaagatattatttatggcaagaaatattccattgaaatattgtgctgtaacatgggaaagtgtaaatgtttttcatggtttctatcaatgtgaaataaaatttaattctgacttttctgtgaaaaaaaaaaaaaaaaaaaaaaaaaaaaaaaaaaaaagggcggccgcn

SEQ ID NO: 25197 - DNA, 349 bp, Homo sapiens
  misc_feature 346, 347, 348, 349: n = A,T,C or G
actgttttgtccaaaaagagaaggttgaccaaatcgaaatggcggcttagatggaagtgttcctacattactagaagacgccgaaaaagcactaggctgctgcccactgaaaggattagttgggttcatcttctgctccaattattagaaggtaattaagtattatgtgtactttttttttttttttctttttgagatggtctggctctgtcacccaggctggagtgcagtggtgcaatcatagctcaccacagcctcaaactaggggtcacttctaagggatgctgggggttgggcggaaggggtgaggaggtaggattgagtaacttgctgtcactgcttgtannnn

SEQ ID NO: 25198 - DNA, 1012 bp, Homo sapiens
  misc_feature 1, 1009, 1010, 1011, 1012: n = A,T,C or G
ncactggcaacatctgcctcccgggttcaaatgattctcctgcctcagtctcctgagtagctgggattacaggtgcccgccaccacgctcagctaatttttgtatttttagtagagatggggttttaccatgttggccaggctggtcttagactcctgacctcagttgatccacctgcctcagcctctgcattcagtttattcacatatttttggtaactcccatggcagctcctaggatttcagcggtctgtgggccagaaagcaggcaccagggctgacctcaaggccgtatcagagggccaagcagagttcttttggatacctgcttttcatcccacagggccttagagtcagaggtaaggtagcaacagagctagaatggggcaatgcactcttaccctccttctcaacttttatttaagctgtgctaaatgttttcttcaagggaaccagatttagttctttacagaattttccagtgaaataaaacatgttgtaatagctgtgtttgagatgaaataagaggttgtgggtagaggggaggcacctaaaggaaaagaggaaaggtgcctgggctacctatgcagataacctggagtggacttcactgtggactcgtggtactaaggcttggcctggacaggcagtctagggggtatgggaatacacggtgtggttgttcaactatttgcaaaggtcaaccaaatagaccacatgttcgcaaagtatcatctgaggaaattaagtaccttcttagccctctcagtcataaatttgaacaaattttaatacacttccctcatgcccttctatataaaacttaataccattagttccccattcttgacattttatttcagtttttattatatatttatttgaaatatttattaaattatctgacctacagaactaaaaaaaaaaaaaaaaaaaaaaaaaaaaaccccccggggggggaccccaattcccccttagggggggttttttccccccccccccgggcccgnnnn

SEQ ID NO: 25199 - DNA, 504 bp, Homo sapiens; identical to SEQ ID NO: 22504
  misc_feature 1, 2, 3, 4, 5, 503, 504: n = A,T,C or G

SEQ ID NO: 25200 - DNA, 3677 bp, Homo sapiens; identical to SEQ ID NO: 24153

SEQ ID NO: 25201 - DNA, 1458 bp, Homo sapiens; identical to SEQ ID NO: 22244
  misc_feature 1, 1458: n = A,T,C or G

SEQ ID NO: 25202 - DNA, 513 bp, Homo sapiens; identical to SEQ ID NO: 20543

SEQ ID NO: 25203 - DNA, 2551 bp, Homo sapiens; identical to SEQ ID NO: 22616

SEQ ID NO: 25204 - DNA, 748 bp, Homo sapiens
  misc_feature 1, 2: n = A,T,C or G
nnacctagaggatcccgtctgcgagatttaatgtcatttattcttaacatgtggaacatataaagattttatactgaataaatgatattcattaagccagaggaaaaggaggaatttacatcaagtttttttctttttttttttttaaactacattatctggaaatacaaaggtggattctcatcacggaaaaatcttggaagtggggtttcttccttttagtggtatttttttcattttctctttttggacggtacgggtaaccattttctaaatcaatccatatataaccatttccacacctggattcatgaagcaaatggtgatcagctgctctccggaaatcgagcatgactttatacatacagaaacttgcacttctatgagtctgacccgatttacagacaagactttcacttcacacttcgagagcattcaaactgctctcatcacagtccatttctggtcattctggtgacctcccacccttcagatgtgaaagccaggcaggccattagagttactcggggtgaaaaaaagtcttggtggggatatgaggttcttacatttttcttattaggccaagaggctgaaaaggaagacaaaatgttggcattgtccttagaggatgaacaccttctttatggtgacataatccgacaagattttttagacacatataataacctgaccttgaaaaccattatggcattcaggtgggtaactgagttttgccccaatgccaagt

SEQ ID NO: 25205 - DNA, 1710 bp, Homo sapiens; identical to SEQ ID NO: 22925
  misc_feature 1, 2, 3, 4, 1706, 1707, 1708, 1709, 1710: n = A,T,C or G

SEQ ID NO: 25206 - DNA, 781 bp, Homo sapiens
  misc_feature 1, 2, 3, 4, 781: n = A,T,C or G
nnnnactccccccatcctacctgtcgttttgtcaatgcttttggctgccctgaagctggaagtacctgaccactctctcccaggtaacagaagactatgttcagactggagaacactgatcccgctgtggtcccaggcaggtgccaccacacctggctaatttttgtagtttagtagagaagggatttcaccctgttggtcaggctggtctcgaactcctgacctcaggtgatccacccgactcagactcccaaagtgctgggattacaggtgtgagccatcatggccgcctgactctttctgatgcctgagtggctaccttgagtcctgcctggggacccatgcacctgctgttctctttccttcaaggctctactcacaacttcctgttctactctcaaaccttcctgtgacgggctcagtcagatctcagctcacgtatcccctcagagaggacttcccctccctgaccaccctatctgaagtagctcacattcccccactattcatttcggccagttgagtttccttgtagcaattattactgtcaaaaatgatcttatttatttacctgtttattggcttttgacccgttgcctgtcctgttctctgttgtttccccagcatctagaacaataggtgcctgacacaataagtgcttcgtaaatatttattattattattattattttagagacagggtcttgctctgttgccccggctggaatacagtgggatgatcatggctcactgccatctccaactcctgggctcaaacgan

SEQ ID NO: 25207 - DNA, 408 bp, Homo sapiens; identical to SEQ ID NO: 21570
  misc_feature 1: n = A,T,C or G

SEQ ID NO: 25208 - DNA, 822 bp, Homo sapiens
  misc_feature 814, 815, 816, 817, 818, 819, 820, 821, 822: n = A,T,C or G
gccgtgagcggtgtctaccgccgtgcaggccgcgacgtggccgccctggctagtaggctggcggcagcccaggcggcggggctggcggcggcccacagcgtgcgcctggcgcgcggggacctttgtgcgctggccgagcgtctggacatcgtggctggctgccgcctgctgccggacatccgcggcgtgccagggaccgagcctgagaaagacccggggccgcgggcctagccatgattctacttcccaacctgactgcaatttgggggcccaaaatgatggcccctcttaacccaaggcaggggatcttcctcccaactccctggaccaaggtggcatttcctgcacacccctccaggccaagatgatgctcgctctcaactctgtaggccaaggtggcgtctcctcttgactctccagacctaaagtgacacccttcaggcacttcgggcccaattcagcccagtcctggtgctttcagcgccagatgacagcactttgcagataagaacgatatgatgtgtggatttcactacatttggctcctggatgctataaaaggacttggatttctgacttggctcagggactggggttagcagtctctttctgctccttttcacctgtgttttcttccgatcccagctctggtccctcagccgcattcatatttactctcctctcccagcctgatatccctgtccctcatctcaacccgaagccaagatctgagcccccaagatggagaatggggaggagctttttatggcggactgattaaaactcttaagcatttaaaaaaaaaaaaaaagtnnnnnnnnn

SEQ ID NO: 25209 - DNA, 299 bp, Homo sapiens
  misc_feature 295, 296, 297, 298, 299: n = A,T,C or G
acagccaagggtctacggtattagcaaacacttttatgggtgcaagtgaacatatttttcagtaattggaaggatattttttgcaggtgtcttagtttgggttcccacagcagcagacttgagacaggattagattgcaagtagtttatttggaggtgatcccagaaaacacttgtagggagtagagaagtaagacagaagagggaaggaagccaatacaaggggatttcaaaaagttcatggagtcacaaccagttataaacaccactgcactcggaccagcccccgcgtaccnnnnn

SEQ ID NO: 25210 - DNA, 1558 bp, Homo sapiens
  misc_feature 1, 2, 3, 1558: n = A,T,C or G
nnncccaaccatggcgtcctccgcggccggctgcgtggtgatcgttggcagaattaaaactctgtacccattgaacaacagctgctcatttcccccagccccagcccctggcatccacccttctagctttctgtctctatgggtacctcagtggagtcattgggcgactgggccatgctgtttgccagtggaggcttccaggtgaaactctatgacattgagcaacagcagataaggaacgccctggaaaacatcagaaaggagatgaagttgctggagcaggcaggttctctgaaaggctccctgagtgtggaagagcagctgtcactcatcagtggttgtcccaatatccaagaagcagtagagggtgccatgcacattcaggaatgtgttccagaagatctagaactgaagaagaagatttttgctcagttagattccatcattgatgatcgagtgatcttaagcagttccacttcttgtctcatgccttccaagttgtttgctggcttggtccatgtgaagcaatgcatcgtggctcatcctgtgaatccgccatactacatcccgctggttgagctggtcccccacccggagacggcccctacgacagtggacagaacccacgccctgatgaagaagattggacagtgccccatgcgagtccagaaggaggtggccggcttcgttctgaaccgcctgcaatatgcaatcatcagcgaggcctggcggctagtggaggaaggaatcgtgtctcctagtgacctggaccttgtcatgtcagaagggttgggcatgcggtatgcattcattggacccctggaaaccatgcatctcaatgcagaaggtatgttaagctactgcgacagatacagcgaaggcataaaacatgtcctacagacttttggacccattccagagttttccagggccactgctgagaaggttaaccaggacatgtgcatgaaggtccctgatgacccggagcacttagctgccaggaggcagtggagggacgagtgcctcatgagactcgccaagttgaagagtcaagtgcagccccagtgaatttcttgtaatgcagcttccactcctctcattggaggccctatttgggaacactgcaagcccttaatcagccctctgtgacataggtagcagcccacggagatcctaagctggctgtcttgtgtgcagcctgagtggggtggtgcaggccggtagtctgcccgtcactttggatcatagccctgggcctggcggcacagcagcacttgcgttctcggggctgtcgatttcctgccacctgggcagataacctggagatttccaccttttcttttcagcttgattgcatttgactatattttacagccagtgattgtagtttcatgttaatatgtggcaaaatatttttgtaattattttctaatccctttctgagtactctggggccctgcatttatgaggcacctaccttcattttgctaacgcttattctgaataaaagtttttgattccttaaagaaaaaaaaaaaaaaaaaaaagggcggccgcn

SEQ ID NO: 25211 - DNA, 1625 bp, Homo sapiens
gcgtccgcccacgcgtccgggctcggaggaggccaaggtgcaacttccttcggtcgtcccgaatccgggttcatccgacaccagccgcctccaccatgccgccgaagttcgaccccaacgagatcaaagtcggtgcgtgctctggttgtggccggggctgcgggatggagcatccctcggccctgccgcgcgtgcaaagctttccccgtatggggctcttaaagccgctgcctcccagagaccttcccggtgttgcgccgccccggccaagcctcagcctttctgggccttagcttcttcacgtgtaggtggggagggaggactggaccacctgtggcggcttgggagcccgcacgccctaggtatacctgaggtgcaccggaggtgaagtcggtgccacttctgccctggcccccaagatcggccccctgggtctgtctccaaaaaaagttggtgatgacattgccaaggcaacggggtgactggaagggcctgaggattacagtgaaactgaccattcagaacagacaggcccagattgaggtggtgccttctgccctctgcccctgatcatcaaagccctgcaaggaaccaccaagagacagaaagaaaccagaaaaacatttaaacacagtgggaatatcacttttgatgagattgtcaacattgctcgacagatgcgggcaccgatccttagccagagaactctctggaaccattaaagagatcctggggactgcccagtcagtgggctgtaatgttgatggccgccatcctcatgacatcatcgatgacatcaacagtggtgctgtggaatgcccagccagttaagcacaaaggaaaacatttcaataaaggatcatttgacaactggtggaaaaaaaaaaaaaaaaaaaaaacaaacaaacaaaaacacaccaaagcaccacacgcaaccacgtgcaccacagcagcagaacagcacaccaaacaccgtgggcggggcgccagcccacacgaaaccactaaacacccggccgggcggcggggacacccaagaatagacgaacatcgccccagcgtcaccacgagaccccgcgccacacgcggggtgccccccatacaacacccgcgccgggggcaccgcgcgagttcatcaccccagggcggcccgggagacggcggacaaacggcggccgcagtaatccccgccgcgcggggtgacacacaacagagcagcaaacacaaccaacaaacccaaacaacctacaatacgacgaagacacggcccaccaacacgcgagaccaacaacgcagcgcagaagcgcgaggaaacgagcgacgcgcagtagtgaaacagcaccgcgacgcgaacacaacgaagaaccggcacccagccgccacccccggggcgagacgggcgcgaggggccgagagacgaccaccaggccagcgacaggacgcgaacgcccaccgcaccccgggccgcaagcgccaacgcccgcagcgcgccaccgacaccgaaaagacaggcctccgccagacccccacgccacaacgcacgcagagcggggagacagggaacccgaaaccaagccgaacaggagcacgccgcgacgcacaccacgcaccgacaccagcggcta

SEQ ID NO: 25212 - DNA, 1023 bp, Homo sapiens; identical to SEQ ID NO: 22481
  misc_feature 880: n = A,T,C or G

SEQ ID NO: 25213 - DNA, 6860 bp, Homo sapiens; identical to SEQ ID NO: 23433

SEQ ID NO: 25214 - DNA, 1828 bp, Homo sapiens; identical to SEQ ID NO: 23042
  misc_feature 1, 159, 160, 161, 162, 163, 164, 165, 166, 167, 168, 169,170, 171, 172, 173, 174, 175, 176, 177, 178, 179, 180, 181,1814, 1815, 1816, 1817, 1818, 1819, 1820, 1821, 1822, 1823,1824, 1825, 1826, 1827, 1828: n = A,T,C or G

SEQ ID NO: 25215 - DNA, 2929 bp, Homo sapiens; identical to SEQ ID NO: 21129

SEQ ID NO: 25216 - DNA, 2982 bp, Homo sapiens
gaagaatactttcttctttttataagtatcaatcaaatgtagttcagcaatccacccatcaagcgcactaaaaacttttcacgatgccattaacaacttgtggttaccatcaaaagcctacagacctacacactaattatctttaaaacccttattaggctgggcgtgtggctcacgcctgtaatcacagcactttgggggaccaaggcgggcagatcacttgaggtcaggagtttgagcccagcctggccaacatagtgaaacttcatctctgctagaaatacaaaattagcggggcgtggtgacagggtgctctaaccccagctacttgggaggctgaacgcagaaccacttgaacacagccaggaggcagaggttgcagtgagccaagattgcaccctgtactccagcctgagccacagagcaagactccgtctcaaaaaataaataaaaataaaataaaacccttattaaggatttaagaaaatcttaattatataattgccaaagctagtccccgtctggcttaggggcccactagctcctgctttaaagccagtttttttgtttttttctgatgtacttacatttgtgcatcacaatcaagaggttcccagcttggtggaactttcaaagatgaggcagaaaactaaacaggcaattacaatcttacttttcacgctgacaagtggtacggtggctagcccaaactcccctccctgtcccagctacctcccttatagaccattcacgatcacttaggccaggctgccatgtgacctaagagaagacagggagaacacagcatttcttactcctactaacttgcaacatcattctctcaagttgctctcattggaggctcccaactgcttcaagctgcccagtgatatttgtatttctaaagtgggcaggcatggccattccagaaaaagaaacacattcagacttgtgccttttgttacccaaatatatgatattcaaataatttctattttaacaactcataaaaatttaagatcaaataattgcattcttgaaacaattcttaatcatttattttcaacacgtgtactataaagaacctaagaaatcagacaattttaataacccataaacatgttgaatccatttgcagatttaaattttgtaaaaatagctgtcactgcctccatatatcaagtgtactatgtttataatcacatttatgctaccgatactcctcagaaaaaaacagattctgcttggttctagcttcagtattatgaactccaataatgctttgaggacctccaaaggaaaaaaacagattctactaggttctagctgaaatattatcaactccaaattgaagctgaagtattatcaactccaaataatgcttcgaggacctccaaaaaaaagagattctgcttggttgtagctgaagtattatcaactccaaataatgcttggaggacctccacaggcaaactactaatccctttggccatttattgagacagacagagagagagagagagagttttgaagcaacaatgtaccattagtaaagttgctgtgcagaattacctcagtcctattctaagcttacagttcagttgattttattgtcctcacctaagtatatacaattcacatatgggagaaaaacactaaatcaagatggttattttcactgttttgcttaagattcatatttaaatataaatcaagaagttaatccacagtttgagagatacttatattagaaattttaaatgttaaatacataattgtaaatatggtgtatgtactgtttcacatacaatgggtattgatcaaatcagtgtaattagcacacccatcagctcaaatatcatttatttgtagcaagaacattcaatacattaactatagtcaccctactctctctctctctctctctcaataaatggccaaagggattagtacttttacccttggaggtcctcaaagcattatttggagttcataatacttcagctagaacttattccttcaaatttaactctgtacccattaaaagtggttttgtgtgcaattaacagacacatgttctacccatacattgttttccaaaattattgtgtggcttttaaaaaaaaaaaacccacacaacaaattgcaaaaggcactgagataacatctgcttctagatcattgctaggctcgaaaaataaagcttgttctaccaggaatactaagttctaacgtgtcattcctggtagaacaagttagaacttagtatttgccaaagcagaaattatatagtgtcagttatttcaggcaaaccttattcggctctcatccccaactatctgtcagaacaattaaaagagatcaaaacagtccagcataactaggcttcattatataaggccattttgttctaagacactaataaaccaaaataagaaatattaaaatcaaaataaaagatattatttgagctattttcatacaaactgttggttccttatatcctcccttctataataaagggcatattttactgcaaagaaaattttactttatatatatcactagccataaatttttgaatgtcattaattacatgttgtctagtaccattaaccaaatagcgtaactattttatgtccacatttcacttctgtatttacaaacatatcagtaaagagttaacaatgagatgcgatcaaacatccatattatctgttttgtagacagcaatgtagatgattttgtaatcacctttcatcggagtgaccttatataaaaaataagtcaataatttagaggttctaagtctccaaaggagattttcaaatgtaaatatagaaatggttatagataatgagatttttaggaaacctctgccatgtctgcatcctgttaactgttatatcatcttttcttccagctgcgttcctttgcctgcacaggggtcaagatgagtttgcctgacttcttgatgtctga

SEQ ID NO: 25217 - DNA, 4009 bp, Homo sapiens; identical to SEQ ID NO: 24918
  misc_feature 1, 4004, 4005, 4006, 4007, 4008, 4009: n = A,T,C or G

SEQ ID NO: 25218 - DNA, 636 bp, Homo sapiens
acatgcatagctcttagcttctgtgtaagaagttgtgagctccttctggaaacatttgcagttacattaagtaaagtgtaaatgcacatgaatggcagcttatagagaaccaccttgtaaccagtatacaggtacaactacagctcttcagaaattggaaggttttgctagccggttatttcatagacactctaaaggtactgcacatgatcagaaaacagctctggaaaatgacagccttcatttctctgaacatactgccttatgggacagatcaatgaaagagtttctagccaaagccaaagaagactttttgaaaaaatgggagaatccaactcagaataatgccggacttgaagattttgaaaggaaaaaaacccttggaacaggttcatttggaagagtcatgttggtaaaacacaaagccactgaacagtattatgccatgaagatcttagataagcagaaggttgttaaactgaagcaaatagagcatactttgaatgagtttaaggataattctaatttatacatggttatggaatatgtccctgggggtgaaatgttttcacatctaagaagattggaaggtcagtgagccccatgcacgttctatgcagctcagatagtgctaca

SEQ ID NO: 25219 - DNA, 2277 bp, Homo sapiens
  misc_feature 1, 2268, 2269, 2270, 2271, 2272, 2273, 2274, 2275, 2276,2277: n = A,T,C or G
ncgtccggtcaaaaaaaaaactttggacaaattaaaatgagcaaagaacaatttgtgaaatgtgcccctctcccaaccagaacaggttcaaagagactccagtgctgccacatgatcaaagaattatggacaaaaaaagcaaataaattacaggaaaagaaaatgaggtacagaaacagctggattggttacagcttggtgtttaccttacttgaacaaggttcgaacagttggctgcctttgatgggctgcaacacagtgattggtataagagtaggttacagcctgtttacacatgcagttaggttacaattcactgtgtgttgagaaacctttaggccaaacttaaaatttgtaaggaggcagctttaggcttaacttgatttaaaagttattagatgttccatcagtcgtttcgccaataggtaataggtttttttggttttgttttctgtgctattaaaatagtatataaaacttgtcatcattgattctgatttatcatgttacagttcagtctctaattgaactgagcctatttttttccgtaaaatccaacctattcatccatttatacagattttttaaaatctaaatattttatatcaaattgctaaaaatgtttagtcacattctttttctattgctgcccatatattttctgccatcattttcagctgctaaatagtatctagtcctagatatctggttacccattatcaggaactcttcgtgaaatgctttagtgaccttgtttaagtcagtaataaagttgagatttataatcatattctattaccaaaaaaatacaggtaatagattttcaaatgtcagcccatgtctactcctttatttcccagtgtggcagaatttttgaacagtgaaaatatttctgtctgaggaagtttggactatgtggtgtgagatccgtagacattggactaatgtcattaacatattttaatatttaaatttcttattaaaaaatagataatgcagtagttactttttgaaggacgaccgaagcaggatatttccctgaccccttcatgggacccacgtcagaggtgtttactcagcctgctgcccacaactcctcacaggagggagcgcacaagtgaacgagggtgaggactggagagcaccagcactggaacaacccggccacttcggcgctactgggatcaaactccatcacttggacacactgtgttccacccctcgtgggagggagcatgcaggtgagaggatgcaggagtcagggtgagcacttttgggctccagcaggaccaaactcttgttgcagggccctgcagccagttgacttgaggggccggcctgttgactcccaaagccccagaggacatgcttacagtgcttcttttagctctaccatccgtaggttggcttaagtgtaaacagctcagtgggccctttgcctttttgcgtgaggcagctgccctaggcaagagtaaagggccagtgtcacagccttctgtatctgcactcatgactcctgagctcttgtcctgcattcagggaaaatgaggttacacaaaagaattcacagatggtaaatgcggggtattttattcccagtgaaagtggctctcagcaggaaggagagcagaaaagggatgggctgggtaggtaaccttcccctgaagtcctgccatctctggctggatttttctccaaagttacaccatcaaaatgtccctctgaaatcaagccacttctctctgacatccagccgtagtccctcacgtccagttgcttctcctctctgctggctgagtctgtggtctttatagcacaggatggcgggcagggtgggccatgggtaatttaggaaaaagcaacatttgagcagacaaaagggagagaagttctctactttgggctgcggtttcaggctttttggcttgagggtggggttttgtcagggaccctcccttttctgcctaaaatttctctgcctcctgcctctatcactgtatcactagtttgaagtaaacccatctggaattactgattttaacaaatcacacagaatttcaagcacctttctatgcaaatgacttgtgaagacatagagtatagtatgccgttaacaaacagcccagcagtgtgccttgcaccttgtaggtgtacaaaatattaagtcaattttataattgaaggaggtaattttaaaatgctacatccatgttgtgtaattttattcattggtcattttaaataaaaacaaaagccagaataaaacannnnnnnnnn

SEQ ID NO: 25220 - DNA, 1715 bp, Homo sapiens; identical to SEQ ID NO: 23747

SEQ ID NO: 25221 - DNA, 1749 bp, Homo sapiens
  misc_feature 1: n = A,T,C or G
nacgaggctgattccctcggctggtgccagtgcctgctcctgccatggggcccgcggggagcctgctgggcagcggacagatgcagatcaccctgtggggaagtctggctgctgtcgccattttcttcgtcatcaccttcctcatcttcctgtgctctagttgtgacagggaaaagaagccgcgacagcatagtggggaccatgagaacctgatgaacgtgccttcagacaaggagatgttcagccgttcagttactagcctggcaacagatgctcctgccagcagtgagcagaatggggcactcaccaatggggacattctttcagaggacagtactctgacctgcatgcagcattacgaggaagtccagacatcggcctcggatctgctggattcccaggacagcacagggaaaccaaaatgtcatcagagtcgggagctgcccagaatccctcccgagagcgcagtggataccatgctcacggcgagaagtgtggacggggaccaggggctggggatggaagggccctatgaagtgctcaaggacagctcctcccaagaaaacatggtggaggactgcttgtatgaaactgtgaaagagatcaaggaggtggctgcagctgcacacctggagaaaggccacagtggcaaggcaaaatctacttctgcctcgaaagagctcccagggccccagactgaaggcaaagctgagtttgctgaatatgcctcggtggacagaaacaaaaaatgtcgccaaagtgttaatgtagagagtatccttggaaattcatgtgatccagaagaggaggccccaccacctgtccctgttaagcttctggacgagaatgaaaaccttcaggagaaggaagggggagaggcggaagagagtgccacagacacgaccagtgaaactaacaagagatttagctcattgtcatacaagtctcgggaagaagaccccactctcacagaagaagagatctcagctatgtactcatcagtaaataaacctggacagttagtgaataaatcggggcagtcgcttacagttccggagtccacctacacctccattcaaggggacccacagaggtcaccctcctcctgtaatgatctctatgctactgttaaagacttcgaaaaaactccaaacagcacacttccaccagcagggaggcccagcgaggagccagagcctgattatgaagcgatacagactctcaacagagaggaagaaaaggccaccctggggaccaatggccaccacggtctcgtcccaaaggagaacgactacgagagcataagtgacttgcagcaaggcagagatattaccaggctctagcaacccagaagacaaccctgggtagcctgtgatcagtgtctggagacgtttcttctgtggaagagaagaagtgacacaaacctatacttcatatgctgctttagtcacctgaagatggttggagaggccctgtcgactgttctcccagttgttcagtttctgagacagagaggtacggactaggctgcacctgagtgtgcccctgcctgccagatggacaggtacacccaagcacatctccctgctgcaccctcaccacccacaaaagatcccagctgtcagtggtctcatctcattagtgaggaaagccaagctgtatggaaaagctgcactcaccaaggaccacaatgcccccggcttaaagtactgccattcagaaagcaggtttttcttcctctctttcctt

SEQ ID NO: 25222 - DNA, 460 bp, Homo sapiens
caacatgagagctgcacccctcctcctggccagggcagcaagccttagccttggcttcttgtttctgctttttttctggctagaccgaagtgtactagccaaggagttgaagtttgtgactttggtaagtagacttttctcattgctttttccttaaaactgtgttcccagcaaagtctgataaggcaagcgtcaggtttcatcttatccttggattgtttcccagagaccaggctctgttcaaactcagaaagtgaataatcaagttttgcaagttcctcttaatgaagacctaacgtgtcctaacaaaaatattttttggtcgctgtttttttaggggttgctttttatttgcttttgctgatgttatttatttacttactttacaactgccttgaattcagattccttttgacagccacaccagtccagaagaaaccacagctggcgctgtttatgt

SEQ ID NO: 25223 - DNA, 8328 bp, Homo sapiens
tttttttttttttttttttttaccatgaaaaaaatatattttatgattttttaatacttagacattacattccgtatcaaaatttaccaacatgctattctataaattcatgtctttttaccatagtttgattttttttgtttcatgctaaaaagcccactctcataattacctttagtatacattacctggaatataaaaatttcattaaatgttggcaaactcttccccatgacatgtaaaacaattagaaatgtctagttataaattttcttaagctaatgagcaaaagaaaagccccaatacactggcattttcacttaacagtggctcatagttacaatgatcagaaataaacctacttgctactgtgctatatagggcagttttgccaagtgcccacctttaagagctaggtcaatttctaagaaaactgtatggaaacattcagttgttaacaaaaatttaatattaaaattactcagttatttaaattattgttaatttaggaaaaagaaaacccatgtattaatcacccataaaataacttttattttaataaataacagtgggctcaccaaagggcagggattttaacgtgtcaggttttatgcttattggtagtaagtcttaaacaggtgaaatgaactattcaataaaacccaaaaggccctaaaaataaaatactttaataataaaaattaaaaagaaatttccaaaagaaaatagttcactccttgaccatgcttatttattcagagtaccagcgatttcagtaagtgcttcatttttcctgcaaatctgatgttgcacagggaatgtacacattttcataccatcacaatatcatcaatatctcaggccaataatattgtgaatgcaactgttttataacaaacacaaaataaaaaaaaacaatgttactatttacggcaaacagaaacaaaagtaaatattgcaaagatgttttcttatgtttctactactgattttagttggactttaaatgaaggtcatcaactctcctggaataacctctacctctcgctgtgaatccacagtataaatatggtgaataaagctaaactgtaagagctaactatatactgaataaccaaaataattataactaatactgttcttgaagaccaatctaatgaaaaaagtatcattagatatggtgagaaatacagacaaatctgtacaatctaacatctataaacagtaaaatcaaaacatccaacttccttatagaaagtgttttatctatgtaattataaatgttaaggactcttgtattttataaacacaagatgggctcactttgatgatatcaattttaagatttataaaaatgtttaaaaaaatctttccacaaaactttatacagtttaaagctatacaccaatctataaatctcagaaaatggaaaacaaaacaaaacaaaaaatctttataagatcacatgtataaaacaagaaatgaaatgtgattttatttaaggcaatactgggctacttcacaaatcaccacctcaaatatttacactgctccacactactagttttctatcacattcacaaaggatttttttttaataccaaatgtttaaaatcttcaatgtagtaaattctttattcacatttccattgtatttcatggactcatagtaactatatccaattagaagcaatgaaaaaaaaaaactgtagctataggaaactgctagagaatctgctttaatttcacatgaataccaccccaaaatcctggatggcaaatttacaaagcagagcaaagtgttgatataatgtgcctattttgtgaaaagtaatcttgatatcatcttgtaaataaatgtttcatgtaaaaatcaatgaactatggcagagtttctggttttagttcaaaaagttcttaatttaaaacaataaaagaacaatttaaaaaacttgatcgcttagttaaaaattaaaattccaaatataaatgtgtcatttaatagtttagacttacagactgctggtggcagcacatgatttacaataataaatatatacaaaaaaggtatctacaaataaagagtactgttatacatgagcagtgacctggtgaaacataccaatcacacagataattgtttagttcatgaaaagggcaactgggtgatagaaatttgaggtttagctcactatttacaataactgaagtactgattctgttcctcaagtcccatagggataaaaaaaagttttacatgacaaatgtcatgttttttttttcttttttgtttttggccaggttaattcatgtcaacaacaaaaaaatataatgaaagtttcacaattctagcatgcttgatggcttcctatttaaaataaaatggtaaatgatgtatttatactacattaattatcagtactgacctctgcctgtggctttacctatactgatatctttcataacagacatatctggatcatttgaatgtacttcaagttttttcagactgacggtaggtttcatttcctgaagttgctttaagacaagctcagtgcaatctttaagattcttgtctaaaacaatttttacattatcactgcactgaagctgtgatggattggcaaactgtacaaacgtttcgctttctttacaaggacatacatgatttccactagtcacagcagtcttatcaatattttttcttgaatttgaatgggatccttttttgtttccagtattcggatggtctttgtcagtatttttcttctgcttcactgcagactcctcaagaaacttcagaaatgatacttcaaatcccattggcttaaaagagctccagtcaaaagatgcaggatgctcctcaatggtttgaatggcaacagcagtttcttcttctttacgcacgctacttaactcagctgctgatgctggttcagctttttcaactttcctttttttattttgtgagacatttttttccttattaactctcttcaaattacttgctttttgtctttctgactggcagaggttatcttcctgaaaatcattacttacatttgaagaagtattagcttgggtctctacacttgtgctatcttcatttattaattttgtaataaacaattctgttagttcatccatttcatctttttcatttttttcaacttccttttgtgaaactgtagctgttgttcttgaattatcattgctctctgatacacacgtgtcagaatctttcacatcattcttagcaccttcttgctcagacgtttcctttacttgtgagttgcaacaccgtttgaatacaataagaagatttcggtgttgtgatgtaaatgccttagataatttatggcacttataatgtctaattatattgctttcacttgtaacaactgaagtacatccctttatcatacatggatactgggttacaaatctgcttgtacactcagacagggcatcatttctagcctttatagaatatacatgcttcccacgtttcagagaataaggcttattttcttcaatctgcacaatctttgcattcttgttttctaaattattttttttctttcgtttggtcttgggcatttttattccttcctttccacatctgctgtgcttcgtcccccgatgtttagactttgatttttcttggtttgccttgcttgacatattttcctggcctggtgttaatcttcttggacgaatcaaatgagccttatgtttgtcattatgcttattaaaaatgtgtcggaggagattcgaccgggttgcatatatacggtcacagccttcacaatcacatttgtatacaccatcttcttctgttttacttgcccttagtccaatcccgtggtctgcctctagatgaacaacatagttcaaatatgtagtaaatgaagatttacactctaactggtcacatggaaacttcccaacatccactgaagcagtcatactttcaatttcttcaggagtcatttcatgaagtttcatgtagtgttgtattaggccagtaattgcttggaaaattcgagaacagtcacttacctgacatcgaaattctttcaaagtttgtttagtttcagtttcttcactttctttaccagcttcactttcctcttcgacctctgctgaaaatgcaggtagatctgatttgtgtacagcctggtaatggagaatcaaattttgctgtatcgtaaaggcagcaaagcatccctggtgaacacatcgataaggtctgtaaggactgtatcttgttggaaactcaagggattgggaaactggcttctttcgttttttctcctccttttcttttttatgcctcctaatcttccgtcctttggtttgtgtgtttgtgagtgcatttgtattacattgttctgaagtaactgtaatcacttgtaaagaactttctgttttgtcaggactttttttttctacaagttgtttttctgggatcactgctacattactgtgggtattttgggtctctgctctcaattctaaagcaggctgagattcctttttattttcctctgtcatagctagctgttttttcacttgtgtacttcgtgaggccggcacattttcactctgagattttcttccataaggccttttaatttttaactttaccatttcttcagttgtaaaatgatgcaccaactgacagtgtgcccggaggttagaatttcttgtaaatgtttttgtacatgtaggtactacacatttaaagggagcaaatttcaattgattcttcttaatttcaagaatcatttctggagtgtattgatgaattttaccatagtgcttaaatagtgcatcctttgtcatagcactgtagttacagccttggttttgacacacaaagggtttattaactttgtcattaaattgaatgtttatcatttcagaaactggctgaataactgtgatatctgcagttgatttaacaggcgtgggagtcagtgtcactgatgtatttatcagtacacattgggatgctggagtggataggtcattttctaattttaatttctgtaagccttctaaaatttcctgtatttgatcctccttatgtgatacttcagactgaggaatgttactttttgttggcatgacacttataaaggaggaaaacggagaagaatcgggtaatttgttattttgcacagtgtttactgaaggaagctgaatgttataatttatttgagcattttgtgaagtttcaccagcaccctgagatccactttttacctcaagtatttgagaattcatagcagttttaataatttcaagagtcttttcaaagttttgtataacattgtcttcagaaatctgcaaatcagaatttattgaagttgtgcatgaattcaaagccatcatttgggaatcaccattttcagtttttaatgttaaaggggctaacactgtatgggactcaagactggttttgaaattctcttttacatcagtcataaataactgattgttaacattatttaatttctgtgttagattttccaccaaactctgaggttcacaagttggaattacatttgaatgaaggttagtagttgggatttcaacactctttgctatgagtcccattgttgttaagtcacttgttaccaagttttgggaagcgttaggtgcaattagtggaggagcaactttctttcttctcttagaagcactgtttccctttttatttaaatgactggatcttgtgttctgaggaccacttataacagaaacacgagaactgttactggtaaaattttgtgatggcccaccagaattaggaaatgaactagagcacaaaccattttcaacagtcttcagtagtaagtcattcgttggaaaaacaggcaagctgctacattcctcaatggaggaagttttggagtttgacgtcctattctggttggtcagcaaggtgtttggatggcatacagtgtgcaacaggggtggtacagttggatttggcatcaccgttgcatttacttgtgatgcatcagagacacaacctgttgaaacatgagaaagcatttcggcaccctcaaatgtactgggaatgccagcagtttccaaagcctgtttaataatttcactaccttcttgactgacactggtattaaagttagtcacaccagatcgaggaaatgtatttggtaaaaatgctggcgagcgattttcagcaagaagctgtagaaatgatggatctttaaaacatgcttctggattgaaggtagattgttgtggctgctgcaaatttactgcatttgtggagagaatcatgctggcaagaagagaaggctgtccattactctgtagaagttcttgagcaatttcggctccatccagtggtttacagtaagatcgcttggataagtgcccacccagtgatctgggattagtaaaagccctgtaacacctgctacagataaatttcccatctctgataattgcaggccatttagcccttttgttgtgcttaggttttctttccttcccatttgggccccgcccacggtcttttttaactttttcaggtgcagactgttgggcattggtgctactgaagttatttgcaacattcacttgtgaaggaaaaactgcattttcaccattacccccctttagaaaggaggaattagtgtttccttcaatctgtgaggaataatgatttgtattattttccagttgggaaaaaacagaattagtcccactatctgctggtgaagggaagagagacattgaactactttctgcaggtaaaggaaggaaaggatctgagccactgtcaatattcaaaggcagaactgttttggttagatcttccatttgtgctggcaaggcagtactaggtaaattttccatttgggaacataacataccaccttgttcatttttatcctgagaagttatatttggatttatgacactttccattgaggacaacaatggagttgacacacttgctaaatgagctggaaaaatgggtggcgagacatgctgcaactgggccgaacaagcaggattcccattggctttggtctgtgatgtaaaaaatggatttgagctgttcaccggtgatggcaaaaaataaacaaactttccattatttggtgtatttaagttgttagctttctgaccttttttacttttgcgctgcattttaaatgcagcatattggtcagggtgtgctgtcttcatgtgtttcccaatactctgtgaagaattataggttcgagtacatccctcgacctggcagctgaatttctgaactggagcttttggaggcactgatggagttcctaatgaattacttaggtcggactgcggtggaacaaatgcaatactttctaatgtcttaagaggtaaattataaagattggatgatgttttaacattatctccacattcaaatttggaagttggtaaattgttttgaaatgctgcctgattttgcacagaaaaggtcatcaagttgttcacttgtctttctaagttttgtggggtaaggtcacctattttgagagtttctgaatttactaaagaattctgagtaacatgggcatcattaaagcaatcttgttcttttctctcctggaaacctggatgacacaaatcattacaagtatcttcaactggcgtatgtaagtctgtgaccagtgcttcaccactgccttccacagttgagttttcttgctttccaaagttatcctcaatcccctgattgagagacaccttaatggacacagctacttcactggattgaagtagaggagtagtagcagggttttccaaaccatttgacaatggtccattagcttgcctgagctcagaggcagaaatctggtcttgtttggtcacagctgattctgctttgcttttatcccaagcatcacttctatctgctagtaagctgttttcaatgttattttctgaaggaagcatagatctttctttctcaatattctctgctgtgttctgattcacttcagaaggctgaatggaatctccagatgaattaagttgggcttcaggaggcagcactttttcaggaggagtactgtgatcatccagatgcttttccagctcaccctgagaacgataaactttaccacaacctgtgaacttacaagtgtacgtattataatgttgtgcttcatgatcatatagtaaataagcttccgaaaaaattcttccacatttaggaaacatacattttgctctaaagacttgatgctgctttcggtgggttaaaagctcggcgtaactattaaaaccagctttacatttcatctg

SEQ ID NO: 25224 - DNA, 1644 bp, Homo sapiens
  misc_feature 1, 1643, 1644: n = A,T,C or G
naagcgcacgatggcgcgtcctccccaggctgcaggtactcctcacttggtatatacccaagctcaacccccaccaatgacctctgctccaccaccaataacccctccccctggacatattattgcccagatgccaccttatatgaatcatcctcctccaggacctcccccacctcaacatggtggtccacctgtaactgcaccccctcctcaccattataatcctaactcattaccccagttcactgaagatcaaggaactctgagccctccatttacacaaccagggggaatgagtcctggtatatggcctgcaccaagagggccaccaccacctccacgattgcagggtccgccttctcaaaccccacttcctggaccacatcatccagatcagacaagatatagaccgtattaccaatgataatagtattttgaatggaagatatgagggggaaaaaaacttatgtgtagtcaatcttttaagctttgactgttttgggaaggaagagtacctcttatcgaggtagtataaaacacatagggtcttgtttcttaaaatggttttaaatcttgaccttaagattgatttcaagtaccatactgtagtacagataagtggctcagttgagcacagctatattttaacatctctttgttcccctagtttagtaaattgacccagaggtgaccatttgtaaaaaatttgaaaaaatttttcattgttttacttcaaaagtattgttttgttaaacccaacgtttagtttttcttgtgatacattttgttaacctgtgtaaaaggattaaatttcaatatggttgtaaaaatgctatttttatgtgaatttaagtgcagccacatactgttttttaaaccatatgttttaccactaatttcccaaagttataataaaatcctgaaagtaaaaatctactagaatttgctgtaaggcagactgttaaatgatagagaattatttcacattttaggcactgaaatgttgaggtttcgaggtatagtaagtatacaatgcacttcacttggatgccttttcatttttaggcagcctcaggagcaccaaaatacattggaattctagtactaagatatatttgttcgtaatgttaaaagacattactaattatttggaaagagatggccaaaataatcaactctacaggcttcaagctggtgggggaatgctgttactcattaatgcttttttactgaatggtcggaatcacatatgcaccacacatactgatcttaagtaacattattttatagaactgtttaaatgggtttaaatggtgtcctttagatgaaatgtgttctgtttgttcattgtcttaaactgaatagggctgaataggctttatgtaattcttcattcatggtagagttgatgctgtgtttaagtgggttcttgtcataggattttcaactacagttgatgccatggcggacttcgataatcttttatgacgggcttttctgttattcccaaaaaaaaaaaaaaaaaatttgggccccccccgaaatttaaaccctttgggcggccaggaataacggttaacttccaagacggcacaggtggttccacaaccggaccgcgaaccagggtgttgtcatcaaccccnn

SEQ ID NO: 25225 - DNA, 1105 bp, Homo sapiens
cccacgcgtccgaaccagagcacggaaaatgaccttcaatggattttgttgacgtcattcagcatactttcattgaataactactcttgaccaaagtgctggttttaggggtaaatacaaagagagatggctcttgctctctcagcctttgaagtattacaggaaagaacttgaacaataattattaagatacataataaagtgctatggtagaggtacgtgccagggattatgggaatagagggagtgggctggttatttagactaatctgactgctgacatgtactgatttaggccttttaaagagtttttcatgaacaaagatgtagaatttatattgttatttgtttaaaacctgtaaggagatttggttagttaaaaaattcccaatatctttgtaatgcagaatgatatggaacctagcaaagctgttccactgaatgcatctaagcaagatggacctatgccaaaaccacacagtgtttcacttaatgataccgaaacaaggaaactaatggaagagtgtaaaagacttcagggagaaatgatgaagctatcagaagaaaatcggcacctgagagatgaaggtttaaggctcagaaaggtagcacattcggataaacctggatcaacctcaactgcatccttcagagataatgtcaccagtcctcttccttcacttcttgttgtaattgcagccattttcattggattctttctagggaaattcatcttgtagagtgaagcatgcagagtgctgtttctttttttttttttttctcttgaccagaaaaagatttgtttacctaccatttcattggtagtatggcccacggcgaccatttttttgtgtgtacagcgtcatataggctttgcctttaatgatctcttacggttagaaaacacaataaaaacaaactgttcggctactggacaggttgtatattaccagatcatcactagcagatgtcagttgcacattgagtcctttatgaaattcataaataaagaattgttctttctttgtggttttaaaaaaaaaaaaaaaaatgccccggccgcggccggaaggggaaaaggccaattccctgccggcggggggaa

SEQ ID NO: 25226 - DNA, 1001 bp, Homo sapiens; identical to SEQ ID NO: 21314
  misc_feature 681, 682, 683, 684, 685, 686, 687, 688, 689, 690, 691, 692,693, 694, 695, 696, 697, 698, 699, 700, 701, 702, 703, 704,705, 706, 707, 708, 709, 710, 711, 712, 713, 714, 715, 716,717, 718: n = A,T,C or G

SEQ ID NO: 25227 - DNA, 2986 bp, Homo sapiens; identical to SEQ ID NO: 24844
  misc_feature 2986: n = A,T,C or G

SEQ ID NO: 25228 - DNA, 2376 bp, Homo sapiens; identical to SEQ ID NO: 21284

SEQ ID NO: 25229 - DNA, 1081 bp, Homo sapiens
atagggagtcgacccacgcgtccgcagaagtcagagttgagagacagaggcaccccggacagagacgtgaagcactgaataaatagatcagaatgactgaaaaagccccagagccacatgtggaggaggatgacgatgatgagctggacagcaagctcaattataagcctccaccacagaagtccctgaaagagctgcaggaaatggacaaagatgatgagagtctaattaagtacaagaaaacgctgctgggagatggtcctgtggtgacagatccgaaagcccccaatgtcgttgtcacccggctcaccctggtttgtgagagtgccccgggaccaatcaccatggaccttactggagatctggaagccctcaaaaaggaaaccattgtgttaaaggaaggttctgaatatagagtcaaaattcacttcaaagtgaacagggatattgtgtcaggcctgaaatacgttcagcacacctacaggactggggtgaaagtggataaagcaacatttatggttggcagctatggacctcggcctgaggagtatgagttcctcactccagttgaggaggctcccaagggcatgctggcccgaggcacgtaccacaacaagtccttcttcaccgacgatgacaagcaagaccacctcagctgggagtggaacctgtcgattaagaaggagtggacagaatgaatgcatccacccctttccccacccttgccacctgggaaggaattctcttcagggcgtgtttcagcaccctgttccctcctccctgttcccacagctgggtccctcttcaacattgccacattttccttatttgatggatcttttccaccctgtgactcaaggtggtcctagaaccagagggttaaaccgggtttcaccaacgtgtcctgtgattctcattaggggcagaatctccaggtttcacctcagtcacagcattaaatttcccggtttaccctattagcgattagggccccacggggcacttccacagggttggccacagcccggatcctgcgcgatcctggggggtggcgccaagtccacccgcggaggtctgggac

SEQ ID NO: 25230 - DNA, 456 bp, Homo sapiens
  misc_feature 455, 456: n = A,T,C or G
acgaaagttacaactataaaacttacagaagaaaacataaaagaaattctttgtgaccaggtttgaagcaaagatgcttaaatttgaaaaaaaaacatgaaatatttaaaaagagcatgataaagtggacttcatcaaaataaaaaaaatactttggctcttcaaaagacattattacataaacaaaaacacaagtcatatactagaagaaaatatatgtaacacacaacagcaagagagtttaattcagaatatacagttttccaactcagtaagaaaataaacaattccattttaaaatgggcaaaacatctgaatagacaatcattaaagaaggtatataaacagtcataaacatttcttcatatgctcaatattattagttattaaacaaaaacccattagaatggctaaaattctagagttcagcaatgtcaagagttattggcaaatgnn

SEQ ID NO: 25231 - DNA, 3265 bp, Homo sapiens
  misc_feature 1, 2, 3, 4, 5, 3265: n = A,T,C or G
nnnnnctggacatagaaactaggatgattgtcagagagttttctggacaccaaggccaaataaatgacatggcttttagtcctgatggtcgttggttaataagtgctgcgatggattgctctattaggacttgggaccttccttctgggtgccttatagactgctttttgttggactcggctcctctcaatgtttctatgtctcctactggagactttctggcaacttcccatgtggaccaccttggaatttatctatggtccaatatttccctgtattcagttgtttcattacggccacttcctgcagattatgtcccttcaatagtcatgcttcctggtacttgtcaaacccaagatgtagaagtttcagaagaaacagtagaaccaagtgatgaattgatagaatatgattcgccagaacagttgaatgagcaattggtgactctttcacttcttcctgaatcacgatggaaaaaccttcttaaccttgatgttattaagaaaaagaatataccaaaggaaccacccaaagtacccaaatcagcaccatttttcattccaacaattcctggccttgtacccagatatgctgcacctgaacaaaataatgatccccagcagtctaaagtggtaaatcttggagttttggctcaaaaatcagatttctgcttgaaacttgaagaaggactggtaaataataagtatgacactgctctcaaccttctgaaagaatcaggcccatcaggaattgaaacagagctgcgaagcttgtctcctgattgtggtgggtccatagaagttatgcagagcttcttgaaaatgattgggatgatgctggacagaaagcgtgattttgagttagcccaggcataccttgcattgtttctaaagttacaccttaaaatgcttccttcagagccagtactcctagaagaaataacaaatttgtcatcccaggtggaagaaaactggacccatttgcaatcactcttcaatcaaagcatgtgtattttaaattatctcaaaagtgctttgttgtaaaaataaatttgtgactaaacaaagactttcatattaaatgggttcaattgaactcatttcttattttccaagtgtcaatgtgaaaagaaaataaatgctagcactactgactagtcagtatatctccactttaaatgctaaatactttcttgaaataaaatcgcacctcccggccaggcatgatggataatgcctgtaattccagcactttcagaggccaaagcgggaggattgcttgaagccaggaatttgagcccagcctgggcaacatagcaagcaagatcccatctctacaaaaagttaaaaaaataaattacacctgccttttgttttgaagacttaaagaatctgctcaaatgatttattttctgagtctcttcacattaacttttatatgatttttaaaaaattattacctgcttatattttttgagtatctgtttcatataaagagatgctgcatgttcactgtgaagtattgctgaattaaattgaaaatgtcagataaaactgatacatgatgtagttataaaaatgctgttatgaagaaaaaaggaatgcttttttcctcggtggcctttgataaaaatatgaatgattgactctcagagttggaggataaactaatcatcttctagcacagccctgttgtgttgcaggagaggaatcaggctaaagtctgctggtatttcagtgacagattaaaactttctaacagtggcctagtgctttctccattgtaatgtactgaaaggaagttgttcatggatcagaaatgtgggaggcccttccttgcccaaggcaagtcgctgtagatggttaaactgataccaaggataggtaagggaaattccaaattccattggaagatggccttttactgacactgcagacatgtagataacaatagtttaatgtcctctggaaaggttgaaaattccctgagatcccgcccaccgcattgtagcccaaattgtttattgctagcccccgcccagaatgggtatttccaaggcccggggctttttttattttgttttggtttgttttgttttttttcttttttgctacacttttttgggggggaccttttaatttgggaagaaaatgctgagtatacttttctttcacaaccattgcaaacccaggtagccctggagttttctttttttctcatcatcattgttttgttttttttatggttcaagacttttgcaatacatgaattaaaaataagcagttctttaaagcatagcgctctaaaaactattcttagtttataccctcaaaagttgggtctttcatgaaacacagtggtttgaatatgaacaccagtagcattctcgttcgttgttagggtaagagagttttgtagaatgatctccaaaagaagcagtcctcaaaaggcatttaccagtgatatcttttaatactcatgtttttatttaatgatgtaagatagaattaataaactactaaggaaataagccaatgtggttattgtactcaatttcgtttttcttttagaaatgtgtattgacttattaaagccactgacagaaatgttaatcatgacttaagttctaatttaaaaaactattttcctctttcctaaatactatattctaaattggaatatggcaaaatcccaatatataattctatacctagtaaagattgtaaataactaaaacaaaatgataagagctgtgaactgaaattgtattgcttacagaaatcatgaaccgaattttcttctctttttaaagtgagcataaagacttaagtgtattgttaccagagatatatttagatagaatacatcattttggcaggtaatcttctagaacctttcatgtactgtttccatcaagggagggaaagaaatagaaaatataattttatctatattttccttaaaatatatcaatctgtgcacactctttcagttttttaattactcatgtaatatatgactacattttgctggtgtgctttttgaaaaccatcttcagtcccaataatcctctgtagaagtaatagtttttaacttctcctagaatcttcttttagaaggtgttttgaaggttacacggcgcacgtgttattcttatttacaggccagggaaggttattcgcattccctccgggtgttttttggcacgggctttccggggtatttgggtctacttccatttgtgcggccgatgcttaaacaaagn

SEQ ID NO: 25232 - DNA, 1147 bp, Homo sapiens; identical to SEQ ID NO: 24421

SEQ ID NO: 25233 - DNA, 2170 bp, Homo sapiens
  misc_feature 1, 2166, 2167, 2168, 2169, 2170: n = A,T,C or G
nacgcgtccgcgcggagccgtagctggactccttcgtcgccaccgtcacctgcgcggcattcatcaagacagggaagttgtacccccactacccaaaagtctgcgggcgcgagaggcaacgttttggatgtcaagtggaacccttttgatgattttgagatcgcctcctgttctgaagatgccacaattaagatctggagcatccccaagcagctgctgaccaggaacctcacggcctacaggaaggaactcgtgggccacgcgcgcagagtaggcctggtggagtggcaccccacggccgtcaacatcctcttcagtgctggctatgactacaaggtgatgatctggaacctgaatcaaaggagtttgtcatcacaagccccatgagtacaattagctgtcaccaagatgtgatcctctccatgtccttcaacaccaacggcagcctgttggccaccacctgcaaagaccgcaagattcgggttattgacccccgagcagggaccgtcctccaggaggccagctacaaagggcaccgggccagcaaagtgctgtttctggggaacctgaagaagctgatgtccacaggcacatcccgatggaacaaccggcaggtggccttgtgggaccaggataacctctctgtgcctctgatggagggggacctggacggctcctcgggcgtgctgtttcccttctatgacgcggacaccagcatgctctacgtggtggggaagggagatggcaacatccgctactacgaggtgagcgccgacaagcctcacctgaaagtgctacctgaccatgagtacccttatttgatttaaaagcatgaatatatgagatttactagcagtattaagtatttgatagagctacgtgatttttgggaagaaatttgttatatggtatgtagtgttaatttggatataatttttggtaaagggatggcagaaaacatagtcaattttggttataataaacgtaaccttattcttggcctgctccatgtgaaatagggctcagggaagctggtcttttccttagcgggatgattactcctttgccttgaaacatttattgggcccaccatgtatggatcagcatgtggtggtaagtcatactcccaaatcagtgattcccaagtcttggctttgggaaccagtatgcctcgtattctcttaaagagcaacaagaatttcttgaaacaaaattagttcagaattgatttaaattttttaacttctggaaatacacgaagttatgtctgagtcatgagtgacagtcattgattaaatcatttctctgtctcttttttagcattattgatcacagagtccgttataaaaagtggttgattcctttcaacatttaacaataacttctaatgaagggtaaaattccagattctcttcatgcgtaaacatttaatgtgtcaatcatagatgaaaggaatctagtttgatgttgtttctttctttcttttttttggaaaacacaagttgctctgggatggcttatatgttgttttataccggttcaggaaatttatttttgtttttattgtaagaccttttgcggtaccagagatggcaccttttttctaggtaaggtgtaggaattcctcaatggtcttgcttcgtaaaatttaacatatcagaactggggaaagagaaaggagggggttatttttttgcagcattttccagtcacatatcagggttatactgaactgcaacaaagatcaacttttaaaaattagccttcttaaaatacaaaatgatttaagtattttaaagataatttatttgccttgctcttgccttctaacattagccatttcatggagaggctaaaacttatactccaaaaaatgtggaagcacattttaatgggagtaaaattaaaaaattttgagaaagggtaaaatcttatgaatatgcatcttcttagctttatcttccctttgataggtagggcacttatgctcttccatctgctccatgtcaaataggggctcagggaagccagtcatttccttagcgagatgattactcctttgccttgaaacatttattggggcccaccatgtttgggatccagtgtgtggtagtgagtcctactcccaaatcagtgattcccaagtcttgggctttggggacccgnnnnn

SEQ ID NO: 25234 - DNA, 1844 bp, Homo sapiens; identical to SEQ ID NO: 24801
  misc_feature 1, 2, 1821, 1822, 1823, 1824, 1825, 1826, 1827, 1828, 1829,1830, 1831, 1832, 1833, 1834, 1835, 1836, 1837, 1838, 1839,1840, 1841, 1842, 1843, 1844: n = A,T,C or G

SEQ ID NO: 25235 - DNA, 786 bp, Homo sapiens
  misc_feature 1, 2, 3, 4, 5, 6, 7, 8, 9, 782, 783, 784, 785, 786: n = A,T,C or G
nnnnnnnnngagacagggtcttgttctgctgtccaggctggagtacaactgggccaggttctatgttgtcataaaaattattcatggcttttggatcaaagtttccagaatgcagcctactagtcaaaagtatgcagcagctgtggacatcagtcagtatattttccacagaaaatgaagaccatctctaatctggtgagttgggtaaatgaaagtttaagagagcttctgctgtagtatacttctctagattgaaggaggtcaacttctttcagtgtacagtcaacatttatctggagttgtctgttcatgcttctcaatcttgtcatttcctcaggcgtagggatcgcagtggtgcagctgactcttctgagccgtctctgcatcaggtcatgctccataccattaacttcagacttcaaccgctctagctcctctttctcaagtttcagttgctttgctaacctctccatccttgctcgttgatgtaacagcaaggcttgtgtgtaggcatagtcatctgatccagaactagaacttctctgatatttatggcttcccttttctcccccagagcctggtatcactgaaatgggctgaataggttctggtgctgcagagcgctcttcttggtccactaaatttaaaagattttcagtcgttgctcggcctacggtaattttaaaaactgtagttgggtttggtatcactcgaggagatggtgatggagtacaagaaggtccagttggctgtgtatatgtaatatacacaggattaacacnnnnn

SEQ ID NO: 25236 - DNA, 988 bp, Homo sapiens; identical to SEQ ID NO: 25014
  misc_feature 763, 988: n = A,T,C or G

SEQ ID NO: 25237 - DNA, 1033 bp, Homo sapiens; identical to SEQ ID NO: 22857

SEQ ID NO: 25238 - DNA, 370 bp, Homo sapiens
  misc_feature 1, 2, 3: n = A,T,C or G
nnnacatttatccctgacatccactagaacataatggtagctttacaaggggtgtcacaggagattaaggctattgagcaccttactgatgaccctctgcagagacagtgggtgcctctgggcactaccctatgctgggctctaataatcataggtaacgtaacaggaatatttatagtaggttgttgttctctgtattgttgttgtgacctatgagttcagggtgctgccctatgtgcatggatccccactaaaagaactccctcattccagggggtggaatgtaaggcctgtgtgccaagcctgtttatcaaactcgtgtgcccaaaacttatgtataaggccttgtgtgtgtatatcaagcctatgt

SEQ ID NO: 25239 - DNA, 1643 bp, Homo sapiens; identical to SEQ ID NO: 21150
  misc_feature 1, 2, 3, 4, 1615, 1616, 1617, 1618, 1619, 1620, 1621, 1622,1623, 1624, 1625, 1626, 1627, 1628, 1629, 1630, 1631, 1632,1633, 1634, 1635, 1636, 1637, 1638, 1639, 1640, 1641, 1642,1643: n = A,T,C or G

SEQ ID NO: 25240 - DNA, 1963 bp, Homo sapiens
  misc_feature 1400: n = A,T,C or G
ccccgcgccattgtgttggtacccgggaattcggccattatggccgggggagggagtcgagccagcgtcgccgcgatggtgttgttggagagcgagcagttcctgacggagctgaccagacttttccagaagtgccggacgtcgggcagcgtctatatcaccttgaagaagtatgacggtcgaaccaaacccattccaaagaaaggtactgtggagggctttgagcccgcagacaacaagtgtctgttaagagctaccgatgggaagaagaagatcagcactgtggtgagctccaaggaagtgaataagtttcagatggcttattcaaacctccttagagctaacatggatgggttgaagaagagagacaaaaagaacaaaactaagaagaccaaaagcagcagcagcaagcaagcaagcagcaagcagcagcagcagcagcagcagcagcaacaacagcagcagcaacagcagcaacaacagcagcaacaacagcagcaacagcagcacagtaaagggcatacatttcctgctttcaccaattaaccactgaattgctattttttccttttggccagatagctaggtttctggttcccccacagtaggtgttttcacataagattagggtccttttggaaagaatagttgcagtgtttataggatagttgtggtaagaatctagtttattttgcatttggctaattggtctgtgctgcatggttatatactcctggattatagattaaaagtctccgtagacatctctgtgaagagcaagctatcattaaacatgtctgtttatcagcactgtctctttattcctttcccaacccattttaatagttctggcaataactactaaatctagaatgatgtgattaatgaataggctttagctctataatatcttctaggttattagaattgaaacctgacagttttataaaaagtcatgttatctcatgagctgcttcccacctggctgtataattttatcatcatggttccccagtttcgatgagttctcacagtcaaatgagagtttgtttaaccaccttaggagaaacatactacaaagtcatcaagaataaaggttccaaagctaaaaaaaaaaatacacacaccaacaacaaacaacaaacaaactaccaacaaaacaaaaaacaatataacaaaaaaaaaaaaaaaacacaaaacaaaaaaatggctgggccgcgccccccccccaaaaaaacttttacaacaccaccctttgggggcggcgcgcccccctatatgtaggacagaccagaggcccaaccacaggtatcatctccacgaaaacacacggtcccacaaacaggacggttggagtgatgcaccacgcaaaaaaataaaaaaagcgcgcggcgggtccngggggccgcccgtgtcttgtgcgcgaaaaaacacaccgcaccgcacgagacgagagagcagaacacaaactacaagcgatagcacacaagagaggacgacactacatacgacagacacagcaggccagaagacaaccaccagcagaacggcaagcgaaacataccaacatccattagagagatctataacaatacaaatagaggtagattcgaatcgacaactcactacagatctgacagtaaatatatgacacatctcagtgagaacgatctgatgattcgatcgactgagataacaagaatacatatcacctaatgtaacgacgacaaaacagatgcgaacagggaaagagacacatccagagaagatcaaggagaaagaatcataatacctcacaaatctcatcatatcggcatcaaggcagacaatgctctctccaacctctctccggagaaaaacatctctaccagaaatcgataagttacaatctaagttagagttatgaatagaaaagagtgacaacggacacagtacaatcaacaagctataaaaagagaataga

SEQ ID NO: 25241 - DNA, 2182 bp, Homo sapiens; identical to SEQ ID NO: 24288
  misc_feature 1, 2, 3, 4, 5, 6, 7, 2179, 2180, 2181, 2182: n = A,T,C or G

SEQ ID NO: 25242 - DNA, 564 bp, Homo sapiens; identical to SEQ ID NO: 22496
  misc_feature 564: n = A,T,C or G

SEQ ID NO: 25243 - DNA, 2806 bp, Homo sapiens
  misc_feature 1, 2, 3, 4, 5, 6, 7, 8, 9, 10, 11, 12, 13, 28, 2805, 2806: n = A,T,C or G
nnnnnnnnnnnnncggggtacttctagnaattaattaacgcggggggggctggcctgcggaagggggcgggttcggaggagtgaactgtgcggttagtgcgcctttcagcctcacctgcagctgcgcctccttgcacctgcgcctgtgctttttctcccagcactgcggacgcgactcgagggtgacgctcgctccgctcgtcccgctcgtcatggcctacccgggatacggaggagggtttggaaattttagcattcaggtgccaggaatgcagatgggacagccagtgccagaaacaggcccagctatactcctcgatggatactctgggccagcatattcagacacttattcctcagctggtgactccgtgtatacttacttcagtgctgttgctggacaggatggtgaagtggatgctgaagaacttcagagatgtttgacacagtctggaattaatggaacttactctcccttcagtttggaaacctgcagaattatgattgccatgttggatagagatcacacaggaaaaatgggatttaatgcattcaaagagctatgggcagctcttaatgcctggaaggaaaacttcatgactgttgatcaagatggaagtggcacagtagaacatcatgagttgcgtcaagccattggtcttatgggttataggttgagtcctcaaacattaactactattgttaaacgttatagcaagaatggcagaattttctttgatgattatgttgcttgctgtgtgaagcttcgagcattgacagatttctttaggaaaagagaccacttgcaacaagggtctgcgaatttcatatatgacgattttttgcagggcactatggcaatttgaatgcttagaattttaaacctgaagagacactgtgaattcttttgtttggaagaagtgaactggactactttaaaacttttaagggttttctatgttcttcctacctgttaaacctcttccctttctgtgtgtttttattttagcagatagttcaaagcaataaaagatttcttttttaatttgaggtattactgcttttggaaaagttattttataaatatgtgcatattgtcataaaatattgtatgattaattgatttaaataatgcttagccttaattttagataatgtaaatttagaggaatgtactttacaagatagattgtataagaagccaaataatgaaagcctagaaaaaactaatttatacttatctgaaggttacaaattagacttttaaattttctttgtagttggtggtgtttgagggttggctagaaatgaaagcctggattttgtgccatgtttgtaatatagtttgttccttgatcaaataatcagagaaaagaaacttaaagatctttgtctgtgaagaagaaaattatctccctagttcaatctgtagtgaaataagactacagaaggcattgttttttccttttttattttttgtattatatatttttcttaaatatgttttattgtcttctctaagcaaaaagttcttaataaacatagtatttctctctgcgtcctatttcattagtgaagacatagttcacctaaaatggcatcctgctctgaatctagactttttagaaatggcatatgtttttgatgatatgtcaacattcaaaattgtcctaattaaattgttgtttaaatgtaatgtcaactctttataaacttaaaaataaacaagtaattaaccactctaattgttcagaaaaaaaaaaaaaaaaaaaacctcggccgcccgggcaggtacctcttggaaaacctcaatgcaagatagtgtttcagtgctggcatattttggaattctgcacattcatggagtgcaataatactgtatagctttccccacctcccacaaaatcacccagttaatgtgtgtgtgtgttttttttttaaggtaaacattactacttgtaactttttttcttagtcatatttgaaaaagtagaaaattgagttacaatttgattttttttccaaagatgtctgttaaatctgttgtgcttttatatgaatatttgttttttatagtttaaaattgatcctttgggaatccagttgaagttcccaaatactttataagagtttatcagacatctctaatttggccatgtccagtttatacagtttacaaaatatagcagatgcaagattatgggggaaatcctatattcagagtactctataaatttttgtgtatgtgtgtatgtgcgtgtgattaccagagaactactaaaaaaaccaactgctttttaaatcctattgtgtagttaaagtgtcatgccttgaccaatctaatgaattgattaattaactgggcctttatacttaactaaataaaaaactaagcagatatgagttaaatttaaaagtttcaatttattgctcagtgtacctgttaacattatatttaacaattgcttaaatttttgtttttgatttatggataatttcttaagagtacacactttagatacacaaataatcgttcatttaccatctttaggatcattgaaactcatctcactaaagaaagttcacttgaacctctttatagcattgatactaggtgaacagaaattacctgactaataatttgtctaacatcatatttcagaatttctattgtatatgatgaacgaaactttaaattctctaacttcaattgttaaatactggttacagagttctaaaaagggcagattaataaaaacttaattgataaaaacgttagactaattaagagacaataaaccgaann

SEQ ID NO: 25244 - DNA, 736 bp, Homo sapiens
  misc_feature 1, 2, 3, 4, 5, 34, 733, 734, 735, 736: n = A,T,C or G
nnnnnacagggtatggctgagcatggaaaaagtnggtaagggtcacacaaacttggtggtcctgcaccaaactacaaagattagctcaatttatagcattgtgctaacagtaaaagtagtaaaaaataaaaaattaaaaaaaataaaaaaataaactaaattcctacacaaagtttctcgagtacagaggtgaatgtcttctcctcggctacagcctccaccccaaatacaacccaccagttaagagggataacactaaacaatgctgtttagtgtcatgtgcacccatctacatgaccagaaaaatactgttcatatgcaaaaaaatttactaattgttaatgcctggccagatgttcttgtgaagagcaaggcaggggaaaaacatgttatcaagtgaatactctatccaaactccaagagaaacatctccagtttttcttcagagtcaatttgatcttcaactgagggtccctccattcttggcagtgagaggaacagtgaataatgaaaacaggtgttcagaaacctatgcagtatactccctgggtaaggaaggtgagcagcagtgacctaagacactgacatgacctcatgactagcaagaccaaactttgagaaagctgctccattccagaaatcaatgctaacagatggcaacacaaggcctagataagatctggcttaggctccagaaaagggaattaactttttaaaggatgtttcttgaccnnnn

SEQ ID NO: 25245 - DNA, 741 bp, Homo sapiens
  misc_feature 704, 717, 741: n = A,T,C or G
actcttttgtgacactgtttggctccagtatagttcggaatctggagtttgctgttgaatgggaaagtgggattttgtgctgctgttttaagcagggtcgggccaggttaatatgtgatgatctcatgcggtgccgtttttgaccccagtgttttgggagtatagggagttttggcctttaaaaatcaaactgccacagaaactcattttatttaaaatttgtttcacagccttccctggattacctatcaaggctaacaaagttcagccatgtggacatgtttgcagacagttgagactgtattactatctcatggctagagttccaaggtaaaagcttttggatctttgtgtgtatatacatctagatgtgtttatgtgtatgcacatgtattacattatatgttgtgactaccaaattggcttatacataaaagaacactcctagattaagtaaataagtccaaagtatttttttacattcacgttacttaagtaaatttttaagaagctagcattaaaattattgtaagataaaaatagaaatgtcttcagaattgtcagcatacattttttcgggggttttatgtttgtctctgctagatattttggggtatcagagtgtggcacagaaagttataaaactataaccagtagtttgagaccagtctgaaaaacgaagaccccccccgcgttaattaatnctagaagtacccncgaggggggggcccggtaccccan

SEQ ID NO: 25246 - DNA, 2649 bp, Homo sapiens; identical to SEQ ID NO: 22470
  misc_feature 1, 2, 3, 4, 5, 6, 7, 8, 9, 10, 11: n = A,T,C or G

SEQ ID NO: 25247 - DNA, 1754 bp, Homo sapiens; identical to SEQ ID NO: 25004

SEQ ID NO: 25248 - DNA, 1060 bp, Homo sapiens
  misc_feature 1: n = A,T,C or G
nactcactatatggaatttggacctcgaggccaagaattcggcacgaggcaacactctgagcaactgttctcagttcttctgccttatttctggcctccgttgcaactgttttgacctagtgaaggcctagactttctcagacagatttcttttaactcttctgccctgactccagtcttcactgggatgctgccttgcacttagggaaggttcacatgcctcaaggatctctctctctcagatttcttgactttccctcagtcttcagtatagtcctcctctgtgcctggtgaagacctgtggtaaagtgctggcagagctgccggcttccccttgaaggaataggagtagacctgctgaactatcacatgagagaagaggcccaaaagcttgcacactacagtcaagctggcccttaaagagatggacctagaagatgctgagccagatgtactcaattacttctccaaaattcatcaattaggaatacaacatgtttaagaccacagaacatctgcataggctgtaaatttcgttgaatgatggatgcaaagatggaagacagatggatagaggaaaagacagaatcagatactggatgagttagtactgctgcctgtgcttcagagctgtcttattaccacaaggccggcaagcatcaatgtccccacatccccctctgcctccccctgaaatgtaccgatttatatgaaaattaagattacaaattaaagcctggctatcctggagttttccagttcatcagccatccaataaaaatgatgtcaagcctgtatgcataattcccggaagattactttcgtccttacagctaagccctgtccctgatatgaaagatctctatccacttttattgaaataaagaactaacatcataatcccaatattgaggtataatcttcattatctcctgaccctcttgaggttcccccaatctatattacttcagatttggtttatgtgtaatccttatgtatttacttttattgagataggattaaaaactaaaaaaaaagcagcggccgcccgggcaggtac

SEQ ID NO: 25249 - DNA, 1632 bp, Homo sapiens
  misc_feature 1, 2, 3, 1627, 1628, 1629, 1630, 1631, 1632: n = A,T,C or G
nnnggtaccgagctcggatccctagtaacggccgccatgtgctggaattcgcggccgcgtcacaaggagttgtttgatttcataaccagctaggagacctatacaagcacagctggattccctcacatgatgttttcgaagactgttttgttcatcacgctcctgccacctcattattttgcattgaagatacattgccaggttgtgttttctgaaggattcagtgacttgctttctgtaaattatatggcttatcacttcttagacaaataacaaccaatagagatcattgttaagaatactgaggttctaatatactttctttagttctgtgagccaacagtaattattaagaacactttccctttaaaggaaacaaaagtgaataccatattgtttttactgtcatagtgttgctttcttgcctgtcctgcttagtttttacttgctggatgataccataatgtatcaaggagcgtccatggatacaagataagatgtgtaccttagtagaatacagagctttggtaattacatgaataaaattaagaaaatagccatatacaatcaaatacactatggcatttttatttgaatatgatgagtatattttgcttcggaaataatataggaaggaaatgtaaaatagtgagtagtatggtatcagttaattccagtctgagcttctctgtcaacttcagtttctctctcagtttaatgatttaataatagtccaggtttttgtgtgtttttctttatactgcaaattaataatgattcactttatagtttgggagacagaatcaggtcttgaataaaataattgtaatgagtgctaaatgggcaccattattcgaatcagataccttttatattctctttccataaatacgttgatttctgtcaataaaatttttgtgtcttaggattggttgaagtgtacattttttaattatatacattatagtatattttatgccatgaatgtatgtaaatgaatacatttacgtacatttgttaaaatgtatgtaatgaatacatttacatacatttgtttaaaaaaaacttgaattttttatgaatgaaatttctgtattgtttccaaaaagagagagattcaaacatgacttgcttcacatgaagaaatttgatttcagaaatgtcctatatttaaataagcaaagccattgaaattgaagcacatttcttatttgaagcatctgggaaatacaactgttaagtatctctcaaatattcagtatatggaatttatacccacatttgtttgtatatctatttgtaagctgtggttagaagaatgaagttcggattattgcgaatacactatccggtttcctactgatgaaggttttaactccaacttctgggcaatattgcaggcggttgcgacataggggcgggggagaacccccaattttaagcacaggttgcggtccagaatacgaaggcaaggggtctgacattgcgacaaaccgggccattccgtaactgggtaactacaccgaatgatgagcctccgctctaaatatcgggcgagccatctcttgcaatctgtaagaaccgccccacacatattactacgccccccggaaacataaaattatannnnnn

SEQ ID NO: 25250 - DNA, 1739 bp, Homo sapiens
  misc_feature 1, 2, 3, 4, 1737, 1738, 1739: n = A,T,C or G
nnnnaggcaaagtataacattttgtatcgttgtttgaaaacagcctatcaattgttattacatatctttggaaacatcattataaatctagactagtctcccactttgaactacattcatgccacataaatagcactccaaagagaattgtttcgagttttattttttaaaaaattacacttgaggtaaggaaaaaaatacagtaaaattagattttagagattaaccaaaatccaaactatacaacttaattcatgactaattcaatcacagtttgtaacaaaaggaacagaacatttttaccttcaaattcagtgtaaacaataatttatcacatttaaaagaaggctgccaataagtagaactcagcaatttcttgacttaattgacaagcctaggaattctaaaaagtcattaaaaattttaaaacctgtaaaaattattttatctatttcaatccatattcatttcattcagaatattctttttgacaatcagtggaattcattacatactaaaaataacaccatatttatgcacaaataaattaatttttccagtaagagctaatcttcctttaagaagacttcccacatattcacaatacataatatcacagaacacccatatttggcctaaatgcctctgaattgtagcattacaagatggaagttcattgtgcctaataatttgattgagttttgtccaaatgtcttccagagtttggctgttacaaatagtgtgttctattgtccatcttgctctataaagtgagtgtaaatttagtgcctttaaactatcttgcaattttttagacaaaggagaaacgtttttagtacaattattgctgggaagggaaatactccaagatctcctcttgtgctgttttcccttttctgattgtttacccagatttccagaattagtctgttccttcagtgtgtgtgaccaggttaaatgctgctttttcaagctaggttgaaactccaatagatctactgtgcaatcataactgtgtgacttagcatcatgttctgaaatggttaagtactgtttcacatcttcagctgcctcttcagaaatcacaggtggtgatcttttaggtctgagtggaagcttggacccatcatatggaaaccaaggtataaatcttgatagcggacgagtaggaaagtcttgaattgctttttctgcaatttttggcagttgtgtgggatcactctcacatggtcgataatgtaatattacttctgtagtcattctgcagtaatccagttactcttagtgatgagaaaatttcttagttgaactcctcagagctagaatgttaatttattattgcaagattgtctctcttgccaaatcagagggaaacaggaccttttagcgccagcaggtgctcctgtttagggggattcacttccatggtgaccggcacttttgaccctgcctaccaacaggcagggagaaaaggaaaaacaaaaaccaaaaaccaatcccaatgtggtattttaccaaagtgctattggtaaatgtgaatgtaatctacaaacctgaaaattctttctcttaccaaaataagggatctgaactagatgccctataaaatcacttcctgcctaaaaatgctagtagtcaacatgtttaactcaatagatataaaggacttggaagtatcgatattaatatattaagtaataatagtcttaaaactttagcagaaacaaagagtaaacnnn

SEQ ID NO: 25251 - DNA, 2565 bp, Homo sapiens
  misc_feature 1, 2, 3, 4, 5, 6, 7, 2556, 2557, 2558, 2559, 2560, 2561,2562, 2563, 2564, 2565: n = A,T,C or G
nnnnnnnggggctgtgcttggcgcgtaccgtgcggtccctgtagttggaggacgggcggtcgcgcggcctttcccactagccggagtagcctctagttcgttagtcaaaacgtgaaaaaaaagacctgctttgccctgggaaatagtaaccctgccaaatacatcagcttgtaggagacagaggatgtgatggagctgcttgaagaagatctcacatgccctatttgttgtagtctgtttgatgatccacgggttttgccttgctcccacaacttctgcaaaaaatgcttagaaggtatcttagaagggagtgtgcggaattccttgtggagaccagctccattcaagtgtcctacatgccgtaaggaaacttcagctactggaattaatagcctgcaggttaattactccctgaagggtattgtggaaaagtataacaagatcaagatctctcccaaaatgccagtatgcaaaggacacttggggcagcctctcaacattttctgcctgactgatatgcagctgatttgtgggatctgtgctactcgtggggagcacaccaaacatgtcttctgttctattgaagatgcctatgctcaggaaagggatgcctttgagtccctcttccagagctttgagacctggcgtcggggagatgctctttctcgcttggataccttggaaactagtaagaggaaatccctacagttactgactaaagattcagataaagtgaaggaattttttgagaagttacaacacacactggatcaaaagaagaatgaaattctgtctgactttgagaccatgaaacttgctgttatgcaagcatatgacccagagatcaacaaactcaacaccatcttgcaggagcaacggatggcctttaacattgctgaggctttcaaagatgtgtcagaacccattgtatttctgcaacagatgcaggagtttagagagaaaatcaaagtaatcaaggaaactcctttacctccctctaatttgcctgcaagccctttaatgaagaactttgataccagtcagtgggaagacataaaactagtcgatgtggataaactttctttgcctcaagacactggcacattcattagcaagattccctggagcttttataagttatttttgctaatccttctgcttggccttgtcattgtctttggtcctaccatgttcctagaatggtcattatttgatgacctggcaacttggaaaggctgtctttcaaacttcagttcctatctgactaaaacagccgatttcatagaacaatcagttttttactgggaacaggtgacagatgggtttttcattttcaatgaaagattcaagaattttactttggtggtactgaacaatgtggcagaatttgtgtgcaaatataaactattataaaatctgtttcaagtatgcagttttcttttgttagaaattgttagagaatagagagtggtaattcagatttggtcaacgattctagtcacatattttcctccaaaagtattccttccaaaaataatctatacatgttcaaattaggtagcataaagataaaagtgaaatttagtagtataggcctgaacctttttttgtttaaaagagtgcttttgaaataagcatccaccccaaatgttggttgtatttatgctgtgataaaaataggtgagagatcatatgatctaatattgtattgatggaagtataggtagtatagtagtgattgttcttcaagcatgcagtaaagatcactttttttttttttttttgagatggagtcttgctctgtcgcccaggctggagtgcagtggtgcaatcttggctcactgcagcctctacctcccaggttcaagtgattatcctgccttagcctcctgagtagctgggattacaggcgcgtgccaccacgcccagctaattttttgtatttttagttgagacagggtttcactgtcccttaagaccatcctgttagccaagatggtcttgatctcctgacctcgtgatccgcctgcctcggcctcccaaagtgctgggattacaggtgtgagccaccgtgcccagccaaagactgctcttaaagcacctttttgacagtgaacatggtctaaaaaagggaagatattgtagaagatttcacacacacacgcgtgtgtgggagacaactaaaggtattgaaggtactaattaattagatttccaaaattttctacagagagttaattatcaccaaaatgtgaatggtacatacaaaacctggcattttcttgtgataagtttacatttttaggagagtggagctttcaatctgcccttttctcctttgtttttgtagttttcaccaaagatgatcaactagaaatgttaagtggctatgcaagcaaaagcatagataggttaaaaaaaaggatcagctggctgggcagggtggctcatgtctataatctcagcattctaggacagtgatgtgggaggattatttgaggctaggagttccagttcgaaaccagcttcgtaaacatagcaagacccagtctctannnnnnnnnn

SEQ ID NO: 25252 - DNA, 334 bp, Homo sapiens
atgggatctgctgctgcattaaatcgggaaagaaaatgtgaagatttcatttggaatcacagaaaatgcccaaatgaggtcaagatggcgagtgggtgcgagtgagaatgagtggcaaaatgtaatgaaaactttacatgaatgcttatttaggttgttcaaagtaaaaagggctacaggtcacagatcgtcggtgcctgagaaagaacattgacttactctatatcaattgaggggaaagtgcagtacatgtgcaggtttgttctataagtaaattttgtgtcaagggagtttgatatacagattattttgtcacccaggtaataagcatagt

SEQ ID NO: 25253 - DNA, 1872 bp, Homo sapiens; identical to SEQ ID NO: 25106
  misc_feature 1, 2, 1859, 1860, 1861, 1862, 1863, 1864, 1865, 1866, 1867,1868, 1869, 1870, 1871, 1872: n = A,T,C or G

SEQ ID NO: 25254 - DNA, 9220 bp, Homo sapiens; identical to SEQ ID NO: 24403
  misc_feature 1, 2, 9213, 9214, 9215, 9216, 9217, 9218, 9219, 9220: n = A,T,C or G

SEQ ID NO: 25255 - DNA, 645 bp, Homo sapiens
  misc_feature 565, 567, 579, 582, 612, 613, 616, 618, 619, 644, 645: n = A,T,C or G
acgcggggacattaacgcacacatcagttccaggcccgattccattctctgaacatcttctgacacactgacagtgctgagcagagcaagaaaacgggcaatgctgtgagagccattggaagactgtcctctatggcaatgatctcagggctcagtggcaggaaatcctcaacagggtcaccaaccagcccgctcaatgcagaaaaactagaatctgaagaagatgtgtcccaagctttccttgaggctgttgctgaggaaaagcctcatgtaaaaccctatttctctaagaccattcgcgatttagaggttgtggagggaagtgctgctagatttgactgcaggattgaaggatacccagaccccgaggttgtctggttcaaaggtgaccagtcaatcagggagtcccgccacttccagatagactacgatgaggacgggaactgctctttaattattagtgatgtttgcggggatgacgatgccaagtacacctgcaaggctgtcaacagtcttggagaagccacctgcacagcagagctcattgtggaaacgatggtgttcnanagaatcagcaanagnattttccagccttggaaaacaagagcaagnnggnannggaggctctcaataaataatggtgnn

SEQ ID NO: 25256 - DNA, 597 bp, Homo sapiens
  misc_feature 584, 585, 586, 587, 588, 589, 590, 591, 592, 593, 594, 595,596, 597: n = A,T,C or G
acattgtttattatggttctagccatggaggaacaactgaagccccttcctgtcaaagggggagagagaaataattagctgttttagtaacagtacgaaagacttgaaacaaggggttataatgagaagaaactaacagacaatattcagtgtgagatttttcaagttctttatgaagaagccacagcatcctacaaggaagaaatcgtgcatcagctgcccagtaataaaccagaagagctagagaataatgtagatcagatcttgaaatggattgagcagtggatcaaagatcataactcttgacttataaggctagctacttaataatcactcttgttgatatctctgccgacatcatagaaattgttcaagtgtcagtaacactttattaaaatctctccatgagaaagctaaacatgaaatataatgaatatagtattattaaggattgagacaaaaactgtgattttaatacttaaattgctaaagaataaataaatctgacaaaatgggtggatatcttttaagtttattacagaaaaaaatgcagatgatctcttaaaataaaactaaagataaannnnnnnnnnnnnn

SEQ ID NO: 25257 - DNA, 2171 bp, Homo sapiens; identical to SEQ ID NO: 22408
  misc_feature 1, 2, 3, 4, 5, 6, 7, 8, 9, 10, 11, 12, 13, 14, 2166, 2167,2168, 2169, 2170, 2171: n = A,T,C or G

SEQ ID NO: 25258 - DNA, 1978 bp, Homo sapiens
  misc_feature 1, 2, 1708, 1978: n = A,T,C or G
nngtaacacgacgtttgccgggtttgaccgcttgcgttgatggcgtttgtgggcgccccgattttatttcggccgccccaaatttttgtgtttcatgtcatcatgaatttattttcaggcaatatgataatctattaacactcagcatactctgaacttacagaataagtaccacgccatacttcctcattaatgactatcattttacatgagcttcttccacaatcacaatgagagaacagattgctacatgtttgctggtaaatgcattcagtaaggcactcaaatcctagacacgaactaaccacagaacgctcttccctgctttaataaattgaaacatgatctcatttccttcattttcaatactttttatagaaagacacgcttgtcttgaacttgtctaaacataggtttatataaactaatccattatcattatagttataatcaaggaaatgatttcacattgacggttttttaggtagggataagcgaaagcactgcagcagtttctgagggaatgtcttctctgtggttccccatacttagtacaatgcctggaatgtagcagggactaaatacagtgaacaaatgggcaaacctttaattcccagggatctgctacatattgccttgactggtagatcatttctccaggagaaaggaagaaaccaaaagacaaaaacaatctttttaaacctcacaggattttcttagaaaaaagttttaatttatatatctagtgcaattctctttgtaaaatatatttcataaaaaatccaaagcaaaagccctgtcattcatttatttcaaaagacaaatcatttcagtacttcttccttgaaatgcctgcaatttcttcctctggcctcagagacgggcattggctccatgctttacaatgtcaggataaaaatccaggagggagaaatcttgttgtaatggatagctgttttcatctaacacaaaaaggctctgaatctttaatacacaaggttctgcgctgactgccaacaaggagtggaacaggtctgccacgaccatcccataggtgatctctgaggaaggaactgcaaaagacaaaaacacagagctcccaagatcgctgctagcttgacaggagcacacacattgaatggtttcattgtttcttttggttcctcaagtctcaaacccattttaaatttctcctcccgtccagtagcggtggctcacacctgtaatcccagcactctgggagacggaggcagccggattacttgaggtcaggagtgcgagacatgcctggccaacacagtaaaaccctgtctctactaaaaatacaaaaattagccgggagtggtggcacatgcctgtaatcccagctactcgggaggctgaggcaggagatttgcttgagcccgggaggtagagattgcaatgagctgagattgtgccactgcactccagcctgggcaccagagcaagactctgtctctaaataaataaacaggtaagtaaactactctttctataccttctctttctagttacaagctattgaggcactccagagtgacggcatgtgatccccctgacacaagaaacaggcccagataacacaccgttcagaccgacagcagttctggttatgctgcagtacatcagaaaagtgctcttatccatccacagttcttatcacagttacttatgcatatattcattnttttatataaaagaatctttgaatcgggtcacttaaatattgaatcaacaactcttagtactgcgtggactaatacatcaggttgaaggtgctccaattctacaaagtctatactgttcaccctctaaggctgccacggaggaagatctctgaggtaggaatgttttgaccccacatatgccagtaagtcttgaagtacaacttcactaactgtcgggtgattaaacccggacacatagcaattcaggaaataagacttcacggacgcgn

SEQ ID NO: 25259 - DNA, 3008 bp, Homo sapiens; identical to SEQ ID NO: 21957

SEQ ID NO: 25260 - DNA, 303 bp, Homo sapiens
  misc_feature 303: n = A,T,C or G
gaaatgtgtaagctttgatttaaaccaagtttacttcagtatgttaatgatgtagttaaaaatatttattgaaaggtgaattcgagtattttaatgttatacctgccattttttttcttaaagcatattctttgcatctaactgccagtgccattgtcaaaacttattttttaaatcgttgtactgatttccgaaatcaaacacccatgcttgtcccctaggaaaaagaaaacaaaaaacaaaaacaaaaacaaaacacgagtaatactgaatttaagtaaatgtatacctccaaaatactgn

SEQ ID NO: 25261 - DNA, 2452 bp, Homo sapiens; identical to SEQ ID NO: 22637

SEQ ID NO: 25262 - DNA, 5596 bp, Homo sapiens
  misc_feature 1, 2, 5469, 5473, 5478, 5554, 5567: n = A,T,C or G
nngtgtgacttacatgacagagctacattctgagaaatttgtcattaggtgatttcatcattgtgtgaacatcatgaagtgtacccaatatgccggcactacagagtcaactgataacatcagatacctattctatgcaaatgcagatgatcccttctaattctacacgacttcctgtagcttaccaaggaaatcagggacttaaccagtctttttcagagcaacaggttgattggacacaacagtgtatatctaagggactgacttacccagattacagaccacctccaaagctataccgttactcaccacaaagctttttaccagattctaccattcaaaaacaaaactttataccacatacatcattgcaagttaaaaatagtcagcttccaaattctgtattaactttaccatcaaggcagacctcagctgtaccatcacagcagtatgccacgcaaactgacaaaagacctcctcctcctccttacaactgtagatatggaagccagcctttgcaaagtactcagcatattactaaacacttgtctatggaagttcctcagagtcgagaaatgctgtcatctgaaataaggaccagctttcaacagcagtggcaaaaccctaatgaaaatgtcagcacaattggaaatttcactaacttgaaagtaaataccaacaacaaacagccttttaacagtcccattagatcttctgtggatggtgttcagactcttgctcaaactaatgaagagaaaataatggattcttgcaatccaacttcaaatcaagtactggacacaagtgttgcaaaagaaaagctagtaagggatattaaaacattagtagagataaaacagaagttttcagaacttgcaaggaaaattaaaatcaataaagatcttttgatggcagcaggttgtattaaaatgactaatacttcttatagtgaaccagctcagaattctaaattgtctctaaaacaaactgccaaaatccagtctggaccccagataactccagtaatgccagagaatgcagagagacaaacaccaacagtagtggaatctgcagaaacaaataagactcaatgtatgttgaattctgacattcaggaagtcaattgcagaaggtttaaccaagttgattctgttttaccaaatcctgtctattctgaaaagcggccaatgccagacccatctcatgatgtgaaagttctcacttcaaagacatcagctgttgagatgacccaggcagtattgaatactcagctttcatcagaaaatgttaccaaagttgagcaaaattcaccagcagtttgtgaaacaatttctgttcccaagtccatgtccactgaggaatataaatcaaaaattcaaaatgaaaatatgctacttctcgctttgctttcacaggcacgtaagactcagaagacagtattaaaagatgctaatcaaactattcaggattctaaaccacacagttgtgaaatgaatccaaatacccaaatgactggtaaccaactgaatttgaagaacatggaaactccaagtacttctaatgtaagtggcagggttttggacaactccttttgcagtggacaagaatcctcaacaaaaggaatgcctgctaaaagtgacagtagctgttccatggaagtgctagcaacctgtctttccctgtggaaaaagcaaccttcagatactgcaaaagaaaaggagtgtgataaactcagaacaaacacaacagcagttggaatttcaaagcctgctaacatccacgttaagagtccttgttcagttgtgggaaattcaaattctcagaataaaataagtaatccctcacagcagacagctttgtcgatggtaatgcacaattatgagtcttcaggtataaatataacaaagggaacagaacttcagatagctgtagtgtcaccgttagttctgtcagaggtcaaaacattgtctgtcaaaggaataacacctgcagtgttacctgaaacagtgtatcccgttattaaagaaggcagtgtttgtagtttacaaaatcaattggcagaaaatgcaaaggcaactgctgctttgaaagttgatgttagtggaccagtagcaagtacagcaacatcaaccaagatttttccactaactcagaaggaaaagcagaatgagtcaactaatggtaattcagaagtcacacctaatgtcaatcaaggaaagcataacaaattagagtcagctatccattctcctatgaacgatcagcaaatctcacaggagtcaaggaatagtactgttgtgagtagtgatacattacagattgacaatatttgttctctggttgaaggtgatacctcttacaattcccaaatagcaaagatattcagctctcttcccttgaaaatggttgagccacagaaaccttctctacccaatcagcaagggattggcagcagagaaccagaaaaacaattagataataccactgaaaataaagactttggttttcaaaaagataaccctgtacagtgcacagatgtttcacataaaatatgtgatcagtcaaagtcagagccacccttagagtcatcttttaacaatcttgaaacaaacagagttattctagagaaaagtagtttggagcatgccactgaaaaaagcacagctaacgatacgtgctcgtcagctgctattcaggaggatatttaccctcaggaaatagatgcatccagcaactatactccccaagatcctgcaagaaatgaaatccacagtgataaggcacctgtcttatacctacatgaccagctgtcagaacttctaaaagagtttccttatggcattgaggctgtgaatacacgtgaaggttctgtgggccagcaaactacataccagacctcagaagatcaaactgctgataaaaccagtcctgactccaaagacccagcagatcaaatacaaattacaatattaagctcagagcaaatgaaagaaatatttcctgaacaggatgatcaaccctatgtagtagacaagttggcagaacctcagaaagaagagcccatcacagaagtagttagccagtgtgacctgcaggcacctgcagctggacaaagtcgtgattctgtgatactggactctgagaaagatgatatccactgctgtgcattgggctggctctccatggtttacgaaggagtaccccagtgtcagtgtaattccatcaagaactcatcttcagaggaagagaaacaaaaagagcagtgttctcctttggataccaacagttgtaaacaaggagagagaacttctgatagagatgtcactgttgttcaatttaagagccttgtaaataatccaaagactcctccagatgggaaaagtcattttcctgaactacaagacgacagtagaaaagatacacccaaaacaaaacataaaagcttaccaaggacagaacaagaattagttgctggtcagttttcatctaaatgtgataaactaaatcccttgcaaaatcacaaaagaaaaaaattgaggtttcacgaggtaacctttcactccagtaataaaatgacagcatcttatgaacaagcttctcaggaaacccgacagaagaaacatgtaacacagaactcacgtccactaaaaacaaaaacagcttttttgccaaataaagatgtgtataagaagcatagttctttgggacagtcattatcaccagaaaagataaaattgaaactcaaatcagttagcttcaaacaaaaacgaaagttagaccaagggaacgtattagatatggaagtaaagaaaaagaaacatgataaacaagaacagaaaggaagtgtgggagctacattcaaattaggtgactctttgtcaaacccaaacgaaagagccattgttaaagaaaagatggtatcaaatactaagtctgtagacacgaaagcgagttcatctaaatttagtagaattctaactcctaaggagtatttacaaaggcagaagcataaagaagctctgagtaataaagcatcgaagaaaatctgtgtgaaaaacgtgccatgtgattctgaacatatgagaccaagtaaacttgccgtgcaggttgaaagttgtgggaaatcaaatgagaaacacagcagcggcgtgcagacctctaaagaatcattaaatggcttgacaagccatggtaaaaacctcaaaatccaccattctcaggagtctaaaacatacaacattctaaggaatgttaaagaaaaagttggtgggaagcagcctgataaaatatggattgataagactaaattagacaaattaaccaatataagcaacgaagctcaattcagccaaatgcctccccaagtaaaggatcaaaagaaattatatctgaatagagttgggtttaaatgcactgaacgtgaaagcatttctctcaccaaattagaaagttcacccaggaagcttcataaagataagagacaggaaaataaacataagacctttttaccggtgaaaggtaacacagaaaaatcaaacatgctggagtttaaattatgtccagatatcttactaaagaatacaaactctgtggaagaacggaaggatgtaaagcctcatcctaggaaggagcaagcccctctgcaagtttcaggaataaaaagtacaaaagaagactggttaaaatttgttgctacaaagaaaaggacacagaaagacagccaagagagagataatgttaattcaagactctcgaagagaagcttcagtgcagatggatttgagatgctacaaaacccagtaaaagattcaaaagaaatgtttcaaacctacaaacagatgtacctggagaagagaagcagaagccttggtagcagtcctgtaaaataattacaagatgtggttttgtaattgccactgggaaatttctttccttttctgttcaaaatatttcgctgaaactaatgagaaatgccatgataaagatttctcagagtttggttcccactttcattgtatttcattgaaagtgcttaattaaaatggcttgagaactttgggtagccatgtgtaagaaatggatggtattcaccggggaaacaaggtatttgaatttctactttattgaaccagatttaccattattttaaaaggaatgcttatacaaatcaatttgaaattctacccatcttgagggaggaccgttcctcagttaaggacttgtttatttaaatgggactgtaaatatgttttggtttctaagctatattagcaaaatttatttttcaaaaatgcccactgtgatgtgaatgtcaaaatatattcttaagtgttttataactaattgtaaactttttttcagaagtcttattttatacttgtgaaactgaacacaattttgggacaacgtttaaacattacttttcatacttgaaataaacatttattttttaaaaaactaaaaaaaaanaaanaaaanaaaaaagcatgcgggcgcatttgagcttacttggccaattcgccctttagggaggcggataccattactggcccgnctttacaacgggngaatgggaaacacctggcgtccccacttt

SEQ ID NO: 25263 - DNA, 2375 bp, Homo sapiens; identical to SEQ ID NO: 22491
  misc_feature 2358, 2360, 2361, 2362, 2363, 2364, 2365, 2366, 2367, 2368,2369, 2370, 2371, 2372, 2373, 2374, 2375: n = A,T,C or G

SEQ ID NO: 25264 - DNA, 824 bp, Homo sapiens
  misc_feature 1, 2, 3, 4, 824: n = A,T,C or G
nnnnactaagaggtgtactctgtgaagtaaacgtaacctattagcattaaaactacagcattgagcctggcccaatatctcattaactcttcatccaaaaccaggactcagctggcagactggcttgatttggaatgtttttattagaggaaaaaagaaagccatattatctggaaaaaaaattcattttaaataccatcattcaacaaattatgttcagaaagtggtcagaacttaagcaagaaaagtaaagaaagaatgcagaattgtggagcaatgctttaggaaatatttctacctgaacacttgtactcttgaagtcacaacaaaataatgatgagcttttcacatcacctttatggtttcaatccctagctcaaagcttcctggaatcttttattttttgtaaacttttttttcttttgttaaaataaataaaacattcaatgtttttctccttttctctcttattacttctttcctttggcattttcaatttgaaatgctttcctttggttgttggttttattctccccctacccctccccttttcttattattcagaatataaacctgcaaagctctgctctgttttggttttgaaagtttaagcttttctgcttctgtgagagcacaggcttctgtcccttttgattccaactgaacttttgtgttctctaatgatactaacacggtgtaggttttacagtctcctaatttgtactggtaatgcatattccaaataaatagtttcttttgttgcaaaaaaaaaaaaaaaaaaagatctttaattaagcggctgcaagcttattccctttagtagn

SEQ ID NO: 25265 - DNA, 511 bp, Homo sapiens
  misc_feature 508, 509, 510, 511: n = A,T,C or G
acgccagtatacatacatttccagtatatgtcagaccactaagcgcattacagtcccatacaggccgatacaccattttttttttcttaaaaaacatgcataggcagatttttttttttttttacagaatatagatgctttatcactgttaactttttttttttttttttttcccgtaaaccctaacaaacaccactttgttatgaagaccttacaaacctcttcttaagacattcttactctgatccaggcaaaaacacttcaaggtttgtaaatgaccccttcctgacataaatccttttttattaaaatgcaaaatgttcttcagaataaaactgtgtaataatttttatacttgggagtgctccttgcacagagctgtcatttgccagtgagagccttcgacagggcaggtacatttccacaaatctaagaattgccctataaacatagcaggattttgagggcttgaaaattttccattattctggacatgaatttctaaaannnn

SEQ ID NO: 25266 - DNA, 6221 bp, Homo sapiens; identical to SEQ ID NO: 25183
  misc_feature 1, 2, 604, 1889, 6215, 6216, 6217, 6218, 6219, 6220, 6221: n = A,T,C or G

SEQ ID NO: 25267 - DNA, 1980 bp, Homo sapiens
  misc_feature 1, 2, 1977, 1978, 1979, 1980: n = A,T,C or G
nnagctacttggggggctgaggtggcaggatcgcttgagcctgggaggttgagactgcagtgagccaagattgcaccactgtcctcccacctgggcaacagtgagaccctgtctcaaaaaaaaaaaaggcagtggaaatagagaagtaacttaaaggtcacactgacagaatttctggttctgagcgtcaactctccagctgtgatggcggaactgactgcttgctgcctttaattgtcttgctctctatgggaaaaaaacaaaagggcttcagtctcatggatgttatttggtgtttgtaaagatacgttttcttttaaacgattttcaaaatatgtctaaattttggtgttgtgtaatgcataatgctttctcaccaacagaaaaaaggaaaaaaattgttttcagttaaacactacatgtcctacttgaactccactgggacgctggtttggcatttactaaaccactgagcacatggggtctttcaggatcctctcccttggaagggcaatgtgtgagctaaggactgttttttttcttactctccaatgtaaatatatgagtatttgagtttttaaatcacttcaacattatttgagcatttactttgtatttttacaaacacataaacacacagccgtagcacttagaagaaaagaggctttctaagcattccttcctctgcaggatatttgggatcctcttttctatgtatgtatatatataaaaaactatgaatcactcacactcactcgaaaactatgcagggctagggagcgtttatgagctaccgggtaaatgaattacatgcactttgaagtaaataggttttctattgggtgtcaacaacgctgatttctcccaaaactatagtttctcttacggtcttttcctcctttaccctgtggatatacactcaggaataatctgacattttagaaaagccgaacagtagatagtctccaagatgggaaacatgtcgtgtgtctgcacgccccggcaaactgccgccactcgttctgctgcctgactggttagctgctgtgcgggtgcgctcggtgacgctggtggtggtgcacgctcccgagctcccagagttaacactaatctgcaggtcggctgtgcatcgcattcgaggctccttttttaaagagaaaagcataggcctctgttctcatttgtaagaagtttgactcataatagaagacggtgtcttttgaagcccagtctctgtctgtcttcagaaacaaaagtgaatgccgtcatgttccttgatgtgtgtttctgccacatatgtatgttgacatgttcatgtactgcgccggtactgcaagtaagactcaacagacctaatttggatggggagaaaaactctcatccctgacccttccccccccgcaaatgttagaccagagctgttgatcccacacattcatttttctgaaaattcatgaactattctctcatatccctgaaatataaaagtaagtggccactattcctaagattatttagtttataaagtttgcttttaatcatacaatagcttacctggctaaaactttgcgtataaagggaaaacttgctttaatctgtgggattgcggaccgatgcgacttgcagaaggtaaacaggcgtgggttttgtgtgcgttaggttaggtgttagtggacttttaatgtatcttgtgaagtatggttactagggtaggttcaagagctacatgcctctggcttttgaacccatctattaaatcttttttaatgctgtactaagataaatgtgaagtctgagtaaggttgctcagaaaaaaaaaacagggttttttttaataacatttggccggggacgggccttccggcgacgagcttgggacacctccatccgctttccttgagactgggcacgcgtgtgaacccgtcggccgggttggtatacaccctcccgacggagggataaagaggcgctctagannnn
